United States Patent Application Publication US 2005/0228172 A9 - sequence listing, part 12

SEQ ID NO: 38884 - DNA, 551 bp, Homo sapiens
gccttgctgatatatattaatttttgagaaaactgaaacttttgttggttccataaatcttactatatttagaataacatttaaaagcattaactctgggtaatagttgcattcatttgattctcctgtgtccttgagaaagaaaggatctgggtacctcatttgggcaacctgaagaaaaatactcacatgtatgggactatcaggtccatttgatacttaactataaacaatgrgcttctgggattagaactattacggtagctcatatttaaataggcaaataaatctgccttgagaaatttttaattcctagaatcataggcaacatgttactcttgtgaataactaatcacctatcctgttacttgactttctaaagggctttattctctggcttctgtagcagctccctccctccctcttcctctattaaaaggtcattgcttaggagtttgctcagaggttaaatccagctgtattcctacagattttttttaacagtaataagcaaataccacaaaataattagcacaaaataattggcctct

SEQ ID NO: 38885 - DNA, 551 bp, Homo sapiens
gccttgctgatatatattaatttttgagaaaactgaaacttttgttggttccataaatcttactatatttagaataacatttaaaagcattaactctgggtaatagttgcattcatttgattctcctgtgtccttgagaaagaaaggatctgggtacctcatttgggcaacctgaagaaaaatactcacatgtatgggactatcaggtccatttgatacttaactataaacaatgagcttctgggattagaactattacggtagctcatatttaaataggcaaataaatctgccttgagaaatttttaattcctagaatcataggcaacatgttactcttgtgaataactaatcacckatcctgttacttgactttctaaagggctttattctctggcttctgtagcagctccctccctccctcttcctctattaaaaggtcattgcttaggagtttgctcagaggttaaatccagctgtattcctacagattttttttaacagtaataagcaaataccacaaaataattagcacaaaataattggcctct

SEQ ID NO: 38886 - DNA, 1100 bp, Homo sapiens
tcatgctagttaaccttggattaatgttgatattgttatttaaattccctactcatctcatccagtatgcccttgggattattgaccatcatctatatctgctcagttgacatcttccttaatttgcttcttttcatattccagggggtatgctggatataattaaaactaaaaatggaagtagattcagagataatatggcttaaagattcttagtgcgtgataggtatattttccccagagttatagtcccagaacaaattggaccttcagcttataaatccagaacctcttaaatcagaaattagcaaacactttaattaaattaaatctttggattatattcttcctccactactgtattaaagcttttcatatctaaattaccaaaggatttaaatttacttattttttctatacgctaagttctaaaaaaattcaacatgatatatttttccaaagaaatgcttctgctttctcagaccatgtttttcaggtagtagtgtatgctttcagaacctgatttcaattatttttttttttcaggaattgaggtgtctccatccaatatctctatccaatgggaatctgccaggtataaaccaaaactactttactattgcttactcttaataatgatatatttcccatttatcaattacctaaaattggtatacagtatataagactgaactttttattgacctatcagtgattattcacgaaaagggactagttaggaacaaaatgtcataagttcaagacacctgagttgttgtcagatcaataaaggatgaataaaagttagccaggactactgtagggttaaagggagggtgttgctttaagagggccaatttacaacaggattttggaattgcaattgctcacatactcaaaatctaggtatgagcttgtttcttaagaaggtgcatgtgtttcttcagataaggtgtattcatcagttctggttgccatatcaaaatattataacttctacagaaatttattttctcacaattctagaagctagaaatctgagatcagggtgacagcatggttgagtattgctgagagccctcttcctggactgcasatgg

SEQ ID NO: 38887 - DNA, 715 bp, Homo sapiens
ccactggctacatggagtttccttctctagcaactttgtctcagagaagtcaccatcaagatccataagaatgtctcattagcacatgtacttacaaagtgcaagactaagatggatgagagggacctaggttatcaatcaaattgtatgtaggatcagggaatagcctagatctagggcttggctattctatagcttgctcagtgttcattctgtttggacatagcattggtatgttgcagaggtcagaggttagtctkggttggaatcttcaatggtgtgggatccagtgacttctgaaaacaggacagccttctgaaaacttctcccacctctgagctcaagaggaaacccaaacaatacctgcctttgcctacagcatgtgttgcaaagtatgaagtcaaaatgtccccaagggcaagggagtgatggcagtcttttttttttttttaatagtggagggggaaatacacaataattctgagaatgttcaatgagatgtggctatctgatgggctatttccagctagtgcttttttgccacaaggtatagtagttcttactgctgtatatatttggggtaaagcctagactgggaacagcttggcactgacttgttactgtgaaaccccaattcttcagcagagagctttctgtgcaggaggagacagcaaatcatctccagtctgggcacatggccacatggaactaccaa

SEQ ID NO: 38888 - DNA, 1166 bp, Homo sapiens
ttctttcttaaggatagtaaaatccgatgcatattcagatattcagagaattgtcagcttcttggctatcttacctgtttctaactgtacagtgcttaatgttgaagttgacataagaaaagagtgagtttctatccgcatttaaagctagttttccytcctggtttattttcaaaaacaagataaagtgttggaattttttcgaacattttggttaagaaattccatataatttcatcattgtgatttactcatctgtcctaaagcataagtcctaggatgactagagctcctcaaaaatagtatgatagctgtacatttatatagtagaaatcattatattttcttatagcctacattgtattcaataaaatttataaattgtaggaatgaattaagtacttgaaaattcttttttttttttttgttcttgaaacagtctggctctgtcacccaggctacagtgcagtggtgtgatcttggctcactgcaacttccctctcccaggatcaagtgattctcctgtgtcagcctcctaagtagctgggactacaggcgtgtgccaccatgcccggctaatttttatatttttatttttatttttattttttttagtagagacagggtttcaccgtgttagccaggatggtctctgtctcctgacctcgtgatccatctgccgtggcctcccaaagtgctgggattacaggtgtgagccaccgcgccccaccagtcctgaaaaattctagcatagagttcaaaatgggcaactacccttgatttttgaagtgggttattttaggcagaaataagagaaaacaactactataattgaagaaattcatttatcataatctaaataaatatgggattggagtgttataaaagcacatgtttgggcctctcccaagaaaaacatactacattgttgctgagcaacccactctcagagagttagagatagaattcatgtcaaaagtcgatatccccatgaaaacatttttttcatgtgggaaagttaataccttgacagggagaaattcatccatgtcctaattcaaattcaagtctaactcagaagtgatgtaaaccctatatttgtagagaatgtttaaggctacatttcattgtttctataccttagcagaaaaatatttgctgtgagg

SEQ ID NO: 38889 - DNA, 2547 bp, Homo sapiens
tgcatagtggaaaaaaataatatactgttgttggtgtcaagtttttccttataccaacagtaacaccttgggaagttttattaatgcctctagcctttcattgtaaaatagagatgattatgtttaccacctagggctgtttgagcatcaaataagataaagtgtgtgacgatcttatcacagtaattggcatgaaataggtgtttgatacatgttggcacctttttttctctctttaaagttaaccaacaagatccttttctcatctgattacaagtagtcagtttcttatgagggccatctgggaagtcagaactagaagcttatgctaattttatgacctcatcacattctgtcatcaaagaaaagagcacgatctagggctgattccaaactttctgcagaaatgaattttttatacctacctggtgctttggagccatcctaggctatttagtacttgaatgtttaacaaacttgcttaaggctcttagattaaacccggtggtttttgctccaaattgctcagatctcagtagtagatttttgccccatggaaaatcatggacattactgatctrtaagaaataagtatcattttatctttggttaagatggtgtcattgtcatcatcatgacctctcctagctgccaggaactcaacacactgttgcttggggtcacaaagacccatcacctgctcccagccactctttccctgaccctcccagacattactcctggagcagggtgtcacccgctgcttctctggaagttgggcttgaagcagaatggaatgaaccactcaaaccagaaagatccccactccactctcttctggttgtattatgtacccatagtttttctcaaaaagttcttgagaaacggggtgaggaggtatagctagaagatttttcatgagcctcagggagtcaaaatgaagcctttcaatgcccacattttgactacaagcagatgccaagcgatgatgggagggagacttgggcagtcctcctcctaagacagccagtgcagtgaagttattgagagcatgggtttgtagttaattgctaccactgtgagtctaaaatctgcatagatgtgtgaccatagtccaagtcctgagcttctccatgccccacttgcctcctctgtgcaatagtcataacactactcaattcacgctgttaggaggattaaataagacaattaatgtaaaatgtgtacgtagtatttgacactactctataaacactgcaaagtaacttaacagtgaggaccttcaagtcacattatgcattcaagagtttagaaattactgaatgacaagaatccaaagcagtttgaattggattatcaaaaaacaaaaggataatagtttacctgggacaaatgttaattaagtagggagaacaacaaagcattttctcttcttatttaagttacgtaaaagctttatttattataatctttaacattttatctcaattagacattgggccagtcatagccaggaaggcagtggctgattggatttgctggtgattctcaggcttgcattttcttattgattcatctccctttactgtcttcctgatttcccccaccatgaaggaggatgaattcaccatgacagagaaacagttcacttgcccccagatgaggcatagcttcccctgaatggaacaacttaagcaggtgtactggcctacaaaactactgtgccctaatggccaccttccattccctctggctatgacttatttctgtcaccctgtattttgtcctctaggcacaaagagaaccatagctcataacaatggcatattgtcccagttgcatgtacgtgcctgtacatttgcctccacacacaaaataacatgaaaacacaaagatgtatttacaggcattcacacaaatatgcaaggtcaggtgagaagtactctgataaacataaataccatgtggccacatttaatagatataaaaaacaatacttgcaaacacactcatccgtgcccactctcacacagacacacacaaacatcaaacacacacacacacacactttgatcatgtgactatcctgcaggactgtggagtacatatagtacaaatagacaattctgcttgttttaatcacattttttttaatgagatttctctagatccctggatcagcaggacaattccatatcctattacaatctgccaagatgaaatagataaatctattagcctgctctttgcttgtttcatcattgtgacagcctctcacgggtctacatccatcaagttcccacgccatttgacaggcaagtctccaccaccaagctgcaggttaatagctccttaatctctatttaattgctcattaataattccaatactgctttcctctgttaattgattaaaaaacagtctcagcggaagtgaataatgaagtttggtagcagccgactatgggatgagtttttgttgtcaagataatcaagaagaaatagtgaccaaaacactctttgttccatttgcagatttctataatgc

SEQ ID NO: 38890 - DNA, 2547 bp, Homo sapiens
tgcatagtggaaaaaaataatatactgttgttggtgtcaagtttttccttataccaacagtaacaccttgggaagttttattaatgcctctagcctttcattgtaaaatagagatgattatgtttaccacctagggctgtttgagcatcaaataagataaagtgtgtgacgatcttatcacagtaattggcatgaaataggtgtttgatacatgttggcacctttttttctctctttaaagttaaccaacaagatccttttctcatctgattacaagtagtcagtttcttatgagggccatctgggaagtcagaactagaagcttatgctaattttatgacctcatcacattctgtcatcaaagaaaagagcacgatctagggctgattccaaactttctgcagaaatgaattttttatacctacctggtgctttggagccatcctaggctatttagtacttgaatgtttaacaaacttgcttaaggctcttagattaaacccggtggtttttgctccaaattgctcagatctcagtagtagatttttgccccatggaaaatcatggacattactgatctgtaagaaataagtatcattttatctttggttaagatggtgtcattgtcatcatcatgacctctcctagctgccaggaactcaacacactgttgcttggggtcacaaagacccatcacctgctcccagccactctttccctgaccctcccagacattactcctggagcagggtgtcacccgctgcttctctggaagttgggcttgaagcagaatggaatgaaccactcaaaccagaaagatccccactccactctcttctggttgtattatgtacccatagtttttctcaaaaagttcttgagaaayggggtgaggaggtatagctagaagatttttcatgagcctcagggagtcaaaatgaagcctttcaatgcccacattttgactacaagcagatgccaagcgatgatgggagggagacttgggcagtcctcctcctaagacagccagtgcagtgaagttattgagagcatgggtttgtagttaattgctaccactgtgagtctaaaatctgcatagatgtgtgaccatagtccaagtcctgagcttctccatgccccacttgcctcctctgtgcaatagtcataacactactcaattcacgctgttaggaggattaaataagacaattaatgtaaaatgtgtacgtagtatttgacactactctataaacactgcaaagtaacttaacagtgaggaccttcaagtcacattatgcattcaagagtttagaaattactgaatgacaagaatccaaagcagtttgaattggattatcaaaaaacaaaaggataatagtttacctgggacaaatgttaattaagtagggagaacaacaaagcattttctcttcttatttaagttacgtaaaagctttatttattataatctttaacattttatctcaattagacattgggccagtcatagccaggaaggcagtggctgattggatttgctggtgattctcaggcttgcattttcttattgattcatctccctttactgtcttcctgatttcccccaccatgaaggaggatgaattcaccatgacagagaaacagttcacttgcccccagatgaggcatagcttcccctgaatggaacaacttaagcaggtgtactggcctacaaaactactgtgccctaatggccaccttccattccctctggctatgacttatttctgtcaccctgtattttgtcctctaggcacaaagagaaccatagctcataacaatggcatattgtcccagttgcatgtacgtgcctgtacatttgcctccacacacaaaataacatgaaaacacaaagatgtatttacaggcattcacacaaatatgcaaggtcaggtgagaagtactctgataaacataaataccatgtggccacatttaatagatataaaaaacaatacttgcaaacacactcatccgtgcccactctcacacagacacacacaaacatcaaacacacacacacacacactttgatcatgtgactatcctgcaggactgtggagtacatatagtacaaatagacaattctgcttgttttaatcacattttttttaatgagatttctctagatccctggatcagcaggacaattccatatcctattacaatctgccaagatgaaatagataaatctattagcctgctctttgcttgtttcatcattgtgacagcctctcacgggtctacatccatcaagttcccacgccatttgacaggcaagtctccaccaccaagctgcaggttaatagctccttaatctctatttaattgctcattaataattccaatactgctttcctctgttaattgattaaaaaacagtctcagcggaagtgaataatgaagtttggtagcagccgactatgggatgagtttttgttgtcaagataatcaagaagaaatagtgaccaaaacactctttgttccatttgcagatttctataatgc

SEQ ID NO: 38891 - DNA, 2547 bp, Homo sapiens
tgcatagtggaaaaaaataatatactgttgttggtgtcaagtttttccttataccaacagtaacaccttgggaagttttattaatgcctctagcctttcattgtaaaatagagatgattatgtttaccacctagggctgtttgagcatcaaataagataaagtgtgtgacgatcttatcacagtaattggcatgaaataggtgtttgatacatgttggcacctttttttctctctttaaagttaaccaacaagatccttttctcatctgattacaagtagtcagtttcttatgagggccatctgggaagtcagaactagaagcttatgctaattttatgacctcatcacattctgtcatcaaagaaaagagcacgatctagggctgattccaaactttctgcagaaatgaattttttatacctacctggtgctttggagccatcctaggctatttagtacttgaatgtttaacaaacttgcttaaggctcttagattaaacccggtggtttttgctccaaattgctcagatctcagtagtagatttttgccccatggaaaatcatggacattactgatctgtaagaaataagtatcattttatctttggttaagatggtgtcattgtcatcatcatgacctctcctagctgccaggaactcaacacactgttgcttggggtcacaaagacccatcacctgctcccagccactctttccctgaccctcccagacattactcctggagcagggtgtcacccgctgcttctctggaagttgggcttgaagcagaatggaatgaaccactcaaaccagaaagatccccactccactctcttctggttgtattatgtacccatagtttttctcaaaaagttcttgagaaacggggtgaggaggtatagctagaagatttttcatgagcctcagggagtcaaaatgaagcctttcaatgcccacattttgactacaagcagatgccaagcgatgatgggagggagacttgggcagtcctcctcctaagacagccagtgcagtgaagttattgagagcatgggtttgtagttaattgctaccactgtgagtctaaaatctgcatagatgtgtgaccatagtccaagtcctgagcttctccatgccccacttgcctcctctgtgcaatagtcataacactactcaattcacgctgttaggaggattaaataagacaattaatgtaaaatgtgtacgtagtatttgacactactctataaacactgcaaagtaacttaacagtgaggaccttcaagtcacattatgcattcaagagtttagaaattactgaatgacaagaatccaaagcagtttgaattggattatcaaaaaacaaaaggataatagtttacctgggacaaatgttaattaagtagggagaacaacaaagcattttctcttcttatttaagttacgtaaaagctttatttattataatctttaacattttatctcaattagacattgggccagtcatagccaggaaggcagtggctgattggatttgctggtgattctcaggcttgcattttcttattgattcatctccctttactgtcttcctgatttcccccaccatgaaggaggatgaattcaccatgacagagaaacagttcacttgcccccagatgaggcatagcttcccctgaatggaacaacttaagcaggtgtactggcctacaaaactactgtgccctaatggccaccttccattccctctggctatgacttatttctgtcaccctgtattttgtcctctaggcacaaagagaaccatagctcataacaatggcatattgtcccagttgcatgtacgtgcctgtacatttgcctccacacacaaaataacatgaaaacacaaagatgtatttacaggcattcacacaaatatgcaaggtcaggtgagaagtactctgataaacataaataccatgtggccacatttaatagatataaaaaacaatacttgcaaacacactcatccgtgcccactctcacacagacacacacaaacatcaaacacacacacacacacactttgatcatgtgactatcctgcaggactgtggagtacatatagtacaaatagacaattctgcttgttttaatcacatttttttwaatgagatttctctagatccctggatcagcaggacaattccatatcctattacaatctgccaagatgaaatagataaatctattagcctgctctttgcttgtttcatcattgtgacagcctctcacgggtctacatccatcaagttcccacgccatttgacaggcaagtctccaccaccaagctgcaggttaatagctccttaatctctatttaattgctcattaataattccaatactgctttcctctgttaattgattaaaaaacagtctcagcggaagtgaataatgaagtttggtagcagccgactatgggatgagtttttgttgtcaagataatcaagaagaaatagtgaccaaaacactctttgttccatttgcagatttctataatgc

SEQ ID NO: 38892 - DNA, 2547 bp, Homo sapiens
tgcatagtggaaaaaaataatatactgttgttggtgtcaagtttttccttataccaacagtaacaccttgggaagttttattaatgcctctagcctttcattgtaaaatagagatgattatgtttaccacctagggctgtttgagcatcaaataagataaagtgtgtgacgatcttatcacagtaattggcatgaaataggtgtttgatacatgttggcacctttttttctctctttaaagttaaccaacaagatccttttctcatctgattacaagtagtcagtttcttatgagggccatctgggaagtcagaactagaagcttatgctaattttatgacctcatcacattctgtcatcaaagaaaagagcacgatctagggctgattccaaactttctgcagaaatgaattttttatacctacctggtgctttggagccatcctaggctatttagtacttgaatgtttaacaaacttgcttaaggctcttagattaaacccggtggtttttgctccaaattgctcagatctcagtagtagatttttgccccatggaaaatcatggacattactgatctgtaagaaataagtatcattttatctttggttaagatggtgtcattgtcatcatcatgacctctcctagctgccaggaactcaacacactgttgcttggggtcacaaagacccatcacctgctcccagccactctttccctgaccctcccagacattactcctggagcagggtgtcacccgctgcttctctggaagttgggcttgaagcagaatggaatgaaccactcaaaccagaaagatccccactccactctcttctggttgtattatgtacccatagtttttctcaaaaagttcttgagaaacggggtgaggaggtatagctagaagatttttcatgagcctcagggagtcaaaatgaagcctttcaatgcccacattttgactacaagcagatgccaagcgatgatgggagggagacttgggcagtcctcctcctaagacagccagtgcagtgaagttattgagagcatgggtttgtagttaattgctaccactgtgagtctaaaatctgcatagatgtgtgaccatagtccaagtcctgagcttctccatgccccacttgcctcctctgtgcaatagtcataacactactcaattcacgctgttaggaggattaaataagacaattaatgtaaaatgtgtacgtagtatttgacactactctataaacactgcaaagtaacttaacagtgaggaccttcaagtcacattatgcattcaagagtttagaaattactgaatgacaagaatccaaagcagtttgaattggattatcaaaaaacaaaaggataatagtttacctgggacaaatgttaattaagtagggagaacaacaaagcattttctcttcttatttaagttacgtaaaagctttatttattataatctttaacattttatctcaattagacattgggccagtcatagccaggaaggcagtggctgattggatttgctggtgattctcaggcttgcattttcttattgattcatctccctttactgtcttcctgatttcccccaccatgaaggaggatgaattcaccatgacagagaaacagttcacttgcccccagatgaggcatagcttcccctgaatggaacaacttaagcaggtgtactggcctacaaaactactgtgccctaatggccaccttccattccctctggctatgacttatttctgtcaccctgtattttgtcctctaggcacaaagagaaccatagctcataacaatggcatattgtcccagttgcatgtacgtgcctgtacatttgcctccacacacaaaataacatgaaaacacaaagatgtatttacaggcattcacacaaatatgcaaggtcaggtgagaagtactctgataaacataaataccatgtggccacatttaatagatataaaaaacaatacttgcaaacacactcatccgtgcccactctcacacagacacacacaaacatcaaacacacacacacacacactttgatcatgtgactatcctgcaggactgtggagtacatatagtacaaatagacaattctgcttgttttaatcacattttttttaatgagatttctctagatccctggatcagcaggacaattccatatcctattacaatctgccaagatgaaatagataaatctattagcctgctctttgcttgtttcatcattgtgacagcctctcacgggtctacatccatcaagttcccamgccatttgacaggcaagtctccaccaccaagctgcaggttaatagctccttaatctctatttaattgctcattaataattccaatactgctttcctctgttaattgattaaaaaacagtctcagcggaagtgaataatgaagtttggtagcagccgactatgggatgagtttttgttgtcaagataatcaagaagaaatagtgaccaaaacactctttgttccatttgcagatttctataatgc

SEQ ID NO: 38893 - DNA, 723 bp, Homo sapiens
aagagttagttcttgttggttttgaaaataaaactgttttggattttgaggttttccaggcagcaaaatattatccaggtgagaagttatctcaatggaaagatcaaaatgaattattttaagatcctttgttaagtcccaacaaagataaggtagtgcttggtgattttctcagttctaccaaagagcatccaaaaatttaagtgttgtcctgtagtaycctgatatgccaaagaggagagaagcctgtctcaagacgagttgtggatatgggttttgctgaatgtagtagattcaagtcagatacctaggacacctgcaaagtcgttaaagtagttgtaatcaatagagcactgacagtttgaactaaaaggaattgtgattgttcaaatttcagaaagcttcctgggctctcaactttctacaggtagcaagaagtctaaaatcctatttaactgcaaagagaggccattttatatgggaaaggaagacatctcagatcagagccaagagctggcaacaatggactgtcagggtgaaatagagagtaatggaatggggaatcacccaggcagcggaagtgcgtcctttcagttactacttctccttctgagatccaccaactcctctgccttcattacattactttcattcctctccatcactcaacttggtccatgagttttggtagaagaccgcagtctcctatcacatttctcccaa

SEQ ID NO: 38894 - DNA, 560 bp, Homo sapiens
gcatacaaccacacaggtgtgcatgtccacacaaaagaacacgcacacataaatacacaaccaacccatacgccaagcattgtttccaaaggtgatgctgccatggaatatcccggagtttgccagggttgagaaamgtggcttctcttatccttgatgggaattctgtgtacatattataatgtgttcaacctatctgggccttgtgcaattgtacgacagtattggtaaaaaccactccccagaaggtacctgggctatgagtcatcccagaggacctggagaagtaggaagagcaaaaatctgtgctgaggggcgtggcctattcattggaatcagaacctgcccatcatctgcactctgtaagccaactgaagagcttaaaatgggaagtaggaacctagtgggcaggctccagtggggtgtggactttgaaaaaagaaaggaaggccaggcacagtggctcatgcctgtaatcccagcactttgggaggctgaggcgggcggatcacttgaggccaggagttcaagaccagcctggccaacaaggcgaatcccat

SEQ ID NO: 38895 - DNA, 558 bp, Homo sapiens
ggtgtttctaaggattttaggagttgtatgtcaggaaatggggttgaagaccaaatatatatttcataatagcacaatctttcagcttatttattttctcttggctttatctatcctgttctggatttatcccttgttgaatttttatgtcaataatcaaattttaaatttccaagatgtgggagcgcccagttacttggcacattttcctgcctccttgaaccaaatgaccacactcactgctggggtcaaagatgtcagtcaccagccagacatggtggttcacacctgtaaacccagcactttgggaggccaaggtcggtggatcccttgagcccaggagtttgagactagcctgggcaaaatggtgaaaccccatctctacaaaaaatacaaaaattagctggttgtggtggtacatgcctgtggtcccgactactggggaggctgaggtgggaggagagcttgagcccaggaggttggggctgcagtgagttgagatcgtgccactgcactccagcatgggtaatagagygagacccggtctctagaaaataa

SEQ ID NO: 38896 - DNA, 977 bp, Homo sapiens
aagctgcagaccaggcatggtggctcatgcctataatccctgcactttgggaggccatattgtacggattgcttgagcccaggagttgaagaccagccctggcaatgtagcaagatcctgtgtctacaaataataatttaaaaaaattagcctggcatagtgacacatgcctatggtcccagttactcaagaggttaaggcaggaggattgcctaagcccaggaggttaaagctgcagtgagccatgatcatgccactatactccagcctaggggacagagtgagaccctgtctcaattaaaaaaaaaaaaaaaggtatattccctgggccaggttttctctctctgtttatctggctaactcaaatttaacctttagggttgagattagatcttacttctcccaggaagccttttctgatctcctaagtctgcattagatgtcattcctctgtgctccgacagatcctgtatttcccccatcatcacagcatttacagtgtgcattgtcattgcttggttacaaggcaatttcctttgctagtctataacttccatggggtagggaccatgtctgtagttcactgtcgtttggtgccaaacaaagtacctgatacctggtaggcactcaattatttgttgtttgaatgaaataatamaggcacaagaatagtgctgccatgtacctagaagaggtggaaaattttcatggtggagggtggctccctgaggccaggccttggtatagaggctgatggacagaacagtagctcgtggatttcgggggcagtgatggcttcagacagcctgatacgttaggaggagagaggataccaaaacagcaccttcaaagtcaggagctacatggaaacagaatggaagacatcagctaaaagataccctagggacttctgcctctcctcaccctctagcaatataagtggggaaggagaaagtccccaaatacagtgatgcacc

SEQ ID NO: 38897 - DNA, 977 bp, Homo sapiens
aagctgcagaccaggcatggtggctcatgcctataatccctgcactttgggaggccatattgtacggattgcttgagcccaggagttgaagaccagccctggcaatgtagcaagatcctgtgtctacaaataataatttaaaaaaattagcctggcatagtgacacatgcctatggtcccagttactcaagaggttaaggcaggaggattgcctaagcccaggaggttaaagctgcagtgagccatgatcatgccactatactccagcctaggggacagagtgagaccctgtctcaattaaaaaaaaaaaaaaaggtatattccctgggccaggttttctctctctgtttatctggctaactcaaatttaacctttagggttgagattagatcttacttctcccaggaagccttttctgatctcctaagtctgcattagatgtcattcctctgtgctccgacagatcctgtatttcccccatcatcacagcatttacagtgtgcattgtcattgcttggttacaaggcaatttcctttgctagtctataacttccatggggtagggaccatgtctgtagttcactgtcgtttggtgccaaacaaagtacctgatacctggtaggcactcaattatttgttgtttgaatgaaataatacaggcacaagaatagtgctgccatgtacctaraagaggtggaaaattttcatggtggagggtggctccctgaggccaggccttggtatagaggctgatggacagaacagtagctcgtggatttcgggggcagtgatggcttcagacagcctgatacgttaggaggagagaggataccaaaacagcaccttcaaagtcaggagctacatggaaacagaatggaagacatcagctaaaagataccctagggacttctgcctctcctcaccctctagcaatataagtggggaaggagaaagtccccaaatacagtgatgcacc

SEQ ID NO: 38898 - DNA, 977 bp, Homo sapiens
aagctgcagaccaggcatggtggctcatgcctataatccctgcactttgggaggccatattgtacggattgcttgagcccaggagttgaagaccagccctggcaatgtagcaagatcctgtgtctacaaataataatttaaaaaaattagcctggcatagtgacacatgcctatggtcccagttactcaagaggttaaggcaggaggattgcctaagcccaggaggttaaagctgcagtgagccatgatcatgccactatactccagcctaggggacagagtgagaccctgtctcaattaaaaaaaaaaaaaaaggtatattccctgggccaggttttctctctctgtttatctggctaactcaaatttaacctttagggttgagattagatcttacttctcccaggaagccttttctgatctcctaagtctgcattagatgtcattcctctgtgctccgacagatcctgtatttcccccatcatcacagcatttacagtgtgcattgtcattgcttggttacaaggcaatttcctttgctagtctataacttccatggggtagggaccatgtctgtagttcactgtcgtttggtgccaaacaaagtacctgatacctggtaggcactcaattatttgttgtttgaatgaaataatacaggcacaagaatagtgctgccatgtacctagaagaggtggaaaattttcatggtggagggtggctccctgaggccaggccttggtatagaggctgatggacagaacagtagctcgtggatttcgggggcagtgatggcttcmgacagcctgatacgttaggaggagagaggataccaaaacagcaccttcaaagtcaggagctacatggaaacagaatggaagacatcagctaaaagataccctagggacttctgcctctcctcaccctctagcaatataagtggggaaggagaaagtccccaaatacagtgatgcacc

SEQ ID NO: 38899 - DNA, 1378 bp, Homo sapiens
ggtgcaaacatggctcactgcagccttgagcttctgggctcagaccttcctcccacctcagcctcccatgtagttgggaccacatgtgcatgtcaccatgccccgctaatttcttgattttttctagagactggggtctcactttgttgccctgaatggtctcgaactcctgggctcaagcaatcctcctgtcttggactcccaaagtgtgggattaacaggcatgagctaccgcacccagcccacttttagctttttggcctaggcactgtgggtaggcatagaagaaagaatttttttaaaaatgctttgttcactgcgtaacgctcacaatagtgttcacacaaaagagatgctcattaaatatttgttaaatgattgaactaaagtttgataaagcaaaggcataacttagaaatgactgtctctagttcgcccaaagtatgaaattctgtatgcctaaaactctctttcagtaattctcttttatgaatatattctggaatatcaagaaagatctaggattcaggatttttttcagcccaatatttaccatctttactataagtgtacaaccatcccaagtcagacaagctgagtctatttggkttttttttgtaataaattttaattggaaaagatgaatttgggagaatgggaagaaggttttgaagggcaagcccttcagtcatttctgcttcctatggctttggccaccatctcactttgagggcttgttcttcaggatactgacagcttgatttctctgagtaatgtcacacaaaggaaattagctcagtatgtcttctactgaattccatctgtagctcaatgtttgaaggtatttgtgaacatgactacagagcaattttgataagacaaggcaatgttccagtctctgagaatattttccccaaagaactattttttaaaataccactgaacagcctgaaaacccacccacacatgagcaatctcctgcaatatacagaaagcttttcaggtgtcacagccataatagcaggtggttcctttgggtagaaaaattatggcaagaatatagcgacagaaagcaaactgttttgatattctgggtacaactttccccaagtgaatcattcccatatgcctacttttaccacgggcgcctttccagaggaagtgatttgtgtgaacggaggtgtagagatgcattctggtgggcacacttcattggtgcccatatttagcagatccaattaatcgtcagctatttgtcaacccattcctctgtaagtctcaaaatgcaaaattcgaatatgaatttgatacctatttttgctttccacataacaaatacataatcttgttatgaagattcagtagtgctcatttaagg

SEQ ID NO: 38900 - DNA, 685 bp, Homo sapiens
actagcatttttattgtttacagataaaccaaatctcccttactgaaaagggtgatgttgttgtccccatctcaatttaaaacaaaaatcaactaagctctaataggaaaagatgtgtacaggaagattgctaatggaaaacttttatttttacattttatttgtatttaatttttaaatttttatttgttttatttatttgaatggaagacaactgcattgaaaaataaaaagaaccgggtacggtggctcatgcctgtaatcccagcactttgggaggccgaggtgggtggatcacttgaggtcaggagttcaagaccagctgggccaacatggtgaaaccccgtctctagtaaaaatacaaaaaaattagcygggcattgtggcatgtgcctgtaatcccagctactcaggaggctgaggcaggagaattgcttgaactcaggaggtggaggttgcagtgagctgagatcacgccactgcactccagcctgagcaacagagcaagactccatctcaaaaaaaaaaaaagaaaaggaaaaaaagaaaaagaaagcacagttattaagctacttaattctgggctttccaaatcttagagtggtgtcatttgctagctgggtgaccacgaacaagttctttaacctctctgtgcctcagtttcctgatctctatggggaggata

SEQ ID NO: 38901 - DNA, 685 bp, Homo sapiens
actagcatttttattgtttacagataaaccaaatctcccttactgaaaagggtgatgttgttgtccccatctcaatttaaaacaaaaatcaactaagctctaataggaaaagatgtgtacaggaagattgctaatggaaaacttttatttttacattttatttgtatttaatttttaaatttttatttgttttatttatttgaatggaagacaactgcattgaaaaataaaaagaaccgggtacggtggctcatgcctgtaatcccagcactttgggaggccgaggtgggtggatcacttgaggtcaggagttcaagaccagctgggccaacatggtgaaaccccgtctctagtaaaaatacaaaaaaattagctgggcattgtggcatgtgcctgtaatcccagctactcaggaggctgaggcaggagaattgcttgaactcaggaggtggaggttgcagtgagctsagatcacgccactgcactccagcctgagcaacagagcaagactccatctcaaaaaaaaaaaaagaaaaggaaaaaaagaaaaagaaagcacagttattaagctacttaattctgggctttccaaatcttagagtggtgtcatttgctagctgggtgaccacgaacaagttctttaacctctctgtgcctcagtttcctgatctctatggggaggata

SEQ ID NO: 38902 - DNA, 685 bp, Homo sapiens
actagcatttttattgtttacagataaaccaaatctcccttactgaaaagggtgatgttgttgtccccatctcaatttaaaacaaaaatcaactaagctctaataggaaaagatgtgtacaggaagattgctaatggaaaacttttatttttacattttatttgtatttaatttttaaatttttatttgttttatttatttgaatggaagacaactgcattgaaaaataaaaagaaccgggtacggtggctcatgcctgtaatcccagcactttgggaggccgaggtgggtggatcacttgaggtcaggagttcaagaccagctgggccaacatggtgaaaccccgtctctagtaaaaatacaaaaaaattagctgggcattgtggcatgtgcctgtaatcccagctactcaggaggctgaggcaggagaattgcttgaactcaggaggtggaggttgcagtgagctgagatcacgccactgcactccagcctgagcaacagagcaagactccatctcaaaaaaaaaaaaaraaaaggaaaaaaagaaaaagaaagcacagttattaagctacttaattctgggctttccaaatcttagagtggtgtcatttgctagctgggtgaccacgaacaagttctttaacctctctgtgcctcagtttcctgatctctatggggaggata

SEQ ID NO: 38903 - DNA, 965 bp, Homo sapiens
aaatctaaaatcttcaaaaattctctggagtcagaatacgtatcaaggcagcagttaagagcaattataatattcattttaaaagaccaagaaattcagccaagtttgaggccttaagtacaaggatgaacatagaaatgacaatgaattttgcctaatagttttcataagtgaatgtctgggaaaaaagaattgaagtttcactctagctaatccagctaagaagatctaaaaggaatcctgaaatgatctattgggaattttactcaggtattgatagagaaatgttacaggaatgtccaagtcaattgtttcttacctgtggagtctagtctgttaatatcataaactgcctggctgtgaaacatccagaagtgtccgttgttgcaggaaggaagacaggaactacatggaacaatcacatgataacctacaatgttcccactagaaaagaaagtaaatgttactagataccatgtaataactagccagataagtcttttcatattgcttatataaatagaccatataatttagatctcatttcctaacaactttcattgctgagatctttgggatgggatgggggtgcagttctaccatcaagtgggaaagcagtctttaagtgaataatagtaaaatattctcacatttctttgctattattattattattattattattattattattattattgagacygagttttgctcttgtcacccaggctggagtgcctgcaacctccgcctcccaggttcaagtgattctcctgcctcagcctccagaatagctgggattacaggcgtgtgccaccatgcccagctaacttttgtgttattagtagagatgcggttttaccatgttggccaggctggtctcgaactcctgacctcaggtgatccacctgccttggcctcccaaagtgctgggattacaggcatgagccaccatgcttgtcctg

SEQ ID NO: 38904 - DNA, 965 bp, Homo sapiens
aaatctaaaatcttcaaaaattctctggagtcagaatacgtatcaaggcagcagttaagagcaattataatattcattttaaaagaccaagaaattcagccaagtttgaggccttaagtacaaggatgaacatagaaatgacaatgaattttgcctaatagttttcataagtgaatgtctgggaaaaaagaattgaagtttcactctagctaatccagctaagaagatctaaaaggaatcctgaaatgatctattgggaattttactcaggtattgatagagaaatgttacaggaatgtccaagtcaattgtttcttacctgtggagtctagtctgttaatatcataaactgcctggctgtgaaacatccagaagtgtccgttgttgcaggaaggaagacaggaactacatggaacaatcacatgataacctacaatgttcccactagaaaagaaagtaaatgttactagataccatgtaataactagccagataagtcttttcatattgcttatataaatagaccatataatttagatctcatttcctaacaactttcattgctgagatctttgggatgggatgggggtgcagttctaccatcaagtgggaaagcagtctttaagtgaataatagtaaaatattctcacatttctttgctattattattattattattattattattattattattattgagactgagttttgctcttgtcacccaggctggagtgcctgcaacctccgcctcccaggttcaagtgattctcctgcctcagcctccagaatagctgggattacaggcgtgtgccaccatgcccagctaacttttgtgttattagtagagatgsggttttaccatgttggccaggctggtctcgaactcctgacctcaggtgatccacctgccttggcctcccaaagtgctgggattacaggcatgagccaccatgcttgtcctg

SEQ ID NO: 38905 - DNA, 549 bp, Homo sapiens
atttcaataaataactaaattttgaagattcatgtagggcatatatatgttgattatggaaagggaaagtaccatttagagctagaaagaggtttatttgagtmaaataaaatggctattttaccaaataggaagcaaattcttaaggactctacacccaaaagcagttagtggctgaaaacaaacagattttaaaagggttcaattatgggaacaaatgtgtaatgtccaaaatagtctttattggagataaggattaaggctaagtctctatttttcatcccataaaaatctatttacatctctttcagagagagagagttttgaggaaagaaaactgaatttgatgaacaacggatctgatttaggatgccaattgcaaataatgatagaaaacggatttttttttttttggtgcaaaatttcatggataaaaatgaaaaacttaaatgacctctcctctccaacagtacagaaaattttgcctgaatttacctaaagtctacgccacggacttgattcagtgaaataggatggttgggcagggca

SEQ ID NO: 38906 - DNA, 1070 bp, Homo sapiens
tggaagaaagaaggaaaacatgacgtctccagccaaattcaaaaaggataaggagatcatagcagagtacgatactcaggtcaaaggtaagggttttgaaaaatagcacactgcaaatgctctgtggactggtgaggcgtgtatttccaccgtgatttgcaggttgttcatttctttgggtggagcagatgggggcaggctgaccccagaggtggtttcatagatgggtctgaacctccaaaggatgggcaatgccagggggccattgacactggaaaggaatttttgcagtgggctgtaggagtatctttgtggggctgaccatgattttggcagccctttccccccaagccggrcagggtggggggaggggcaggaggctcttagagaaaggcagtttgcctccggttctctgggtcaggtttccttgaaagacaactgaaatctgacaggtgtttggacatttgtttcagagattgaagaggagtccagacagaaaggcaaccttgggaaggtgtaccatttggagagccttgggagaggaggggtttttcggatgcactatattaaaacatgagatttgcaatggcattggcaccaaaagtccattgccaccttgggtgtaccttgtacctgcctggtctctggtcggcctgcatacaatcagagatcagagaataaggccacccacacccggtctccgccctcacctaaatctgaatagagttgggaggatgttagggtagctggttggtgctgattctggaaaatgggaagacataattgtttaacccttctgtgctgtggccctctgctccggaagacatgcttttaaagccccatttccctctcctgaaaaatgtgaagggtaaagcaaaatgtggactaggagaaaccaaggacctgtcttctcatctagtcgactgacttgactcatgaataagagcccttactcagatagcgttttttaaaccagcaattcccataggaagggttcctgcctgttaaagagctgcagcatgtgtttgtgcaaggcactgtcctttcctggtcagtcactggaaagagcc

SEQ ID NO: 38907 - DNA, 553 bp, Homo sapiens
ccctctctataccttgagtttttacagtctcccagaaagcttgagattgacagttcatgcaaatattccagaagaaatagtctgaaacagggtggcactgtatgctgagcagtcacattttctttctcgagaacattaggggtcttgtctttttttttttttttttttaatgtcttargagaacagtgtgtgtgcaccacagagctggaagcgaaattttgtaatttccatctggagcattttgatagaaaaagtgcaggcctttgcttggaacagtttaaccctttcaggacccttcaagagcaggagatgaaatttaaaactggagtcatattgtgtatgtatatatacttgggaatgttgatggctggtatataaacaagctctttcccttgggaggtctgagcaatttttcattcatgccaacaaaggtcttctccaaagcttctttcctcacagctcccattccccaagggagctttaaatataatcagttaatcagttttaaatataatcagttaaatatagtcagtttgaaaagctgcagtaaaac

SEQ ID NO: 38908 - DNA, 553 bp, Homo sapiens
ccctctctataccttgagtttttacagtctcccagaaagcttgagattgacagttcatgcaaatattccagaagaaatagtctgaaacagggtggcactgtatgctgagcagtcacattttctttctcgagaacattaggggtcttgtctttttttttttttttttttaatgtcttaagagaacagtgtgtgtgcaccacagagctggaagcgaaattttgtaatttccatctggagcattttgatagaaaaagtgcaggcctttgcttggaacagtttaaccctttcaggacccttcaagagcaggagatgaaatttaaaactggagtcrtattgtgtatgtatatatacttgggaatgttgatggctggtatataaacaagctctttcccttgggaggtctgagcaatttttcattcatgccaacaaaggtcttctccaaagcttctttcctcacagctcccattccccaagggagctttaaatataatcagttaatcagttttaaatataatcagttaaatatagtcagtttgaaaagctgcagtaaaac

SEQ ID NO: 38909 - DNA, 1155 bp, Homo sapiens
aagtctctacatgttttggttagttttgaagaaaagacccatctcacccaaccagaccacatgctgcctaatcaagataccacattcgcactgaaggcaacgcagctgacaatcgagagacactaaccgtttcaaggggagttttcctactgccaaggattccccttcccatgatgtttttgttagcactactttcctcattgctctgccagggtgtctattagcaagaatttcttggcagttaactcgcaatttccacacgtcaaagaaaactgaaggaatcataggcaacaaacaacctgagaattttgaggttgccatctaccatggagcaaatgagtagactgattactaaatgtacaagaaagccaaattcagtccattcaagccacaaactaattatattgtgtttcaggcacaaacactattattatacctttcttacggtttaagggttggcaataaaactcccagtttttgtacattcctataaaaatctcacttcagaaaaactagttagtagtttctggtttgcaaagaattgtactatttgttccttagtgttttagtaaatgctattataaaactgagagagtaagttgtccccaaataactaaggggtacgtttcaaaggttttataaataacatttattcgttattttacatttttagcttctttcttgcatacattatctctttttagccagaaagcaacactatgagataaacggggggggaatttttatccacactttaagtgtcaaaggtccaagtagataatgaagtaaccaaaacgtaaaacacaagttttctgtttttccctttgcaccacgctgcccatgtataagttggagcctggaattttcaatccatcttcccacaaaagtmatataatacatggtggtttgcagtctagactaacccacaaagacttttaactcataaagcctgaattatcaaaaagcgtatatattagttaaaagtagacttttgtggactggcctgagcccctagtatacatagataacatcacttctttggtaaaaaatatatcatatcctagagagaaaagatcctgttcatatgaagaactggccatccctccaatgcacatcctctgaggaaacagctgttgctttcagagcaggaatgaa

SEQ ID NO: 38910 - DNA, 588 bp, Homo sapiens
  misc_feature (1)...(588): n = A,T,C or G
ttttttttttttttttttgctttgtgtttaaaacttgaaatgcatttctttgaaataaaaattgtttaaaaacatgtttttattccacacagaaaaacaaagatgctttgcagcctattaaggaagayaggactgggaaggcccaggatgatgctttctgggtaaagatcaagtttcttttataatctctctctgtgtgtgtgtgtgtgtgtgtgtgtgtgtgtgtgtgtgtgtgtgtgtgtgtatgtgtatatgagtgtatgtattctttctagttctgtgttccccgtgtcattagcaaacttgttcctncaattgctcaaatcagaagcagagaaatctttacttctccttccctaatcttttatgtccaatttattactatttttaggaaaattaccattagctatcttaccaatatcctagtctaaactatcttgtgccctgtgcagatatcttgtgccctaaatgcagatagatgatactgaacaaactagaaacaacgtctgcctttatggagcttatagactggcagagagccaaagaagcaggaagaaaaagaacagggtaatgagatggggaataatt

SEQ ID NO: 38911 - DNA, 588 bp, Homo sapiens
  misc_feature (1)...(588): n = A,T,C or G
ttttttttttttttttttgctttgtgtttaaaacttgaaatgcatttctttgaaataaaaattgtttaaaaacatgtttttattccacacagaaaaacaaagatgctttgcagcctattaaggaagacaggactgggaaggcccaggatgatgctttctgggtaaagatcaagtttcttttataatctctctctgtgtgtgtgtgtgtgtgtgtgtgtgtgtgtgtgtgtgtgtgtgtgtgtgtatgtgtatatgagtgtatgtattctttctagttctgtgttcccygtgtcattagcaaacttgttcctncaattgctcaaatcagaagcagagaaatctttacttctccttccctaatcttttatgtccaatttattactatttttaggaaaattaccattagctatcttaccaatatcctagtctaaactatcttgtgccctgtgcagatatcttgtgccctaaatgcagatagatgatactgaacaaactagaaacaacgtctgcctttatggagcttatagactggcagagagccaaagaagcaggaagaaaaagaacagggtaatgagatggggaataatt

SEQ ID NO: 38912 - DNA, 655 bp, Homo sapiens
tatagttgttatttagacccttttgtccttttcattgttttctgtttctgtgctttttatataaatttgaaaaatatccctttgttcctagtggtgcaataactgttttccgccacaatagtcttcagtttaaagcttcgatactgcctccgtctttcatctcacgataccttgactttataagtgcccataatgtcaataaattgatcctgtttttttaatcatatttttactaagaggagccacttctgactttaaaattatatctatatatacacatatatacacatatatatacatatatgcacacatatgtacacatacatatatacatgtgtgtgtgtgtgtgtgtgtatatatatatatatayatatatatatataattttgttttttgagacacagtttcgctctgtctcccaggctggagtgcaggggcacgatcttggctcactgcaagctctgcctcccaggttcacgcccgtcttccgcctcagcctcccgagtaataaaaattcattctagcaagaaacatggacaattttaggtattgttatagatgaagtatccatttaagattatgaattttggtaagacaaggaaataactgggagagtgaaatgttgaattcacatgagattttcattagtgatgca

SEQ ID NO: 38913 - DNA, 1179 bp, Homo sapiens
ttctgggttaatttcctctttatataaacagaaatagcatattattggttattctcattgatagcatttatttaaataattgtaagactataagaagatcagtaattactcactagtttaaaaaaaacacctgttcttgctgtaacatatcccagaagggagggtaacaagaataaatacttctcaataaataaaattaactaaatatattcactcttcccctgcacattttcactggatggtttagctaaatcaagaaagtaaaatactagctcttgattctgaagaccttgtggtttgaggtaaagtgacaaattccttatcactgtaatacctggctaagatagtcaataaatgtctgttaggatggaggcattttacataggatgaggcacagacctagtctttttgctgtgtatccagtatatttatttggaacattgtttctaaataaatcctgcttcttctagtcttccctactgcttacaatttgtgcaaagttattttatttttttccaagttatcatctcacaatacacagctgaatcataagcttaaagatacgtaaagagacgaaaaactgaaattgaaagactgagtaacatatcccatttaacaacataactagtcagagatagatctaggattagaacagagctaatttgatatttgattcatgactcacgtaatcaataattatatgttgaacacccaccatgtcaaaagcacttcgctaataagctctagggctgatttcrtaagaacgtactcactggaattataaataggagtttattggtgattatgcttgaagtagaataataagtgtagaagctagacttgcatgagttgaggaagagattaaagaccaaagacatatagtcactgtttaatttaaaccatagaaaagaatattacaagtattaaattgcaaataacaaaaccaaaaataattaaagcatgaccagaatagatctagtgatgtagttcaatgaaaaacacaaagaattcctttatggtcaaatttggcacttaaacatattatttacattttaatgagaacttctgacattcatgataatttacccaaattctggaaaatactgaaatacagagctcaaggtcccatatttcactgtacagaaccacctagcttcataattgttctcctatattcag

SEQ ID NO: 38914 - DNA, 530 bp, Homo sapiens
tgataatttataactccatctgtgtgtgcagttatattaaatatgttcatgaatctgtgtcttgtggctttgcagttaattgttcaagaaacctttggcacatttttktattttatacatttcatatttttacattcaccacactatttactgagttttacagagatatactacatatatttcagtgataccactttgttcagaaaaattgtcatcttatttgtcttagttagctctgaataactgaatttttcccaaaaatctacaggtcaaaatttactattatggtcaatatctgaaagctcaccctggagaatctgaaataaattcccaaagaggcactttatcatgttttaatcaaatgatagtctttggcattttagtgtataacctcttatgtgactattttgaagatgacctaacttgcccgagtgtatagatcatgatgtgtctgatttaaaaaatttaatcttcttatcccaaagtatgtcctccattaattgctatctttttcagcatttcccatgctt

SEQ ID NO: 38915 - DNA, 538 bp, Homo sapiens
ttttccatatcattaacatcttttactctcttttaagctgtattaataattatcatcaagcatgtaatacatcagaaagtcttgtaaaaaatataagcaggtrtccttttttctcccttttaatgtctaaattattttgttaggtagaaattatttctgtattctgtgttatgacacaatttagcattattagttttaacatttggaaatcaaaagtgaagtacttcatattgacttgtttgatttatcagtaagagaacaaagctgcatttttaaagccagacaaatttgataagcacgattgtactacttggcagtttgttgacttttgttaggaagctaaaagtggcagcaacaaagcttttccccaaataggttgaattttctaaatgtggtgtgtatcacaagatgcactggcaaagaatacattttgcaagctgtttgtgtttatgagaagcattgtttgtatccatacgacaatatcattattatgaatgtagctgtggtattgttgcactagtatataggttctagtcta

SEQ ID NO: 38916 - DNA, 321 bp, Homo sapiens
taataagttattatttgccataaaagtcattgttgggagataattatccatgaacagcttacatggtccaggtcctctgagcaaaaaacagccttagaagctaaagacagcatctctctccatattagaggatagaattatttcttggccactgtgatagaaatagcgagcatctttctcccagacacattctagaacagtaaagccccscctactctgtgcacagagaggatgtgcttagattctggagcaaagatgagatcaagagatagagattgagagagagagagagagagagagagagagagagagagagagaga

SEQ ID NO: 38917 - DNA, 597 bp, Homo sapiens
atatggggcattttctgaaccacagattaaactcagtccaagactagagtyggtgcaaaatcactgaggacagtaaccttggtcctatggggaaatagtcggcagggggcaggaggcattcagaacttgcagctaatctgccctcactcacgtaggaaactctgagcttctttgctgctctggactgtgaaaaaggaatacttgcctggtcatcccattctaaatgtttcttctgctttcagcttcataggcttggagaagtctgaggtcttgctggcttcatgggaaataccctgtcctatttgctccctgagctctgagactatcttgagcttctatctttattccttcatgctcggaggaagctgcacaagctaggaagaaactgttgcatacccaatatccagcctccattcttcctttttaacagaagactgatttgggaaaacaatatatttcttagctctcccagcccacacctggtagctagggtggtcactgaaatataagtagaattccttgagtggggatggtggggaaatatataaaaggcaattaactttcttgggaggcttctctttttgctaattgcttttc

SEQ ID NO: 38918 - DNA, 653 bp, Homo sapiens
tgcatatcatttctgtcctgtaggaaaataatgctaaagattacagttttattgccctgcaggacattaaccaaccagtgttacctgtaagtcagcaaacacttcaagawgtcttttctggtagactaaaacctgttctatttctttctgaatcaactttatcatcttatttcttcactgatgagctgagtgaaatatctgacttgggttcattctatatttgtatgagtcttttttaacttgttgaaaactgtacattgacaggaatgacaaataacaaaagtggtggcatatgacaggcagcagcaatgttcaactttacctaagcctgagaccttggaaaacacggacacgtaagaaaacccccaccctcctgttcctggaaatggcttactgccgaagcctacccttccccatgtggctcggataagacgcatggatgactcctcgtttacccgtaacacacagtcacagactcaccaccatttccattctttgcctcataaatgattagctgaattgcctgccacagtgaccaatctggacaagatatcttctcatttgaattaaccaaactttggttaagtttctctccttcccccagacgcaccctcagcctaagccagcatcagaatgtggacggcccctccttg

SEQ ID NO: 38919 - DNA, 653 bp, Homo sapiens
tgcatatcatttctgtcctgtaggaaaataatgctaaagattacagttttattgccctgcaggacattaaccaaccagtgttacctgtaagtcagcaaacacttcaagaagtcttttctggtagactaaaacctgttctrtttctttctgaatcaactttatcatcttatttcttcactgatgagctgagtgaaatatctgacttgggttcattctatatttgtatgagtcttttttaacttgttgaaaactgtacattgacaggaatgacaaataacaaaagtggtggcatatgacaggcagcagcaatgttcaactttacctaagcctgagaccttggaaaacacggacacgtaagaaaacccccaccctcctgttcctggaaatggcttactgccgaagcctacccttccccatgtggctcggataagacgcatggatgactcctcgtttacccgtaacacacagtcacagactcaccaccatttccattctttgcctcataaatgattagctgaattgcctgccacagtgaccaatctggacaagatatcttctcatttgaattaaccaaactttggttaagtttctctccttcccccagacgcaccctcagcctaagccagcatcagaatgtggacggcccctccttg

SEQ ID NO: 38920 - DNA, 653 bp, Homo sapiens
tgcatatcatttctgtcctgtaggaaaataatgctaaagattacagttttattgccctgcaggacattaaccaaccagtgttacctgtaagtcagcaaacacttcaagaagtcttttctggtagactaaaacctgttctatttctttctgaatcaactttatcatcttatttcttcactgatgagctgagtgaaatatctgacttgggttcattctatatttgtatgagtcttttttaacttgttgaaaactgtacattgacaggaatgacaaataacaaaagtggtggcatatgacaggcagcagcaatgttcaactttacctaagcctgagaccttggaaaacacggacacgtaagaaaacccccaccctcctgttcctggaaatggcttactgccgaagcctacccttccccatgtggctcggataagacgcatggatgmctcctcgtttacccgtaacacacagtcacagactcaccaccatttccattctttgcctcataaatgattagctgaattgcctgccacagtgaccaatctggacaagatatcttctcatttgaattaaccaaactttggttaagtttctctccttcccccagacgcaccctcagcctaagccagcatcagaatgtggacggcccctccttg

SEQ ID NO: 38921 - DNA, 1123 bp, Homo sapiens
tatgatggctggttaggagtttaaagcagggaaacagagacatattttcaaacaggccccttatctggcctctctcctatgcctttccataatattttctctacacactttttcagttataacctgccccttgtttgtgctttcttggctctctatcttattgttttacctgttttattcttttactttcttttatcctctgacaggtggtgacatattttttctcttatttcttctttgaaagaactccaaagctttgcagatagtttttcctttcactttctctctctgtctctccctcttcctctctctctccccyttccctcccctcttctcctccacgttttaatccttttcttcttctcatgacccacccagaattaccttctgagtaacataagttttatttagaatttgtaaaaataaaattgcttcagggcttagaccctataggccaatctttgcttggagacaatgtttacaacttagcgataaattgggattgttatcaaggggttgacagactgttacctaaagcacggctggaaataatgccataaaaattgctgaacatgggaaagtaaatgctaatggctcctgcagtaaaaacaagttggtaaagagcaatcaacacaataagagttactgtggtcagtttggggatggagttgtgataaggttagggatgtcataatagagtcttactggcctggagaatgtcctccaggacaggacaaggattggctgggagtttgcaaaccagagatctaagagctgatccctggataagtagtggctaagggatctttctaaaggtatcagaatgttatgtctcaaaatactggaaccctataaaagctgggattcaggcacagagaacaaggcaagaagctcattttcttgcatgcggacatagactttttttcccttaccccaggaaacaaaatggaaccacttattagattcagggaattaggtttaagctcctctatgctcagagataaattacatttcttagttccctttgcagttgtgttcaactatggccctgtgttctgactaatgaaatgtaggtggaagtcatatatgcgcatccgggcccgtcccataacactcactcatg

SEQ ID NO: 38922 - DNA, 952 bp, Homo sapiens
aaaaaaggtttagattactagatctgaaagaagctaataggtctttagccccaaattcttaattttaaaatgaaaaaacaactgcagccacaaaaaaaggaactaatttattcaaaagcttacattccattactagtcaaagcaggacccaaactcagaactttagtatcttggcctatgctctttctacataagggccccaaactttgcttaatgttacttaagtcctcaatgatgcttaattccaggagaataaagtagacaaaatacctcatcagaaccctcccaagaatctgtaagagtctccagggattgccccatctatcagccagttagtctattctratctgtctctccttctctgtctcattcctttccatttactgttcttgtgagaacactaatgcctgtatctggggaaccaggctccatgctccaaaatccatcagtcccaaagttcctgcagcactgggaaatggttctttccaagctccacacagcattgtgtcttctgagctgctactcacaatttatgctactttgaccacggactcacagaactccaattaaaatagcttcttcacagtctcccctaaccactccctcttcaggaaccaaaactgagccaagcagctgggcagagatatgctcccctcatttctctctgctccatcccctctttccccatccctcctgcatcaatcaacaattaaatatcctcctgcccacataaaaacacaagagaaaacctatgcatttcaatgtatgcagttgggtacccaaagagtaatttctccatatttggcttttcaaacagctaaactttggatcccattccaagaactcaaagattccatgctaagtgagaaccaaggaagatatggctactgattggagttgcagacactgccttaaatcctttctgctgtggccttagcaagtaaacttttga

SEQ ID NO: 38923 - DNA, 605 bp, Homo sapiens
tgcatagcacatggagagcaaatttaaggccttaggttcaaagtcatggcatgctggtaatgataataatgtttcatggtggagacagatctgtgaaaagaaagaataggaaacaacccagcaaactccgtggtctgacatgtcagcagcgttgcamccttgcacgctccaatggtcctttgcattacaaatttctcaatataagaaacatcctgaatatcctgagtattctttcctactgtcctctctggatttattaacagagtgtaaatgtcaaacatgggggaaggtgtgaagaatggagggctcatctcttttctgaacaaccctaaatactctggtcaaatttcaaacaattcctggttagacatttggatgcctttgattttgagtcctacatacattctcgttatcataagagatatgccacaggaaaaaaagacatgttctgaggcagagttacaagaccagatagggcagaacgggattttgatatttgatattgtttttggatcttcagactaatggtaggtaatacctatttgtgaatttaagctcaattataaggggaaattttttttttcagataattggggtcatccagg

SEQ ID NO: 38924 - DNA, 1927 bp, Homo sapiens
tgtctttttgttactgacttcgcttagcctcgtgtcctcaagtttcatccatgttatagcatatggcaagattttctttcttgttaaggccaaataatattccactgtttgtataaacattttgttaatctattcatctgtagatgaacatttgtgtcgcttccacttcttggctattgtgaataatgctgctatgaatataggtatgcaaatagtaatttgagatcctgtttttcattatttgaaatatgcacccagaatggggattgctggatcttacggcaattctatttttaattcttttaaagaattgtcatactatttttttaaagtgcctgcataatttttcattctcaccaatagtgtacaaggtttccctttctccacatcctctttaacgtttgttcatttctatttgtagtagccatcttaatgggtgtgaggtataggttaaacttttataactagaaatttaagaactgagaaccatacagtttttctggctcagattattattattctgttcctaatgataagtttgaccttgtagaagcaacttcacctctccttgcaagttttctaaaatattaaataagaataataatgcatatcttaaaaccaaacaggcacttgaacctgttccacacatcatacacgtatgatacgtgatcatctgtgatacaatttatataagtatatataatatagttaaccatataaatatatataactataactatagttatatatagagagatagaaatacagctgattacatgtgataattacatgtgattcaatttgcatatataataagctatactaagcaggtatatggtaactttcttgataagcatccctctacagagaaagactcttcctttctctgttttacttacccacttcactgggatcacttctcacattaactccttgcctggaatccctgtctcagggtctgctatgggaaaaccaaaataagacaaatatctattcactcttactcattcagatataatacctaaagtgtaaattagggagtgaatatttgatggacctagtatagttcttggcagttatctttattatattatactcatcatggagtgtgaggaatgcttcataatccattatcagtaccctatcttttcttctagaggaataatgatagacatgtatacagcactacacagaggttgagaataacaggcctgagcaaaaccaatcacagctcaaggggcattttttttcatatctattagcaaatataagggctgtatttgacagtctctttttttcctcagctttttctcttctgatcatcataagatgaggtggggtgaaacagcaatagaataacagcgatggaattaatgctgtgcaggtttgaagagcatttgtcctactaaggccaattcctgggaagaatgatgtggagggtggatttttctgcgactgaggtctgcttgraataccgtggtctactgcgagtggattggaaacaaataattttaccagccaaaatgtactataggtatgagggtgcaccctccagttttcttatgaaacccttcttcttattgatttatgcctgctctagtctatctcaataatcacctagatactattcctgaaggattaaaaatgaaagaaatcaatatgttcaacctgtgtctgacagcaatctctgcacaactcaaggtacaaatcaaagccttctccattaagtcctccctacaattcacccatttccaggccatattcattctactctccgatgtatttccattgcattctatacttacttctgccacagtaactaaattttgtcttagattccacttactgtcaccctggtttgaatgtaagctcctaaaggataggaactaagctcttttcttcttgccttctctgggaaccattataa

SEQ ID NO: 38925 - DNA, 1228 bp, Homo sapiens
cattgttttcccatttcacatattaatagaacttgtttagatccatgtttctcagagtgtgcttggcaaaatacgtcaatccccaaaatagttctgtgatcaaacaaattggraagatcacatatttcatatcccctatattttcacctgggaagtaaccataaatattctaaaggccttaaagagttctgtgatgcagaaacctgctttatttcagagttgatctcaggttaatttattgagataattttttatccttggctgacagccattaataatgatccctcagatgaaatgatctaatcaactttcttggggatccttcaaacttgataatctctgatatggtttggctgtgaccccacccaaatcttatcttgaattatagttcccataatccccatgtttcgtggaagggaccaggtagagacaattgaattatgggagcactttcccccatcctgttctcatgatagtgagttagttcttaccagatctgatggttttataaggggccttccctttcactgggcactaattctctctcctgccaccctgtgaggagttgccttccgccacgcttttaagtttcctgaggcctccccagccatgtggaactgtgagtcaatgaaacctcttttctttataaatttcccagtcttgggaatttcttcatagcagcataagaatggactaatacaatctcctaggtttcttttggttcacatttcaatgtaatatggaaaggtggatatttctccaggtatattatttgtctattaaagtgggcttgatgtcaatgtttctggttctaaattcagttttgcaatggccattgtgtgacctgaggcaaaatcataatttctctgcgcctcagtttcctcatcaaaacactataaggatgttataaaataaaaaataaaaacataaaacatgtaaagtgtaactcaaaatcagatagcttctcatgatgtaaaaatgaaaacagagtgaagaactgagtttgaagccataataagtatgggaagtcttaaccccatatacatctaaggtaacctcagatgtgttcagtgatttttgaaatattagaaagttgaagtctgctttgaatctcaaatgagatagttttagggcaaaaaaaaaaaaagaacaaaactaaactattaagccctctgctccccttcacataaatggaagtctttttgttttttttttttgaaattgttac

SEQ ID NO: 38926 - DNA, 1228 bp, Homo sapiens
cattgttttcccatttcacatattaatagaacttgtttagatccatgtttctcagagtgtgcttggcaaaatacgtcaatccccaaaatagttctgtgatcaaacaaattgggaagatcacatatttcatatcccctatattttcacctgggaagtaaccataaatattctaaaggccttaaagagttctgtgatgcagaaacctgctttatttcagagttgatctcaggttaatttattgagataattttttatccttggctgacagccattaataatgatccctcagatgaaatgatctaatcaactttcttggggatccttcaaacttgataatctctgatatggtttggctgtgaccccacccaaatcttatcttgaattatagttcccataatccccatgtttcgtggaagggaccaggtagagacaattgaattatgggagcactttcccccatcctgttctcatgatagtgagttagttcttaccagatctgatggttttataaggggccttccctttcactgggcactaattctctctcctgccaccctgtgaggagttgccttccgccacgcttttaagtttcctgaggcctccccagccatgtggaactgtgagtcaatgaaacctcttttctttataaatttcccagtcttgggaatttcttcatagcagcataagaatggactaatacaatctcctaggtttcttttggttcacatttcaatgtaatatggaaaggtggatatttctccaggtatattatttgtctattaaagtgggcttgatgtcaatgtttctggttctaaattcagttttgcaatggccattgtgtgacctgaggcaaaatcataatttctctgcgcctcagtttcctcatcaaaacactataaggatgttataaaataaaaaataaaaacataaaacatgtaaagtgtaactcaaaatcagatagcttctcatgatgtaaaaatgaaaacagagtgaagaactgagtttgaagccataataagtatgggaagtcttaaccccatatacawctaaggtaacctcagatgtgttcagtgatttttgaaatattagaaagttgaagtctgctttgaatctcaaatgagatagttttagggcaaaaaaaaaaaaagaacaaaactaaactattaagccctctgctccccttcacataaatggaagtctttttgttttttttttttgaaattgttac

SEQ ID NO: 38927 - DNA, 646 bp, Homo sapiens
ttaatttccctgtgtgtctcatatttttatgagactaaagccccttgaaagcaaggggctttacttctctagttattctctcagcatttaggaggctggtctcaaagtttgagctgagttaaaaaaatacgtattatctaactccttatatacatatttagaaagagaacaaatgaatgaacaaacgatatgtgaatttatggagaaatcctagtttcattttttcagattaaatatctaacattttttaatgagatgtcaaactgtattggtcagggtttcccagaaaagcagaaaaaaatatatactttaatatatatatgatttattagaggaattgactcatgtgtttaccgaagctgagaagttccaggaactgccatccgcargctggagaacagaaaagctggtggtgtaatgaagccccaggaaccaggagctccaatgctcagggcaggaaaagatggatgtcccagctcaaacagagagagggagtgcatttaacttttctccaccactttgttctatttatgccctcaatagaatggatgacgcctgcccacactggtgaaggtaatcttctttactagggctaccaatttaaatgcgaatctatttcagaaacaccatcacaggtacacttgga

SEQ ID NO: 38928 - DNA, 1124 bp, Homo sapiens
ttacagaacaacctgtatactagtattgtttgtatctgtttttgtaaccactttattgacatatacattattcttttaataaaataaaaaggagcaagtagttttttwaaagatatttctttatttttgcaatgcaagcacgaagagacctaagttcttatatatgatagaggcacaattataagcataacaaaaccattcaaatagggtgtggtaacctcctagcaccaaaaacaatgaacaacaccaataattataacacgtaatgtctactgaaaactaaccacgggccaggtgcttacaatatattctcaaaacatctctgtggggtagatgttactatctccatttgacagataagggtatagaggctaaaagggtaaaaggtaaaggactcaagttcagatggcctgacccagaaccaatgcctttaatcctgttctgtgcctgttccttccggaaattacactggagaactctttagtgctgcatacaatgggttattttactccacaatgactcagattcattaacttgctcaaaagcacttactaagtgcccactgcaacagaaatctgcaccaggaactgcagtgagttactaagagaaataagtttgggccctgcctgcccgccaatagccatagtcaagaaggaagataagactggaatacaaacagtcatatttcgaggcagtctgtgatcagcagttaggaaggatgaagtgatacgagcattaggtcacactattacctccctaagactgcttttgctgtttaggcacctactgggaagctaatttagcattaaggcttagaaaagaggcctatctaggtcctgtactttgaatcagagaaaaaaaaattaagtacatatttaaattctagatagtttagggctttcctttcaagccctaaaaacagggctcccacaaaatgaattcagctataatgctgtggaagaggaaagcccatttctactccacttgttgagtcaaaagatatgagtcctgccttcctctgcagaataaataaaagggagcctgtctgcagaataatgctaagaggaaacagagccaagagatggagcaaaatgtagagtccagacaacatccttttagcccct

SEQ ID NO: 38929 - DNA, 1124 bp, Homo sapiens
ttacagaacaacctgtatactagtattgtttgtatctgtttttgtaaccactttattgacatatacattattcttttaataaaataaaaaggagcaagtagttttttaaaagatatttctttatttttgcaatgcaagcacgaagagacctaagttcttatatatgatagaggcacaattataagcataacaaaaccattcaaatagggtgtggtaacctcctagcaccaaaaacaatgaacaacaccaataattataacacgtaatgtctactgaaaactaaccacgggccaggtgcttacaatatattctcaaaacatctctgtggggtagatgttactatctccatttgacagataagggtatagaggctaaaagggtaaaaggtaaaggactcaagttcagatggcctgacccagaaccaatgcctttaatcctgttctgtgcctgttccttccggaaattacactggagaactctttagtgctgcatacaatgggttattttactccacaatgactcagattcattaacttgctcaaaagcacttactaagtgcccactgcaacagaaatctgcaccaggaactgcagtgagttactaagagaaataagwttgggccctgcctgcccgccaatagccatagtcaagaaggaagataagactggaatacaaacagtcatatttcgaggcagtctgtgatcagcagttaggaaggatgaagtgatacgagcattaggtcacactattacctccctaagactgcttttgctgtttaggcacctactgggaagctaatttagcattaaggcttagaaaagaggcctatctaggtcctgtactttgaatcagagaaaaaaaaattaagtacatatttaaattctagatagtttagggctttcctttcaagccctaaaaacagggctcccacaaaatgaattcagctataatgctgtggaagaggaaagcccatttctactccacttgttgagtcaaaagatatgagtcctgccttcctctgcagaataaataaaagggagcctgtctgcagaataatgctaagaggaaacagagccaagagatggagcaaaatgtagagtccagacaacatccttttagcccct

SEQ ID NO: 38930 - DNA, 1075 bp, Homo sapiens
accattcacttttttatcctccttctagaccatattcctattttttaaaggaaaataagaacctcattttaatttgtaaaaataataaaccttgccagattaactgattttgtgggctttctcactgagaacagctttccatattagggctttcctaacagtgtattttatttgtctattgtttggtaagaagttacattatktggtagtatcaggaatcgtaccatttcagggaagttcaagtgcaggatgattaatcattaagatttcttttggatgttgaggagcagtagggagggatagaaaataaatcgaagagaggtaaaaccttgcttcaaagaaggcttggggagtgccaaaactctaccaatatttcgttgcaactatttttatacaaattgtgcattaaagtcacaagtgaggtagattttgtttatttttatacatccagtgagatttggattgacagttgtatactcagaagtggtttgggatatctaatacccaatctttggtatgtttaaagacttttggaaaatatggcccctagtctacctgcatcagaaacatctatggtataaacctgctgtttctgggtccctgagattctgattcagtatggctgtgtccaaagacctgtatttgtataggggtttccagttgattctggtgcacatagagatttgagaactattgttttgggaaaataactctgctcacagacaatttctgttggaagcattggagtctacttgtctatatatctctttttcccttctgtctgttgtataagttctccaactcctagttttgctctggagaagggttatgtgatgattcttttatatgggtagcttatagcctagaaaatgttttcttgtaggttgaaagttatttcatattttcagtcctatattatctaccccatgtgccttttagtctaggatggatgtttttgagcccacagaaactttttttgagagaggccctttctgtttttgtgaaaaaggaattttattataaaacatgaggacatttttccccccaatctatctgtaatatagttcaacatttt

SEQ ID NO: 38931 - DNA, 533 bp, Homo sapiens
tctttttttttcagaagttttcttctattttatttctggataatatttaggtggctaagaaatagtcatacgaagactgtcacttctctcagtcaagtgttgttattgactgctgtatagaaaaaaagccgacaacaatgtgaaatccttgatcgtattgaaagaggataagatcataatagatacagtgatttatawatttattcttttaagatgtagtttacttttaaattgtgtgaggacagggaattataccctatcattgtgattcagtaagctggttacttattgagtgttggatttttttaaaacaatctcacttgcttcaggctttattaataaaaatgggtgataattacttttatagaaagacttttaagaatcttgaatatagtatcttacatttacatcttataattttcaaactatcacaaaaacattgctactttttcttcatgaatcagacagaaaatgaatgaataaatgagtgaaaaccacacagataaacaaaagtcttcatctccatgacagcc

SEQ ID NO: 38932 - DNA, 533 bp, Homo sapiens
tctttttttttcagaagttttcttctattttatttctggataatatttaggtggctaagaaatagtcatacgaagactgtcacttctctcagtcaagtgttgttattgactgctgtatagaaaaaaagccgacaacaatgtgaaatccttgatcgtattgaaagaggataagatcataatagatacagtgatttatatatttattcttttaagatgtagtttacttttaaattgtgtgaggacagggaattataccctatcattgtgattcagtaagctggttacttattgagtgttggattttttwaaaacaatctcacttgcttcaggctttattaataaaaatgggtgataattacttttatagaaagacttttaagaatcttgaatatagtatcttacatttacatcttataattttcaaactatcacaaaaacattgctactttttcttcatgaatcagacagaaaatgaatgaataaatgagtgaaaaccacacagataaacaaaagtcttcatctccatgacagcc

SEQ ID NO: 38933 - DNA, 1136 bp, Homo sapiens
cattacgtgatatttttacactcttaattttttccctttcctagaataaagggcaaatgaatcaaggcttgtcctacatattatgaccctgatctaaatgtcctttctttagaaaatggtctgcgtatgtataagcattaatctggaaaatatttctttcctcactacttttacaaatgccactgattcagaaatgaagctgaggacatttatgtacattttaattagactaaatcatgaattggtgagtggccatctgctttgtgcccaaggacattgtctcagttgacagtttgtgtccaaggacattatcttagttgattatactaatctgaatccaaaacttttacctgccaattctaagaatatcaaagattctgggttaatacatttatttacttatttattattgaaagatagagtctatttgcattacaaatggaagatgtggtatgggtcaagtgtatgaaatcaatatccaaggccacacaaggattaatcttcattattcctgtaaatatacttagtctgcagcagtagcatggactattcaggttatttatctacttttctaatttttattttagattcagggggtacatgggcaagtttcttaaaagggcatattctgtgatgctgaggattgggatataattgaacccatcacccaggtagtgagcctagtacccaaaggtagatctttgacccttcacctcctcttttccctccctttcttgtagtccacagtgtctatcgttcccatctttatgtcaatgggcacccaatgtttagctaccacttataagtgagcacatgaagtatttggttttttggttctgtgttagttcacttaggataatggcctctagctgcatccatgctgctgcaaaggacatgatcttgttctytcttatggctgcacagtattccaaggtgtatatgtactacatttgctttaaccaatccaactatttatgagtacttgggttgattctatgtctttgttatcgtgaataatgctgagatgaatatgtagatccatgtgcctttttggtagaacgatttatgttcccaaagggtaaatactcaataatgggattgctaggtcaaaaggtagtttgttctatttttagttc

SEQ ID NO: 38934 - DNA, 1573 bp, Homo sapiens
tgcataacttttctcagtgttttgagagtgggtgttccttccccactcaagctgaggccacagatcccagcttgataactcaggattctgtgctcaaacccaagggatagggggttgggggtaggacctgtcaaacagcggctgtgctggagggccttcactgtttccaggccactggcaaaacactcaggcagagtggctgtgctgtgtgccccctcctatgggagcagccaagcagggtccttgtcagggcacacacagatcagatgcacccttgtcctataggaagggcagtcctgctttctctcagcctggcagtcagcggggtcagagttgctcagagcaagatgatgagtcttgggcgatgggcgcctatggttgtgtgttgctgtaactgccccatggacaaaaccttctgggttccctgcaggttcaagctctgcttctggctactctctgatcagttccccctgctaatttatatgtccatgggggtcatgagatcctttgtagctaggaccccagatgcccaaggtgagagtgtggtgccctggaattccttcactaaccccttctttagcacttgttcaggactgggagccagtcctggtgctctgcaactccatgtaagcttcccagttgcctccctcttcaacctcggtgtctgtgttgcctctgtcaatttcagtgttttctctcaaaagatctgtctgaagtgtgatggtttacttgatataatttggtttctcttggtgggagagtcattctctggctgtgtctagtcagtcatcttcgtccctcccccttaaagagtgtgtttaaattgaactattttagtttttggttttagtcttaatttcacccaaaatttcaagaaaatagaaggcaactctccrtatcctatgcagggtgctaaatcaagatttgaaaagaatgtttctaaaatatttttgcaattattttttctcatccacattaagggtctaaagatttgggataaaaggataagtacactttgaatctcaccagggcaaaaggcaggctggggtgtgttttcctcatctctaagggaaaggattcagtgaaaccacaggaagagcttgtattgtgatacctggagctgtggctgacagtaggctgatactggctcatacatgagaacctaaaggaaaatcactgtagctactcagagaggcatattaggattagctttcacttcaaacctttgtcagggataagaatatatgtgttccccatgtacaaaatgtgcttatagcatgataaaattatgctcatatgcattgctctccaaagggaccacctagaatggtacaaagaactcagcagaaaatagcttggagtgggccatggtttgcctactgctaaagagataggtacagaaaacaattcaacctgtggagtctcccatgactagggaagcttcaagttagaaactgatatcaagagacgaattcccaaagtgtcttttaagtgccttactgaaacactcatcaaggccagaaggtcccagggcagatcattatgtcctggaaaaactcatatgtgtttcatc

SEQ ID NO: 38935 - DNA, 1318 bp, Homo sapiens
taaagtccactagagtgaattttaatagtctctcaattgcccatgtattattaattcagttcrttgtaaaatccgagacctgcaagaaaatgatgagataattttgcaaatgttttcatttgacaaatgaggacagcgaggctgagagaaatgagatgccttgactatggcctctggtgaggtggtgacattcttgtaaactcgagaattcatgttcccgtcttcactgtccagtgttctttgcactgtgctgcataagttgaatttgtttatcattttctaagtcttctttactctagtccttttcaaaattcagcatctgtgccaagctttagatgaatagtacgcctggagaattaccatgcagtttctctaatccatgtggtatatttcctttcttatcattcttgctgattcagactacaatctggagtgatcaccaaatttttctttgctaggttagcatttttaccattcagtcctcattgtgggtgtagtatatagtttctcctttccactttaaacaatattgtatttcacattttaccttactatttttacacatttctttatacttgtgacctcaaactaaatgttatttgacaaataatcactaatttttatatgtcttattataaaaaataaaagtcaatttgtattttctgatgtccaattttttgcattcaaatcacctgaaatgtatgaagttttcacttcttattcaaatcactggtgtctttataaatggattttaataaaaatctttacccatcaggactctgacatacacaagagatttaacttcttttataatttaaattccctgcatttctttattcaaattagttttatattgtttctccatatttttataattttggtaatgctatataagctccgtctagtgatcaaaatagtacctaaaaatcctatgtttattaaatcaaagataccagaagctaccttatcctggcagacctagttctacatctatttcaatgaaattaattaaaatactcataacttttttattgaaatagtttcaaaacttatatttaagccaaaagagcctagcatgttaatataataaaattgaatttgggggccaacatatatctgtggtgaaataaaatactgttaaataaatgacaatattttaaaatgttatttaattttttttttttttttttttttttttttgctatttctgcttttcagaacacattgtttgaccctgttactcagaaaagtgaatgtcaggctgaatagcaaactcaactacaaatctccagtttaggctgtgtcctaaagtttgata

SEQ ID NO: 38936 - DNA, 664 bp, Homo sapiens
tggccttgaactcctgacctcaagtgatccacctgccttggcctcccaaagtgtgagccaccgcgcccagccagaaagtgagccttctacacctgtcccccaaccatttggaccagtttcttttatatcctttcaaagatattctgtgtgtttacaaaaacacgtgtatataaaatctgtgaaataatttttatttttaattttaattttttttttgagacagtctcattctgtcgcccaggctggagtgcagtggcaccgtctcagctccctgcaacctctgcctcctgggttcaagcagttctyttgcctcagcctcccaagtagctgggactacaggcgcctgccactatgcccagctaatttttgtgtttttagtagagacagagtttcaccatattggccaggctggtcttgaactcctgacctcaggtgatccacctgcctcagcctcccaaagtgctgggattacaggtgtgagccaccatgcccagccaataattttaatattataatgtggcttgcagactggaaaaccattcccttggaaggaaggaggacatcatagtaatgactccatgatctagagcttgtaccctgtgaaaataagcttaaagtttgaaacatctctcagctcaaaacaggagcttattaggcacaataa

SEQ ID NO: 38937 - DNA, 664 bp, Homo sapiens
tggccttgaactcctgacctcaagtgatccacctgccttggcctcccaaagtgtgagccaccgcgcccagccagaaagtgagccttctacacctgtcccccaaccatttggaccagtttcttttatatcctttcaaagatattctgtgtgtttacaaaaacacgtgtatataaaatctgtgaaataatttttatttttaattttaattttttttttgagacagtctcattctgtcgcccaggctggagtgcagtggcaccgtctcagctccctgcaacctctgcctcctgggttcaagcagttctcttgcctcagcctcccaagtagctgggactacaggygcctgccactatgcccagctaatttttgtgtttttagtagagacagagtttcaccatattggccaggctggtcttgaactcctgacctcaggtgatccacctgcctcagcctcccaaagtgctgggattacaggtgtgagccaccatgcccagccaataattttaatattataatgtggcttgcagactggaaaaccattcccttggaaggaaggaggacatcatagtaatgactccatgatctagagcttgtaccctgtgaaaataagcttaaagtttgaaacatctctcagctcaaaacaggagcttattaggcacaataa

SEQ ID NO: 38938 - DNA, 823 bp, Homo sapiens
ggctggagtgcaatggtgtgatgtcagctcactgcaacctccgcctcctgggttcaagcaattctcctgcctcagcctcccaagtagctgggattacaggtgccctccaccacacccagctaactttttgtatttttagtagagacgggtttaagccatgttggccaggctggtctcaacctcctgacctcatgatccgcctgccttggcctcccaaagtgctgggattacaggcatgagccaccgcgcctggcccatccctggccaatatcttgatttaagccttgtgagagcttgagcagaggatcggctaatcyatgcccatactcctgatttgcagaaactgtgagccagacaatgatgttattttaagttgcttaatctgagcgtgcagcaatagaaaattaatatttgcctttgcatgatggagcccagtttactcctcaaattcaaactgcaagagctttgggagaattacattgttagctttccatactctaaaattcaataagacaagtcagaagtggttgttgtttatattaagtgagtcaatccctagtgtcgtccacccactttttttgaaaattattttccaaaatatcttttacagcctatatgataggctaaaagatgtcatttcattttttgtttgtgtaaaatggcaaagatcaacctgtcctgtgaatgagtattcaagaaaaagtaattaacattgctatcagcaatttccttgtatgcatcaaccagttgggtgaactcatataaatattcctgctgatttctctattaaaaaatgcttagagaatagacaatttaggagatt

SEQ ID NO: 38939 - DNA, 823 bp, Homo sapiens
ggctggagtgcaatggtgtgatgtcagctcactgcaacctccgcctcctgggttcaagcaattctcctgcctcagcctcccaagtagctgggattacaggtgccctccaccacacccagctaactttttgtatttttagtagagacgggtttaagccatgttggccaggctggtctcaacctcctgacctcatgatccgcctgccttggcctcccaaagtgctgggattacaggcatgagccaccgcgcctggcccatccctggccaatatcttgatttaagccttgtgagagcttgagcagaggatcggctaatccatgcccatactcctgatttgcagaaactgtgagccagacaatgatgttattttaagttgcttaatctgagcgtgcagcaayagaaaattaatatttgcctttgcatgatggagcccagtttactcctcaaattcaaactgcaagagctttgggagaattacattgttagctttccatactctaaaattcaataagacaagtcagaagtggttgttgtttatattaagtgagtcaatccctagtgtcgtccacccactttttttgaaaattattttccaaaatatcttttacagcctatatgataggctaaaagatgtcatttcattttttgtttgtgtaaaatggcaaagatcaacctgtcctgtgaatgagtattcaagaaaaagtaattaacattgctatcagcaatttccttgtatgcatcaaccagttgggtgaactcatataaatattcctgctgatttctctattaaaaaatgcttagagaatagacaatttaggagatt

SEQ ID NO: 38940 - DNA, 788 bp, Homo sapiens
ttttacttataatacagagcaagaattgaaaagttttaaggacatgttcttacaaggtctataatttgctcacccaagactgcctctttgactccaacttccttacctcctcccttctccattggcttaagcactggcctggacaagcagtgtgccaacactgcctttttctcagaatacaagaattgtgccacccacagtcccatggctggaggccagggcactgccagcagcacagacatgagtcaggctgtggcttgtgtaagaattcctggtctaggttctttcctgacagttcacttggaattgccaccattgacagtatgayggcaagaagtatgtgataggaaagtatatagtaagacaagtcaggaaacttgactcccagtcttactttctggaggtgtgaccattagcatttctcctaatctgctctgtctacctcatagaattattataagaaccagaatgagacaatgaaaactaaatatttaattttagttagtgagggaaaagagatattctcatatgccattagtcagagtatagattacaatactttttggcagtaattattaaacataaaaatgtccagacctgtggcctagttattccttttctggaaatttagcctcaggaaataattaagaaagtgcagaaatatgtatataaaaggatgtttaccaatgggcttttgtaataaccaattttagaaatacaaagtgtctaatataggtttgggtaataaattagaataaccacatagcagagaactaacagcttaaaaa

SEQ ID NO: 38941 - DNA, 821 bp, Homo sapiens
gtatagctaggtctaggcctataggcgagttattaacctccaggtcatcacttcaaaataaatcattcaatacctatactctaaatgtctttgtaggttattctgtatctgcatggaatgtacaccagtaaaaaggataacttaaggataatacagaatttatattttacttatttccttctcaattagtatacatacacatatgcatacacacagaccacttgagctaccttgatggctagcccacacttttacctaaatgagaaatagagtaagtagtgaagtaaagaggaaaaaatacgagggctagatttgtccaacttacactttctagcartaaaaaaacagcaggagagcttcaaatagttctgaagagaagtagaatggcaatttctttatttaacaacatgttgacataaagatttaaaaatgtatatttattagaaagaagggcaaaatttgattcttcctgtttaataaaataaggtcaccatttatctggacatgcacacgggaaacaaaatggctgcagaaaagaatgactttgagatcagacccatcaaataagattacttaattgtctgctgccatactagacactcagaaaagcaaaataagataaataatttcattgtgagggtaagaaattctattaaattgtaaaatgttgtgtacttgggtagcgtggggtggatataattaggaatcatgtctttacttggcggatcagcctattaggctgggtagcaggtaggtagcttcagaaaaggcaagctaaagaaaagactcagaggtagaaatgagtgttagggctgtcctag

SEQ ID NO: 38942 - DNA, 821 bp, Homo sapiens
gtatagctaggtctaggcctataggcgagttattaacctccaggtcatcacttcaaaataaatcattcaatacctatactctaaatgtctttgtaggttattctgtatctgcatggaatgtacaccagtaaaaaggataacttaaggataatacagaatttatattttacttatttccttctcaattagtatacatacacatatgcatacacacagaccacttgagctaccttgatggctagcccacacttttacctaaatgagaaatagagtaagtagtgaagtaaagaggaaaaaatacgagggctagatttgtccaacttacactttctagcaataaaaaaacagcaggagagcttcaaatagttctgaagagaagtagaatggcaatttctttatttaacaacatgttracataaagatttaaaaatgtatatttattagaaagaagggcaaaatttgattcttcctgtttaataaaataaggtcaccatttatctggacatgcacacgggaaacaaaatggctgcagaaaagaatgactttgagatcagacccatcaaataagattacttaattgtctgctgccatactagacactcagaaaagcaaaataagataaataatttcattgtgagggtaagaaattctattaaattgtaaaatgttgtgtacttgggtagcgtggggtggatataattaggaatcatgtctttacttggcggatcagcctattaggctgggtagcaggtaggtagcttcagaaaaggcaagctaaagaaaagactcagaggtagaaatgagtgttagggctgtcctag

SEQ ID NO: 38943 - DNA, 821 bp, Homo sapiens
gtatagctaggtctaggcctataggcgagttattaacctccaggtcatcacttcaaaataaatcattcaatacctatactctaaatgtctttgtaggttattctgtatctgcatggaatgtacaccagtaaaaaggataacttaaggataatacagaatttatattttacttatttccttctcaattagtatacatacacatatgcatacacacagaccacttgagctaccttgatggctagcccacacttttacctaaatgagaaatagagtaagtagtgaagtaaagaggaaaaaatacgagggctagatttgtccaacttacactttctagcaataaaaaaacagcaggagagcttcaaatagttctgaagagaagtagaatggcaatttctttatttaacaacatgttgacataaagatttaaaaatgtatatttattagaaagaagggcaaaatttgattcttcctgtttaataaaataaggtcaccatttatctggacatgcacacgggaaacaaaatggctgcagaaaagaatgactttgagatcagacccatcaaataagattacttaattgtctgctgccatactagacactcagaaaagcaaaataagataaataatttcattgtgaggrtaagaaattctattaaattgtaaaatgttgtgtacttgggtagcgtggggtggatataattaggaatcatgtctttacttggcggatcagcctattaggctgggtagcaggtaggtagcttcagaaaaggcaagctaaagaaaagactcagaggtagaaatgagtgttagggctgtcctag

SEQ ID NO: 38944 - DNA, 641 bp, Homo sapiens
atattttctgcataaggaaccatataatcctttacctcatttaaataatagattcataattttattcccactaaactcttatgtgaaacattaacatgcttactaagaccacatgctcaaaaacatacttgatatttctgtataaatgttatgtgcataagtactcacgtgtttagatttctgtctagtgatttttgtggagwttttcacatccatttactctaaactgtaagaatataaggaaagagttttctaaaaatagggtgacaagcaacttttaatataaaactgagagtgacgctgaactaataatatttagtgtacatgtgaaaatgatgtgtaccattcttagaatatccagtttagaaataagatttttaattcctggagatagagctaatttaaagaatcagctcaaatttgtcctgattgtatttaaaataaaaatcacttattttgctttactcttatgtttaacatcttttccaaattctgaagcaaattgagtggtagacacaactgtttacattttcattgaacaagtggcaacgaaatctctgaaacttagacaatgattatacgtccacgttccaatatgtaatacaaaaagcaaatataaatttcacataacctagaatatt

SEQ ID NO: 38945 - DNA, 641 bp, Homo sapiens
atattttctgcataaggaaccatataatcctttacctcatttaaataatagattcataattttattcccactaaactcttatgtgaaacattaacatgcttactaagaccacatgctcaaaaacatacttgatatttctgtataaatgttatgtgcataagtactcacgtgtttagatttctgtctagtgatttttgtggagtttttcacatccatttactctaaactgtaagaatataaggaaagagttttctaaaaatagggtgacaagcaacttttaatataaaactgagagtgacgctgaactaataatatttagtgtacatgtgaaaatgatgtgtaccattcttagaatatccagtttagaaataagatttttaattcctggagatagagctaatttaaagaatcagctcaaatttgtcctgattgtatttaaaataaaaatcacttattttgctttactcttatgtttaacatcttttccaaattctgaagcaaattgagtggtagacacaactgtttacattttcattgaacaagtggcaacgaaatctctgaaacttagacaatgattatacgtccacgttccaataygtaatacaaaaagcaaatataaatttcacataacctagaatatt

SEQ ID NO: 38946 - DNA, 571 bp, Homo sapiens
ccagtgtagtgcccagctagtcaaaatccatgctgatgcaaatgaaacacagcctcacacgaggtgccccgtgtggatgatccactgcaatccccaccaccatctcaaaccccctgagactcccatcacctggcaatgctacagttactatgagtgtggtctgcctcccccaggtcactgggcccccgtgggcagtgatcctgtctgttccgtttactgccatgtgcccagggccaagaacagtgcctggcatgtggtaggtgctcaggatcttgttgtgaaatacacaagtggacaacacggtaaggtgactgctttactatcccctttcacaaacgaagaaactgagaggtagagatgaagccagttgcccaaggccacacagtgagtgtatttgaacccaggcagcctgactcccgagcctaccctgttaactaccaccctacacaggagcatatgaaaaataaatgcatgagtkaatgaatgaatgcaaaagtgaatgaatgaatgcatgagtgaatgaatgaatgcatgcatagtgaatgaatgcatgagtgaatgaatgaatgaa

SEQ ID NO: 38947 - DNA, 577 bp, Homo sapiens
tactattacagatatttcaaaacaccatttacctgcactgttttgatttctccaaccataaggagagttaatgtatttcacaaacacggaaatcacaaaacacctgggattcttgatagacaggttcacatacagcaataaatgcaacagagaaccgttctcaggtattctcaagtatttttcaacatacatatcattttctaagaattcagtattgaggaagaaaacaaatccaaggtagaatgaatggaaaacaggcactgctttcaatgagacactaatatgaaayggctgctttttattaacaagtaacccactgacaggctagacatatgaacatggactgcataataaaaatgtgttctacaggccaggtgcggtggctcacgcctgtaattccagcactttgggtggctgaggtgggtggatcacgaggtcaggagatcgagaccatcccagccaacatggtgaaaccctgtctctagtaaaaatacaaaaaattagctggacgtggtggtgtgcgcctgtagtcccaggtactcaagaggctgaggcaggagaatcacttgaacccggg

SEQ ID NO: 38948 - DNA, 1325 bp, Homo sapiens
gcaatgtctaaagagaaagtgttctggcccatattaatctaagccacatcacatgataccatgacgccttctacccagcaagtttacttctgccttctcataaccctggactttacatatacatagcccgacgaggaatcagaaattaaaaataaatcattttttctgcattaaaaaatcacaaacttagctaacactgaaactaaatatttcaagaaaaaggcagtgctgtgtttaaaatgtactatatctgaatgtctggagaaatgacaggttgagatacttgcagactaccccaaagtcactttagcctcttgtgtggctgacgcctcttagacttgtaccccaggacttgactgtggattgcataattttaaaagaaaacgagctataggagttacttccaggaggtacaaatatcgttcctacattagcatcagaagtccagtccatgtttattcataactgacatgcaactgcaatttaacaaatgaagctgcatcctcttatccgctcctgagggttgaaaaggatgtctgagttctccttagggtgtttcaataagtttattcaagaaaatgccagaaatccagaaggactgctttatgatgagcgcatttataatgatcagtaagtggcctttacctagattctcagtgaagaggttcagctgccagacgtgccgccrgactatccgttccatgtcttgcagtgattggaagagatgagaattcgctttcctgtccatgcaaatccactgtaagggattctagagtaccggagcctagagagttctctgagatggagggtgcaggacatttgcaaataaaagagcctgaggcttaagagtcactagaggagctttaatcttatcagcatattttgcatctaccaactgcaaacctagcctaaggcataaagaatcgagtcttggtccctctgttattaaggactcactcacaaaattaacctcttaaagatctgccctctgattttagtgtctgaaatgcaaatgaagcagcccttcagtgccttgagataattataataatcttcttaaagctaaaatgcttcactcaactctaagtctccattacaacccggaccccagtcttcagttcatcaaaagccagacagaggaggatggggccacggcagaggagtgatagcatctgtggctccgatctaattccagggatggatgtggaccaggaggtgcctgtccccgaggcagagggggtagttcattccccgggggctgtttcttcaggaactgctcagacgggaagtgacaggtgtcatggctcagtcccttgtccttcata

SEQ ID NO: 38949 - DNA, 1325 bp, Homo sapiens
gcaatgtctaaagagaaagtgttctggcccatattaatctaagccacatcacatgataccatgacgccttctacccagcaagtttacttctgccttctcataaccctggactttacatatacatagcccgacgaggaatcagaaattaaaaataaatcattttttctgcattaaaaaatcacaaacttagctaacactgaaactaaatatttcaagaaaaaggcagtgctgtgtttaaaatgtactatatctgaatgtctggagaaatgacaggttgagatacttgcagactaccccaaagtcactttagcctcttgtgtggctgacgcctcttagacttgtaccccaggacttgactgtggattgcataattttaaaagaaaacgagctataggagttacttccaggaggtacaaatatcgttcctacattagcatcagaagtccagtccatgtttattcataactgacatgcaactgcaatttaacaaatgaagctgcatcctcttatccgctcctgagggttgaaaaggatgtctgagttctccttagggtgtttcaataagtttattcaagaaaatgccagaaatccagaaggactgctttatgatgagcgcatttataatgatcagtaagtggcctttacctagattctcagtgaagaggttcagctgccagacgtgccgccagactatccgttccatgtcttgcagtgattggaagagatgagaattcgctttcctgtccatgcaaatccactgtaagggattctagagtaccggagcctagagagttctctgagatggagggtgcaggacatttgcaaataaaagagcctgaggcttaagagtcactagaggagctttaatcttatcagcatattttgcatctaccaactgcaaacctagcctaaggcataaagaatcgagtcttggtccctctgttattaaggactcactcacaaaattaacctcttaaagatctgccctctgattttagtgtctgaaatgcaaatgaagcagcccttcagtgccttgagataattataataatcttcttaaagctaaaatgcttcactcaactctaagtctccattacaacccggaccccagtcttcagttcatcaaaagccagacagaggaggatggggccacggcagaggagtgatagcatctgtggctccgatctaattccagggatggaygtggaccaggaggtgcctgtccccgaggcagagggggtagttcattccccgggggctgtttcttcaggaactgctcagacgggaagtgacaggtgtcatggctcagtcccttgtccttcata

SEQ ID NO: 38950 - DNA, 596 bp, Homo sapiens
tgcctctaagatattaatacctggcttctgyagatataccctgggtgcctatagctcaaccaggttgaaatatgtatttctggagaagcttatctgcgatgtctgtttttagtgataacaggagctcactgttggaactcaataaatagaaaagattattactctctgtcaacatttatgttgttttgtcctttgaataaatgggagccttagtgatcttactcagttacagggttctaaatgccatctagatgccaatgattcccaaatttatatctgcagcccaggctgcttcctgaattccagactcatccatccagccctctgctggacgtctcctcttgatgtctagtaggcatctccacctcggtgcattcagctgcgctcctgatccctcaggacccctccccatctcatttaatggcagctccatctttccaacaggttatgccaaaatcctcgggctgattctcacaaccttactttctctcacagtaatcaagaattttattggctatcttcaaaatacatccagaatctgtcaaccccttcactgctcccaccctggtctgatccatcaccactctcacccacgt

SEQ ID NO: 38951 - DNA, 596 bp, Homo sapiens
tgcctctaagatattaatacctggcttctgtagatataccctgggtgcctatagctcaaccaggttgaaatatgtatttctggagaagcttatctgcgatgtctgtttttagtgataacaggagctcactgttggaactcaataaatagaaaagattattactctctgtcaacatttatgttgttttgtcctttgaataaatgggagccttagtgatcttactcagttacagggttctaaatgccatctagatgccaatgattcccaaatttatatctgcagcccaggctgcttcctgaattccagactcatccatccagccctctgctggacgtctcctcttgatgtctagtaggcatctccacctcggtgcattcagctgcgctcctgatccctcaggacccctccccatctcatttaatggcagctccatctttccaacaggttatgccaaaatcctcgggctgattctcacaaccttactttctctcacagtratcaagaattttattggctatcttcaaaatacatccagaatctgtcaaccccttcactgctcccaccctggtctgatccatcaccactctcacccacgt

SEQ ID NO: 38952 - DNA, 566 bp, Homo sapiens
gcagctaacctttggtcagagggtctttattgagcaagtcaaaggagaccatggtgatccacacctgctccctcagcttattctcttactcttgacacctctacattttcccacaggtcttgactgtattgatttgccagtgttctcttattgtttacagattggtcattttccctaaataaagggtaagttgcacgagacagagagcagagtcctaagtgaacaacacactgctgtctacacagaaagcaaatgaccaggcttggtgattttcatctcaacagaaaacaattcttgcacacctacctcttggctacattaggtaaataactttgtgcccagtctgggggagcccactgtttagagaaagagacagacacataaatgatcatttcagtagcacattgtaggtccatgcaggcctggggaaccctcctgacccagcccaaggggctcagggaggttgcttggaagagccayggccttgaaaagtaagaaggagttcactggagttatccgagggcaacaaggtgaagtgagccagagaaagacggccaaccacggca

SEQ ID NO: 38953 - DNA, 2104 bp, Homo sapiens
gattctcatgcctcagcctcccgagtagctgaggttatagatgcgcaccaccacatctggccaatattttgtgtgtgtgttttgttgttgttgttgttgttttgtttttgagacaaagtctcactctgttgccaggctggagtgcagtggcgtgatcttgactcactgcaacctccgcctcccaggttcaagcaattctcctgcctcagcctcctgagtagctgggactacaggcatgcaccaccatgcccagccaattttttgtattttcagtagagacgagttttcaccatgttggccaggatggtctcgatctcttgacctagtgaaccgcccacctcggcctcccaaagtgttgagactacaggcatgagtcgccacacccggccattattttgtatgttttgtagacacagggtttcaccatgttggtcaggctggtctagaactcctgatctcaaatgatccacctgccttggcgtcccatgatgtttgggattacaggcatgagccactttgcctgacctaaaatattatttattttcttttaacactctcttaactacttaggcaaataaccgtgcagtcttcttcaggttattacttgtcaggatcaagataatttaatacctataactatttttatgttgtttttctttaggccaaaagaggtattaagaccaagggttgtcaatatgaaattttgagagtttggagcacagttttattttacttgtattactcaactacttctgacataaaaattcatcttctgctcctctgtcagttcactcaaacatcaaggttctgtcagatttttttcactttagatctgtattttagtatttttaaacatatactggttagatatatttttgtgcattgttcctgctgtagcaattacaatgtgaatatgaagaatttagcttctgttcctcattggtatgtgagtatacctttttcctttctgtctacttcccatatttaggcagcttcttataataatgacattattataagctctacattaatagagtcctgtataatgtataaattctctaagttgcactgttttatttcattttcccttagtgtccatagaggtgagggggaaaaagaaaccactcaggttattactggtggcagagctggatcattaaccacaagcccataagtttcagcatactattttccatattattttcaagacagttttaaaaaagatcattcgtagagatagttatgaaaataatttaaagcataaataaatcataccttctaacttaaatttatgtagatacttatgtggttccaaacatcaatatttttattccaaaatatttattgaatctttattaagcattatacttggctatctacggtagagatatatatactgatgtgtaggtaaacatttaacagttggctttctgtggggagaaaagcccttatttgaagtttttgtggtcttcttttatataaatattatgactatggttgatttcaagctatcaacttgatatttactgaatgccaactttaagagagatgttcacagtcagctctggaaagctggttacaaaatctggttccagctcatgctcagaaagatgaccatacaaaaggaaaaataagatattgacaaaaatagrccctgccaaaacctcacaaggcagtatataatgtatatgagagagttgtggaaaacagtttaaatatttcaaaatggaaatgcttgaattcttggtctgacattataactttgaaacagtgaagagtatcctactattctttgcttaaattactttttctcttctaatttctagcatgttgctgacttgccacaacttagggttttttttttttttctttttcacttgggcaatcttttcactttaaaattgctttttcccatgaagtagctttttttatttttatttccatttaaccatagagagttataaattggcgctttactgtttgtcaataagagctctaaaagccagtccactgctaggaaagatatgggactgaggtctgagattgattttagttagtatttatttagaatgatcacagagaacatttcttgacaaaaagccca

SEQ ID NO: 38954 - DNA, 2104 bp, Homo sapiens
gattctcatgcctcagcctcccgagtagctgaggttatagatgcgcaccaccacatctggccaatattttgtgtgtgtgttttgttgttgttgttgttgttttgtttttgagacaaagtctcactctgttgccaggctggagtgcagtggcgtgatcttgactcactgcaacctccgcctcccaggttcaagcaattctcctgcctcagcctcctgagtagctgggactacaggcatgcaccaccatgcccagccaattttttgtattttcagtagagacgagttttcaccatgttggccaggatggtctcgatctcttgacctagtgaaccgcccacctcggcctcccaaagtgttgagactacaggcatgagtcgccacacccggccattattttgtatgttttgtagacacagggtttcaccatgttggtcaggctggtctagaactcctgatctcaaatgatccacctgccttggcgtcccatgatgtttgggattacaggcatgagccactttgcctgacctaaaatattatttattttcttttaacactctcttaactacttaggcaaataaccgtgcagtcttcttcaggttattacttgtcaggatcaagataatttaatacctataactatttttatgttgtttttctttaggccaaaagaggtattaagaccaagggttgtcaatatgaaattttgagagtttggagcacagttttattttacttgtattactcaactacttctgacataaaaattcatcttctgctcctctgtcagttcactcaaacatcaaggttctgtcagatttttttcactttagatctgtattttagtatttttaaacatatactggttagatatatttttgtgcattgttcctgctgtagcaattacaatgtgaatatgaagaatttagcttctgttcctcattggtatgtgagtatacctttttcctttctgtctacttcccatatttaggcagcttcttataataatgacattattataagctctacattaatagagtcctgtataatgtataaattctctaagttgcactgttttatttcattttcccttagtgtccatagaggtgagggggaaaaagaaaccactcaggttattactggtggcagagctggatcattaaccacaagcccataagtttcagcatactattttccatattattttcaagacagttttaaaaaagatcattcgtagagatagttatgaaaataatttaaagcataaataaatcataccttctaacttaaatttatgtagatacttatgtggttccaaacatcaatatttttattccaaaatatttattgaatctttattaagcattatacttggctatctacggtagagatatatatactgatgtgtaggtaaacatttaacagttggctttctgtggggagaaaagcccttatttgaagtttttgtggtcttcttttatataaatattatgactatggttgatttcaagctatcaacttgatatttactgaatgccaactttaagagagatgttcacagtcagctctggaaagctggttacaaaatctggttccagctcatgctcagaaagatgaccatacaaaaggaaaaataagatattgacaaaaatagaccctgccaaaacctcacaaggcagtatataatgtatatgagagagttgtggaaaacagtttaaatatttcaaaatggaaatgcttgaattcttggtctgacattataactttgaaacagtgaagagtatcctactattctttgcttaaattactttttctcttctaatttctagcatgttgctgacttgccacaacttagggttttttttttttttctttttcacttggrcaatcttttcactttaaaattgctttttcccatgaagtagctttttttatttttatttccatttaaccatagagagttataaattggcgctttactgtttgtcaataagagctctaaaagccagtccactgctaggaaagatatgggactgaggtctgagattgattttagttagtatttatttagaatgatcacagagaacatttcttgacaaaaagccca

SEQ ID NO: 38955 - DNA, 2588 bp, Homo sapiens
ctttattatatttccctaagtgttgcctatataatgttgatttattgtctttattactctgaatattaatttaatcagcataagtttgaacattgttctcttttcattgatttttttctattatacagtgattcatgtcaatctttaaaatcaggcatttctttaactccggaaagcttatgtctattttatctttgattacggcttttcttacatttgttctaatattatttttagaaaatatgaacttacattggatttttctcttacgtaaatatctattatcttatttggatattttctgcttattggctatttttctctgacttctggattcaattaacacattaaaattgaaatcaagattcagattttgttacagagtcacttctgcatattgttatttctggtaaaaaccacgtgtacaatggcattttagtttccttttatattttttactcattcagctttcttatccccttccacatttatggatacctttccatttcagtcattataatataattttgttcaygtgtttaatagagcccataatttattgaattttacagaaaaaaagtactttccaaaatttgtcttgtgttttataaatggagttttccaataaatctggaatagactttttctattgcttactgtaatgaagtttttatcaagttttattttctcccggtcttggagaaaaatagataatatgctgcacatatacaaataaaatgttgttgcatctttcttgctgacatctcactgtctacctcgttgagcaaaatcttgacaaaattttcctcctcttagattttaaattataggtttagttgactttcaaaccataagtacaatgtttaatattagtagctattgtttagctagtgttaacactattggattgagaaaaaatgttcttcttttacagattgctgtgccttctatgcagataatttaatcttagattattataagctgtttataatgcttcttactcagcaacattaactctcagagtatcctgatcctatatcctataaacccatttatactacatacttcacatcatggaatatactgtaccataactagtatatttctactccaaatatatgtattagtaacataaaattaaaagtgcaatggcaatggccactttatataccatgtgttgtgaattgtagggctggattctaaatctctgtccttctacagatgcacatttgcttaccccctaaaactatgttatgcatgccccctttttttcccacaataatttatttattgacagcctcctctcgcctcccttgcagtctctaagtcactttttccgcttgtagattttgcgtgcaagccccagaaagatggctgggggcaggagcgctgcatactgttcgatgagacccatgatgtgactgtaagtgtcttcctcatattgcaagaaaacggctggtagatccagctcctcatatagtgccttcacccaggccaccttctcggcttccttctgcctgaattttccttcaggatctggtactgttacggagtggcctgttgcagacactgaaccaccagccagctgcatttgttgtcctggatgtcagtgccaactttgccggtcacactggggtccccaaagaggtcaaggtaatcatcctgaacctgaaggaactctcccatccccagcaggatcttcttggcattggcgtgctccttcttgccatcaattcctgccatgtacatggctgcagctacaggaaggtagaaggagtagaaagctgtcttgtacttgacaatagatttgtgcctcttttcagtgaatctgccaagatccacattgccctggggggctgtgatgaggtccagggtctgcctaatctcagtctgataggaactctgcaggaagagcacagtcaggttcaggtaatagggctgctcccggcaatagatcttcagcaggtggtagatgcaatagatcttcagcaggtggtagatacatgcttccagaaggataacatcattgatggcatctaaatccatgcctggcttctgataccagcagatctgtccccggcaggtgaaggatgaatccatgatgtcatctgccaccaggaagaaagcttgcagcagttccacacacagtcagggcccattggagactatgagcaacctgtttccttggctccaccagcttctggaacgctactagcaccatcaaacctcagtgatacttgccttcaatggcatcaaacctccttgagctgggcaatagcatctcctgtctctgggtaccccatctcatccttagtcagcaccctaacaatctgggagaagtgctgtacaaattcctacttttcttgggcataaacatctgatttctcgtctcattcattctgagggaggagcaaagggctctgttcctggatgtgggtctgtatgacgctttaatagacttccaggatgtttcatagtacataccatgtaccatgaagttgttaatgggacatgagaagacctgtgatgtggcagggctggtggtgggagatgagggtcagcatttataaagaatcgctatgaaccct

SEQ ID NO: 38956 - DNA, 2588 bp, Homo sapiens
ctttattatatttccctaagtgttgcctatataatgttgatttattgtctttattactctgaatattaatttaatcagcataagtttgaacattgttctcttttcattgatttttttctattatacagtgattcatgtcaatctttaaaatcaggcatttctttaactccggaaagcttatgtctattttatctttgattacggcttttcttacatttgttctaatattatttttagaaaatatgaacttacattggatttttctcttacgtaaatatctattatcttatttggatattttctgcttattggctatttttctctgacttctggattcaattaacacattaaaattgaaatcaagattcagattttgttacagagtcacttctgcatattgttatttctggtaaaaaccacgtgtacaatggcattttagtttccttttatattttttactcattcagctttcttatccccttccacatttatggatacctttccatttcagtcattataatataattttgttcatgtgtttaatagagcccataatttattgaattttacagaaaaaaagtactttccaaaatttgtcttgtgttttataaatggagttttccaataaatctggaatagactttttctattgcttactgtaatgaagtttttatcaagttttattttctcccggtcttggagaaaaatagataatatgctgcacatatacaaataaaatgttgttgcatctttcttgctgacatctcactgtctacctcgttgagcaaaatcttgacaaaattttcctcctcttagattttaaattataggtttagttgactttcaaaccataagtacaatgtttaatattagtagctattgtttagctagtgttaacactattggattgagaaaaaatgttcttcttttacagrttgctgtgccttctatgcagataatttaatcttagattattataagctgtttataatgcttcttactcagcaacattaactctcagagtatcctgatcctatatcctataaacccatttatactacatacttcacatcatggaatatactgtaccataactagtatatttctactccaaatatatgtattagtaacataaaattaaaagtgcaatggcaatggccactttatataccatgtgttgtgaattgtagggctggattctaaatctctgtccttctacagatgcacatttgcttaccccctaaaactatgttatgcatgccccctttttttcccacaataatttatttattgacagcctcctctcgcctcccttgcagtctctaagtcactttttccgcttgtagattttgcgtgcaagccccagaaagatggctgggggcaggagcgctgcatactgttcgatgagacccatgatgtgactgtaagtgtcttcctcatattgcaagaaaacggctggtagatccagctcctcatatagtgccttcacccaggccaccttctcggcttccttctgcctgaattttccttcaggatctggtactgttacggagtggcctgttgcagacactgaaccaccagccagctgcatttgttgtcctggatgtcagtgccaactttgccggtcacactggggtccccaaagaggtcaaggtaatcatcctgaacctgaaggaactctcccatccccagcaggatcttcttggcattggcgtgctccttcttgccatcaattcctgccatgtacatggctgcagctacaggaaggtagaaggagtagaaagctgtcttgtacttgacaatagatttgtgcctcttttcagtgaatctgccaagatccacattgccctggggggctgtgatgaggtccagggtctgcctaatctcagtctgataggaactctgcaggaagagcacagtcaggttcaggtaatagggctgctcccggcaatagatcttcagcaggtggtagatgcaatagatcttcagcaggtggtagatacatgcttccagaaggataacatcattgatggcatctaaatccatgcctggcttctgataccagcagatctgtccccggcaggtgaaggatgaatccatgatgtcatctgccaccaggaagaaagcttgcagcagttccacacacagtcagggcccattggagactatgagcaacctgtttccttggctccaccagcttctggaacgctactagcaccatcaaacctcagtgatacttgccttcaatggcatcaaacctccttgagctgggcaatagcatctcctgtctctgggtaccccatctcatccttagtcagcaccctaacaatctgggagaagtgctgtacaaattcctacttttcttgggcataaacatctgatttctcgtctcattcattctgagggaggagcaaagggctctgttcctggatgtgggtctgtatgacgctttaatagacttccaggatgtttcatagtacataccatgtaccatgaagttgttaatgggacatgagaagacctgtgatgtggcagggctggtggtgggagatgagggtcagcatttataaagaatcgctatgaaccct

SEQ ID NO: 38957 - DNA, 2588 bp, Homo sapiens
ctttattatatttccctaagtgttgcctatataatgttgatttattgtctttattactctgaatattaatttaatcagcataagtttgaacattgttctcttttcattgatttttttctattatacagtgattcatgtcaatctttaaaatcaggcatttctttaactccggaaagcttatgtctattttatctttgattacggcttttcttacatttgttctaatattatttttagaaaatatgaacttacattggatttttctcttacgtaaatatctattatcttatttggatattttctgcttattggctatttttctctgacttctggattcaattaacacattaaaattgaaatcaagattcagattttgttacagagtcacttctgcatattgttatttctggtaaaaaccacgtgtacaatggcattttagtttccttttatattttttactcattcagctttcttatccccttccacatttatggatacctttccatttcagtcattataatataattttgttcatgtgtttaatagagcccataatttattgaattttacagaaaaaaagtactttccaaaatttgtcttgtgttttataaatggagttttccaataaatctggaatagactttttctattgcttactgtaatgaagtttttatcaagttttattttctcccggtcttggagaaaaatagataatatgctgcacatatacaaataaaatgttgttgcatctttcttgctgacatctcactgtctacctcgttgagcaaaatcttgacaaaattttcctcctcttagattttaaattataggtttagttgactttcaaaccataagtacaatgtttaatattagtagctattgtttagctagtgttaacactattggattgagaaaaaatgttcttcttttacagattgctgtgccttctatgcagataatttaatcttagattattataagctgtttataatgcttcttactcagcaacattaactctcagagtatcctgatcctatatcctataaacccatttatactacatacttcacatcatggaatatactgtaccataactagtatatttctactccaaatatatgtattagtaacataaaattaaaagtgcaatggcaatggccactttatataccatgtgttgtgaattgtagggctggattctaaatctctgtccttctacagatgcacatttgcttaccccctaaaactatgttatgcatgccccctttttttcccacaataatttatttattgacagcctcctctcgcctcccttgcagtctctaagtcactttttccgcttgtagattttgcgtgcaagccccagaaagatggctgggggcaggagcgctgcatactgttcgatgagacccatgatgtgactgtaagtgtcttcctcatattgcaagaaaacggctggtagatccagctcctcatatagtgccttcacccaggccaccttctcggcttccttctgcctgaattttccttcaggatctggtactgttacggagtggcctgttgcagacactgaaccaccagccagctgcatttgttgtcctggatgtcagtgccaactttgccggtcacactggggtccccaaagaggtcaaggtaatcatcctgaacctgaaggaactctcccatccccagcaggatcttcttggcattggcgtgctccttcttgccatcaattcctgccatgtacatggctgcagctacaggaaggtagaaggagtagaaagctgtcttgtacttgacaatagatttgtgcctcttttcagtgaatctgccaagatccacattgccctggggggctgtgatgaggtccagggtctgcctaatctcagtctgataggaactctgcaggaagagcacagtcaggttcaggtaatagggctgctcccggcaatagatcttcagcaggtggtagatgcaatagatcttcagcaggtggtagatacatgcttccagaaggataacatcattgatggcatctaaatccatgcctggcttctgataccagcagatctgtccccggcaggtgaaggatgaatccatgatgtcatctgccaccaggaagaaagcttgcagcagttccacacacagtcagggcccattggagactatgagcaacctgtttccttggctccaccagctyctggaacgctactagcaccatcaaacctcagtgatacttgccttcaatggcatcaaacctccttgagctgggcaatagcatctcctgtctctgggtaccccatctcatccttagtcagcaccctaacaatctgggagaagtgctgtacaaattcctacttttcttgggcataaacatctgatttctcgtctcattcattctgagggaggagcaaagggctctgttcctggatgtgggtctgtatgacgctttaatagacttccaggatgtttcatagtacataccatgtaccatgaagttgttaatgggacatgagaagacctgtgatgtggcagggctggtggtgggagatgagggtcagcatttataaagaatcgctatgaaccct

SEQ ID NO: 38958 - DNA, 680 bp, Homo sapiens
ttcttcttctaagtcttctactcacgtcttctccaacatctttcattgctgcttgtctagttccttcaactgcactactgttcacttggattcagtctttcagtcttcttctggtccttgcaggacaaagtgctagtggtgcctcccaagcaaagagcatgcccctcatggacccaacaataagtgcactgtgggataccagttttgtggagagaagtgtcatccatgggtgtttcacaaatcactgaagcagtggcaaatccttggtgatatcattacctttcagggccagacacatactgcagctagatggtgcckcaaaaagccagtgactcatcctttttaatctatggggtctaaggatggttcttctcttcagagttctaggctgtagggagtgatggatctgcagctaggaaaagaagctgctgtgggtgggaagatgaagcttctcctcttccaggttctactctcccccactgtcttgctagacatcaggttcccaggaatcagggtacagcagcaccacgggtctttccttattacctcctcaggttttgagcaactggtagccccaggccttcccctgcaccacctggacacccaccaggctagcttcttgaagtcaccacggagtgtttcgatgccagagaatatgtctgagaggagagatcataact

SEQ ID NO: 38959 - DNA, 681 bp, Homo sapiens
tttgtatctctgatatctagcacagcgctttttataaggattttctgaactcaactgcaatcaggctagaaacacaaccattttgtatgttcactctcacatacaaacgtgttcacatgtacacgcaaacagagtcagggctacttaggttaaacacaacacatatgaagagaccaaaatattttctcaaattaaaagttgaatatatgtgacaacgatgcagctcccacaaaacttgatttgtgtttcgactgccttatttaaaaattatatgacactttcractctaaaattccttgtctgcacctgaaacattgcgtttagttcttggtaaacagacacaaaaagagccatagtgattagtgttgaaatatcctcatacaatccacggtaccaattaacctctctaaccctcagtctcctcacctgcaaaatgaggaaattaggcctctgagaaccttcttggatctcagatgtttttaattaaatgccatgtcaagataaggaataaagaacagaaggagtagagtgagaggaaataaaacaaaacttgcttacctctcaatgtgtgcttcatgcacctattaaaacacagatacatcattttgattaaaacaaatttatgaatctaaacttttcaaaatgcgtgagtgtttatatgacattacagaaatacaggag

SEQ ID NO: 38960 - DNA, 1190 bp, Homo sapiens
tgcatagtaatagttttatgtcaagatattttagagacaaaatattgctaatataactaaaatatttgaccgattcatttagctaaaacaacaaactggttaggaagattgactttttatgtacggaaaaatagttactaattcatcatatcttctgaaccatggataatctgtagtttcttgtccaagaattccacattaaagatgttctcattgaagttctccatcagatgtgaaagcttacagaattctccagagagctttataacaatcagacttacaaccgcttaaacaaygtgtcattatttaaaatctttaatagtaaatatgaaatgcacacaattgaaacagaaaatagcaagcagaaatccctcaggaagttgactatagggatcattcttgaatagaaaaatttaatgatccataaaaatagaataataatcaaatttctagatataggaagacattaatataattatagcagaggtactaagaagatcatagtactgtggggaaaggtcaactgtgttgataagcaagtaaaatcattattttgaaactaataaaaattcttccattttattgaaagtcatgtctatctaaaatctctttctattaaaacttaactggaaatctgatctatgaggttgtgtgtgtgactgaattgcaccaatttcccacctgatgtattgcaatgaatatatatagcagtatttcaaagtcaacatttatttattttaaataatctttagtgtattcaagggccaaaatgaaatatcaaaagggatattgaaagataaaatagcttatgcaaatggaacaaattgaggtgagaagaaagtatccccttgattcccttcatcttgtatttaaaagtaacaaatctgaagtcatttagtaaaacacatttccagctcaacaaaattcatacataattttcacttccatatgaggcttcttatattcagtcagtttaattatctacaacccttgaatgacattttttaatcctctgtggttcactgaaaacccttgtaaaatataactaagtagtgtgttcattaaaatgtcagaaacattttcaagtccaagtagtacagcatattattcctaaatgtagtaataatacaataactatgccaggagggtgtaattagcaactatttgaatgaacaattgtcttaaattat

SEQ ID NO: 38961 - DNA, 582 bp, Homo sapiens
tcagaatgtaataaaggcatatattctcccacaggttttggttgttctccaaatatttcctctctgatatatagtgttttaatttgcatttccctagtggcatatgatgtcgattatcttttcctatgcttgttttctatctatatatcttctttagtgaggtctatcgatctattgcccatttttaattggataatttgtatcccagatgtttagttttaagaggtctttgtatattttggatgcaagtcatttatcaaatatatgttttgcaaatattttctatcagtctctggcttgtcttttcattttcttaacagtctgtttcacagagctcaagtttttaattttaataaaatccaacttctcagactgtagtttctgtctttcctacttagcggctggtggtgaatttttggacttttaaaaaaactaatttgggttctctttttctgagtgagctaaatttattgatcctacttcattcatcacgtttcttgttgactatctgttcctttgcatccatawttttccttgatacatcttctaatatcccccaaaccactcctttttcaatccttt

SEQ ID NO: 38962 - DNA, 577 bp, Homo sapiens
tcagtaagtagacatagacattgaggcccacagaagttaaggctagtggcaytactaggacttagtatttcttctctgcgagggcacgtgggcttaagacaagttacagctctgggatctgaggtttgtataagcaactctgtaactctgaagtatttttttcatggtggactttgggccatttaaaaaaaaattcaaatgaacaagcactagggtataattggtgtttttttcttaattttgatttttaaaaaataagatggcctctattttaaatgtgttttataaaggttaggtgtggattattagcataattaggttttttttttaatttcagaacccaagcaaacctcactttaatcactacatgtttgaagcaatatgtttatccataagaataacttgcaaagctaaccctgctgctgttgtaaattttgaggaggctttgtttttggtgtttactgaaatcttacaaaatgatgtgcaaggtaagttaacggaaattattttctttgtaatggaataaaattaacatggctataaaatgcagcccacctaagcgatgtgggccttttgt

SEQ ID NO: 38963 - DNA, 649 bp, Homo sapiens
cctgaggttgggagttcaagaccagcctgaccaacatggagaaaccccatctctactaaaaatacaaaatgagccrggcgtggtggcacgtgcctgtaatcccagccactcgggaggctgaggcaggagaatcacttgaacacaggaggcggaggctgcagtgagccaagatcgcaccactgcactccagcctgggcaacaagagtgaaactctgtctcaaaaaaaaaaaagtaatcacaacaccccaaattcagactctgtaacagcctctcattgctcacactctaaaatgacagttttcataggtgaatttcaggtaaaacacattgttgctctgcaagccataacagagattcctgccatgttgtaattagacgggcagctcgccagcagcttaggacaaagccagagcttaacttcagattcaggcagcacaagttacttcaggaggtttggggctgtcaagggattttgctaattcctcagtgatttttcaccatatctgtacttataggaaagaaataaattctgtctggaatgtattaacctctattcctaatttccatagcttgagtaatactgaggagcattgggagggaaaaatgaatacccacacttcccatcagcagagagaatcacagagcctag

SEQ ID NO: 38964 - DNA, 943 bp, Homo sapiens
cttggaaaaaatgtatcattagtaacacttgaaaccaaaaaaaaaaaaaagaaaagaaaagaaaaagtagtttcagtccaggaattgaactgaagttagaaaaatctgcgttctttttgttttttgtttttgttttttagcatcaaaatgtgagatgagaagatctgggttctaatcaaggttttactacaaatcgtgtgacccctttagactcacttaattcccatagcgcctcagtttcctcatctgcaaaaaatgaactaaattgaagagctctgaaattttgtaaaacatgtgctgttaattctgaagttggttggctcctttttacatccttactgactttagtcacggtaagtagcacaatggcttgcattttctccagatactaattctcagaacataagttgtttttaattttgtatctatgccatctttgcactccaggaagagcccccccrtgtggttcccagtcctagaaaatcagcacctttgcaaggtatcccaacgagtgcacgggcagtgataaaatacaccgcggctccagagtgcattttatcttgcgtaggccttccaagctccacatgctccgtgccaggattagctgagaggacacggggaagccactgctgaccaggctgaaactatatctgggcttgggctcagttgaaggatacagtgagttccttttagtgtgtggcctggcccactgcctggacacacagctacattcagcctcgtctgctgctgtaactaaaccatgtacctcacttcctcaactataggcagggtcatttagattgaaggctgtattttgagtctgatttgattgacacactaaatttattaaacagtagattttgtctatccatgtcactatctcttatgaagtgcaaggaaggctctgttttaagaaggcatggcctccagaaagacactagca

SEQ ID NO: 38965 - DNA, 943 bp, Homo sapiens
cttggaaaaaatgtatcattagtaacacttgaaaccaaaaaaaaaaaaaagaaaagaaaagaaaaagtagtttcagtccaggaattgaactgaagttagaaaaatctgcgttctttttgttttttgtttttgttttttagcatcaaaatgtgagatgagaagatctgggttctaatcaaggttttactacaaatcgtgtgacccctttagactcacttaattcccatagcgcctcagtttcctcatctgcaaaaaatgaactaaattgaagagctctgaaattttgtaaaacatgtgctgttaattctgaagttggttggctcctttttacatccttactgactttagtcacggtaagtagcacaatggcttgcattttctccagatactaattctcagaacataagttgtttttaattttgtatctatgccatctttgcactccaggaagagcccccccgtgtggttcccagtcctagaaaatcagcacctttgcaaggtatcccaacgagtgcacgggcagtgataaaatacaccgcggctccagagtgcattttatcttgcgtaggccttccaagctccacatgctccgtgccaggattagctgagaggacayggggaagccactgctgaccaggctgaaactatatctgggcttgggctcagttgaaggatacagtgagttccttttagtgtgtggcctggcccactgcctggacacacagctacattcagcctcgtctgctgctgtaactaaaccatgtacctcacttcctcaactataggcagggtcatttagattgaaggctgtattttgagtctgatttgattgacacactaaatttattaaacagtagattttgtctatccatgtcactatctcttatgaagtgcaaggaaggctctgttttaagaaggcatggcctccagaaagacactagca

SEQ ID NO: 38966 - DNA, 1216 bp, Homo sapiens
cactaatcctttctttttgtaattattattatcaaaaattttgatattaaataatttcattgagcacatggtaactatacaatgttatttaagtacctgacattgattttctcctttaattcttctgataacccaatgcagcagatactattatgatcactatttcacagataagaaacctgagaccaaaaagattacatagcttgttcaaagtcctgataatacacactatatagtggctgagcttgatttcaaacccagttttatactgatacaagagttttgactcttgtgttattctacctggaatcagcaccctcaaaacacttttgtttcatattataactaattaaagatagtaaatggttctctggtgcaggttttttgctccttagttcagttaaatatgggttcttgtctcatggccaggaaaaattaggcatgtagcagattgaaaagtgaggagggtggaatttactaagcaaaaggaaaactgtcaacaaaaagaggggtcctgcacacaagttttcacctcacaagttgagtaccaggccaccatacacgagttgaagaggccagccttcttccctgtatgaggcgcaaattcctggtagctccaccccattcttccggtgaatatgcgggcccttagtctgagccactccaaattgatttatttcctttactgcgcatgtgttaagggatggaattttttgccgtgggcatgtttagacaaaccccttacacacaatgacccgggtgggttggagattctccagggatacttccctatttgcctaggcatttggctgtctctgcttctatcattttcacaaataaatatgatcaactgttgraaaagaatttgtctcaaaatattatcagtgtaaaagcatgaccttctctttgtgtcttaaccacaaccatggagcctagttgttccaaataaaaggctagtcttgaaacactgtcaatatggtgagaactgatcctagttgggggccaaaaacttaggcataaatagtgttttccattacttcaaaataccatcaatcacaataaaatgatcagttattttgaaaacaaacaacttattgcccttgtttcattgaaatagataactgattttaagtcaatccatttatgtaaatataacctttgagtaatggcagtcgttaattttgggaatgacttacatttcattaacttggacaca

SEQ ID NO: 38967 - DNA, 1216 bp, Homo sapiens
cactaatcctttctttttgtaattattattatcaaaaattttgatattaaataatttcattgagcacatggtaactatacaatgttatttaagtacctgacattgattttctcctttaattcttctgataacccaatgcagcagatactattatgatcactatttcacagataagaaacctgagaccaaaaagattacatagcttgttcaaagtcctgataatacacactatatagtggctgagcttgatttcaaacccagttttatactgatacaagagttttgactcttgtgttattctacctggaatcagcaccctcaaaacacttttgtttcatattataactaattaaagatagtaaatggttctctggtgcaggttttttgctccttagttcagttaaatatgggttcttgtctcatggccaggaaaaattaggcatgtagcagattgaaaagtgaggagggtggaatttactaagcaaaaggaaaactgtcaacaaaaagaggggtcctgcacacaagttttcacctcacaagttgagtaccaggccaccatacacgagttgaagaggccagccttcttccctgtatgaggcgcaaattcctggtagctccaccccattcttccggtgaatatgcgggcccttagtctgagccactccaaattgatttatttcctttactgcgcatgtgttaagggatggaattttttgccgtgggcatgtttagacaaaccccttacacacaatgacccgggtgggttggagattctccagggatacttccctatttgcctaggcatttggctgtctctgcttctatcattttcacaaataaatatgatcaactgttgaaaaagaatttgtctcaaaatattatcagtgtaaaagcatgaccttctctttgtgtcttaaccacaaccatggagcctagttgttccaaataaaaggctastcttgaaacactgtcaatatggtgagaactgatcctagttgggggccaaaaacttaggcataaatagtgttttccattacttcaaaataccatcaatcacaataaaatgatcagttattttgaaaacaaacaacttattgcccttgtttcattgaaatagataactgattttaagtcaatccatttatgtaaatataacctttgagtaatggcagtcgttaattttgggaatgacttacatttcattaacttggacaca

SEQ ID NO: 38968 - DNA, 576 bp, Homo sapiens
ggacaggtgaaccagttcaattacttttccccatattttgattctatcatttaattctagttttgagagtttatactacaggttaaaaatcactgcatgataatagtcaaaaataactcgatagactataaagcaataaaaaagaaaatatactattcagagaatttgtcagaagagctttaatgcaaaaaaggaatgaatgtagccaactgtttccattgcctttggctatttggaaagagatttgtgttttaatattaggaaagagatttgtgtgtttaacaagggtttccctcattgcacccctcgaccctctcagccttttgcaagattccaccaggaaaaatatagcgggtctttggcactcaagaaggtttatgctttctcaaatccagcattagagctatttgatcctacaatggggaacagaaagcaamgccttttaggaaaacaaactgctttgaagacttctaaccatgtaaacaaaaatggcaaatacaggtccatctaaagtggatttagatgattaatctgagcttcccccaaggaaaaaaattctttaaaatttctccaaaa

SEQ ID NO: 38969 - DNA, 624 bp, Homo sapiens
acacaaagcatggttactgtgggatgtaggataaatttctaagtctgccaaattaaattatatttttatactacatcctcaaggactcttccctggaaatgaatgtttcgcaaaatgtcgctggcctcaagagcagtttccgtggactacacagttaccataggttgagctaaatgcagagcatactttgttgtcacaccggatgtgccaggcagagacaggaagtattatgtgctccatgtcactgataagggatggtgaaggtctctaagtggtaaagccaggtttatctctaaaaccatgttctttatttatttattttttttttgagatagagtctcactccatcacccaggcaggagtgcrgttgcacgatctcagctcactgcaacctccacctcccggattcaagcaattcttgtgcctcagcctcccgagtagctgggattacaagcgtgtgccaccatgcctggctaatttttttatttttagtagagacggggtttcacaatgttggccaggctggtctcgaacttctggcctcaggtgatctacccacctcccaagtgccacggcgcccagcctctaaaaccacattcttaaccaccatgctcaacaaagtca

SEQ ID NO: 38970 - DNA, 624 bp, Homo sapiens
acacaaagcatggttactgtgggatgtaggataaatttctaagtctgccaaattaaattatatttttatactacatcctcaaggactcttccctggaaatgaatgtttcgcaaaatgtcgctggcctcaagagcagtttccgtggactacacagttaccataggttgagctaaatgcagagcatactttgttgtcacaccggatgtgccaggcagagacaggaagtattatgtgctccatgtcactgataagggatggtgaaggtctctaagtggtaaagccaggtttatctctaaaaccatgttctttatttatttattttttttttgagatagagtctcactccatcacccaggcaggagtgcggttgcrcgatctcagctcactgcaacctccacctcccggattcaagcaattcttgtgcctcagcctcccgagtagctgggattacaagcgtgtgccaccatgcctggctaatttttttatttttagtagagacggggtttcacaatgttggccaggctggtctcgaacttctggcctcaggtgatctacccacctcccaagtgccacggcgcccagcctctaaaaccacattcttaaccaccatgctcaacaaagtca

SEQ ID NO: 38971 - DNA, 704 bp, Homo sapiens
taaatcacaggacggtaagaatcacacctcccttcgtatttcacattgttcccacaaacctgattatgaaagaatctgaggtacttaccttattcattctctcatcaaactaaggcaggagggcatgccagtgggttcactacaacaggattaggtttctctactcaagcttccctaaactatgactatgataacatccaaaccgaacacctcacatgtgaccttttgagtttcactgagaaagcttagagcagaggtcacaaaatgagtcaacacaggaagaaatatggaacaattgagatgttttctgattttggagggaaaggaatgaaaagtaacccaggcttggctgaaagttgtttccatcattcattcatcaacagctcaacttgctcttaaataacatgtcatctttgaatgcacataaaaccaaggtccaggctaagcaggtgaaaacaaaatggaaacttttgtttggtcaggaaacwacaggaatctgctgagaacactcctgttgcactctatagcttatctctgggagagagaaaagagcggcctctaccttggctgctgtcctcctccgtgctactgaaatcgtcctcatagtaagtattggagtcggtggaggcgctggcatcgctgctcatggagcccttcctctgccgctgcaggacacatgcctaggaaaatgacaattacaaaac

SEQ ID NO: 38972 - DNA, 605 bp, Homo sapiens
aagaaatgagacactccttaaagactagccttttaagagtggcataaaataagtgtatctgcaataatttcactcatatggtcaaccactgacatctattggcaaaagtaggcaggcagggtttggttaacttatgaaagcagataagttttttttttttgattttttgtgggaacatagtagatgtatatatttatagaatacatgagatattttgatayaggcatagtttcattttttcatgaatatccacaggcttttcattcccctatgccatcctttctccctaacttccctctcccactgagtactgcttccttgactttttatttagtgacctctctccagtattttaatacttctagacaataatgcattatcaaggtgccattacattagccagcttctgggggtaacatatttcatttatacatttaataaatatttttaagaatctctacatgctgtaaactgttttaggtgctatgatacaaaagtaaacaatacaaacaaaaatctaagcttacctggagttttccattcaagtagtcaagtagtaagagagaaaataaacagaaaaacaaaataaatggtatagtatacca

SEQ ID NO: 38973 - DNA, 674 bp, Homo sapiens
agcctccatcttgtggtcccctggccaaccctagaattttagaggcatagaagagagatcctaggtctagagactacaatccaaatagactaagttgggaagaataaaggttccctttcttggcttgaagttgccaaggggaagcagttctattgacaacttgcagtaaggtatggcttcacataacataaacaatatgcaccctttattgcttgctctgttcttcatgctactaaccagactctgttgatgttatttttattttagtttttatttggggggggttgctttgcatgtcattcttcctcttggctgttagttgcggggtttgagccttttcctttctgtgattcaggtgcctcactctttcctttccaggttcttccagttcttttaacatgtcaaactctggagatttgttcatgagcgtgcagtcactcaatggggattcttaccaaggggcccaggttggagccaacgtgcaatcacaggtagggacccagccaatatgtcrccaggtgaatgccttagagtccaagagccctcagttgtattggacttcctgcttctgtccagagagagagagaaaaacagatcagaaccaaaaccttaccaacgaccgaaccaaaatcaagacaaccattgtcatggggaatctcgtccacactttgtga

SEQ ID NO: 38974 - DNA, 631 bp, Homo sapiens
tagagaattaaaacattcattgtaggactatgtgcattccacaagttgcaccatgtaccaacaaattgctgtcacattgcatttgtatctgtaagcgttagtgccattttcgcatacctgttaagcaatcttccgttattactttgcaacacatcatttatgtttctctctttactaacataagaccattatcttgccattcagcaacgacaggtgattcatcctagattccaaatgacatcttcttgacacagggtgttaaaaaaaaaaaaaaamaaaacttttttttttggacatattttacctgtgctttagattcctttccaaacaaaaactcacaaaatatatttggtagcacaaaccagcagggactcattaaatcctttcaaagggtaaaagacaataacatttcatcatcaattacttgtatattttaccactggagatttctacatgaaaagtccaaaatggtagaagcttggcataaaggagagaggagaggcaaggaatggaaaaacttcataaacttaatcaaacaaaataaacttctgacttgttttttcagttgtcatcaggaaggattagaatgtcaaaaaggcaaaaagtatttttatgcagtgtgacggttaat

SEQ ID NO: 38975 - DNA, 565 bp, Homo sapiens
atatgcttatttatatacttagtttatatgatttctttctagacacatagaagcatatacttttgatattattttatatttttacataggtatgtatacctttatgaaattagtactatatgatttattatttatttatttatttattattgttgtaagaacatttaacatgaactctgtcttcttaacaattttttttttgacacaggtctctaacccaggctggagttcattggcacaatctcagctcattacagccttgacctcctggactcaagccatcctcccacctcggcctcccaagtagctgaaaccacaggtatgtgcaaccacacccagctaatttttgtattttttgtagagaggaggttttgccgtgttgcccaggctggtctcggacacctgagctcaagcaatctgcccacctcggcctcccaaagtgctgggattataggcatgagtcgccakgcccagcaacaaaattttatgtatgcaatacattaattttaactataggcacaatgttacacagcagaactctagaattcattcattttgtatgact

SEQ ID NO: 38976 - DNA, 493 bp, Homo sapiens
tttttggtgccttatctgcatatatatacaaataagtttcattcttaactgacttgttttattaaaaattatgaaaatctagtcaattggttataatggccacaagaaagtaaatatttaccacacaccagagattgtcttaagtttaatatttataacagtctcttaaagtaattgttagtgcctccactttaattctaaggaaacaaagtctcagaggaattatgccacttgataatgatctcaccatcagtaaaattggaactagtattagaagtcaggattatctaaattcaaagacaatattcataaactctattcaacagtggtttgtagaaaattaacacyaactttgtccaattcaagtaataaacataataaagatactgactatacatgtagaaaaatattacgtagtccattctcttctctagctactaatgatgatgaaaaattcttctgtcagtattttataggttgtctaccacttatc

SEQ ID NO: 38977 - DNA, 992 bp, Homo sapiens
  misc_feature (1)...(992): n = A,T,C or G
gtcaccttttgtgggctctctggtattagcacttgcatcttcatcattctttctttatagaagcccttccttgttcctatatatatattcatctcctacttacacatcaaaatccaactaaaagctgtcacctgcctccattgaaatctctctcctctaaatggctatgcttttttttgttctacttatatacaataacaacagcacactcctttaacatacctacattatatcatgatatatatatatattatatcatgatataatgtaggtatgttatattccatatctccctctcgtgtcttactaatgtgtaacttagccaagtgattggaatatattagtttgaccaatatttatgcataggtaatgggtttattatttttattgaaaaaattaagttaatactttactctttctgtgctttccattgtatcactccactcaggtaaaaagggaaggaaaaggaaataaaacataaaaagtaaattctggaactatgtcacaatttaaaaagacatcattttttaacatctccatgtaccattattttattaatttcaagttaatgagtagagatgttaaaaggtaaatctttggcactcatgaacttgtatcagtccacatgtttttccaaattatctattatgggtagttatgcaggatacatattaactgttctgaaaagtaaattattgtctaagaaagaaaataaacarcaaaagataaatccagcattaagctcactaattagagtttagaaatctatggaaagagcattggtgtcttcaagtacgtataatctgaaaaggcctaaattattagatattttccataatcataataatctcaggtttgaaaaataatgtgttacttttagtcttaaaataannnnnnnnnnnnnnnnnnnnnnnnnnnnnnnnnnnnnnnnnnnnnnnnnnnnnnnnnnnnnnnnnnnnnnnnnnnnnnnnnnnnnnnnnnnnnnnnnnnnt

SEQ ID NO: 38978 - DNA, 864 bp, Homo sapiens
aataaacgttttttggaaatagagccatccctactagtctgaatgtttgtaagtacttaacacatctatatttcacatactatggttataccactgtgaataactataatagcatagcacatccatgctgaactttaccctggacaacgagtctttgtaatcaaaattttttctagttctcatccagaaagatactgacagactcagaagaagaraaagaccaggtagtgaattgggatgaatgcctgagtatgtgggcctatccatacatctaaaattctttacgctaagaacagacgtttaaaattaataaatacttagtgcggaagaacagaatactatctgtgtgacggaatgttggaaattcctaaaagatcagaagatatgtatcagatgtatagaagtgactatatccaaaatcatacatagaagagtagttctgcagaggtgggaactttccgtgatatagtaacctcggaagtaatgaacaaatggtataataaaagtcctgggaaatgttcagggtgataatttgagaaatagcacttggagcagcctagaaatttggcctctgaaggagttggtagcataagtatttgcttataagtatgagtaactgtaccttggaagcagagcagtgccgcaaaagatagtttatttcttacagaggttttgtgaaagaattactaatggatatacttaagcaaaataagaaccaatttcatgtaaactcctcagggacagctacatcacattaataagtgcccactcatcaattacaagttactcaataaactaattcaatcatgagtttctgatgctcagcctgtatatggcatttatcttggatccagtatattccta

SEQ ID NO: 38979 - DNA, 864 bp, Homo sapiens
aataaacgttttttggaaatagagccatccctactagtctgaatgtttgtaagtacttaacacatctatatttcacatactatggttataccactgtgaataactataatagcatagcacatccatgctgaactttaccctggacaacgagtctttgtaatcaaaattttttctagttctcatccagaaagatactgacagactcagaagaagaaaaagaccaggtagtgaatygggatgaatgcctgagtatgtgggcctatccatacatctaaaattctttacgctaagaacagacgtttaaaattaataaatacttagtgcggaagaacagaatactatctgtgtgacggaatgttggaaattcctaaaagatcagaagatatgtatcagatgtatagaagtgactatatccaaaatcatacatagaagagtagttctgcagaggtgggaactttccgtgatatagtaacctcggaagtaatgaacaaatggtataataaaagtcctgggaaatgttcagggtgataatttgagaaatagcacttggagcagcctagaaatttggcctctgaaggagttggtagcataagtatttgcttataagtatgagtaactgtaccttggaagcagagcagtgccgcaaaagatagtttatttcttacagaggttttgtgaaagaattactaatggatatacttaagcaaaataagaaccaatttcatgtaaactcctcagggacagctacatcacattaataagtgcccactcatcaattacaagttactcaataaactaattcaatcatgagtttctgatgctcagcctgtatatggcatttatcttggatccagtatattccta

SEQ ID NO: 38980 - DNA, 1058 bp, Homo sapiens
atgtccagttttcatatgtcaagtatcagcacctgcactaaataaataataaaacgaattcagagactcaatatttatgataatccaaacacgctcaaattattttgaactccttaaagccagtataacagcttctattcagatgcaaaaaataccaaaaaatgaagggaggttttttactgtcaaaaataattattctttttaataatatgttttgagcaatgactacattaggaatcaccatacaaaacactcaaaaagtgagaatataaagtttcagtctatgccatcatggagattttagtcaagaaaaccacctttaacaaggaaaataaggacagttgaggaggatcttcaatgtcctagaagtggaactaatcttgcatggaactaattcttttcaccatgagcacttgtggctcagagaataaaggtaagaaaatctagtcaggtttcataactgctttattccaagctagatgcttggctcagatcacccccattgtgtttgaacatttggcctccccaataaaatacacataccacgaatcttcctcctgtagaattaaattgtcagcatgtcacaagayttttttttcttctgcagcaggaacccttctggttgaaatagcatatttcctgtacagcagggtttgcatgatatcattacttcgcatgcagtctgcatgccttccactggatgtttagtgtctgtgaatgttctccttccagagacttgcctatatttgtcttcattctgcttgcctgggttttagcctactcttaccctagtgtttgatattttggacatggtggcctacatctgtcagctttgcttcagctcactgcccctttcaaaactatgacaacttcttaatggtcttcctgacaacctacgaaatctagactaacaaatctggccctatctacctgttgtcctgcactgttgcttgcaaggctcttctgatacattacagtactgacccagtgggtctggtttgctaataacttactgtaaaactacagttaaattgtttttctctcacctagacattttt

SEQ ID NO: 38981 - DNA, 1058 bp, Homo sapiens
atgtccagttttcatatgtcaagtatcagcacctgcactaaataaataataaaacgaattcagagactcaatatttatgataatccaaacacgctcaaattattttgaactccttaaagccagtataacagcttctattcagatgcaaaaaataccaaaaaatgaagggaggttttttactgtcaaaaataattattctttttaataatatgttttgagcaatgactacattaggaatcaccatacaaaacactcaaaaagtgagaatataaagtttcagtctatgccatcatggagattttagtcaagaaaaccacctttaacaaggaaaataaggacagttgaggaggatcttcaatgtcctagaagtggaactaatcttgcatggaactaattcttttcaccatgagcacttgtggctcagagaataaaggtaagaaaatctagtcaggtttcataactgctttattccaagctagatgcttggctcagatcacccccattgtgtttgaacatttggcctccccaataaaatacacataccacgaatcttcctcctgtagaattaaattgtcagcatgtcacaagatttttttttcttctgcagcaggaacccttctggttgaaatagcatatttcctgtacagcagggtttgcatgatatcattacttcgcatgcagtctgcatgccttccactggatgtttagtgtctgtgaatgttctccttccagagacttgcctatatttgtcttcattctgcttgcctgggttttagcctactcttaccctagtgtttgatattttggacatggtggcctacatctgtcagctttgcttcagctcactgcccctttcaaaactatgacaacttcttaatggtcttcctgacaacctacgaaatctagactaacaaatctggccctatctacctgttgtcctgcactgttgcttgcraggctcttctgatacattacagtactgacccagtgggtctggtttgctaataacttactgtaaaactacagttaaattgtttttctctcacctagacattttt

SEQ ID NO: 38982 - DNA, 1287 bp, Homo sapiens
tgcatttaatcttcacaacaatattaggagcagatcttctcatcatcttcttttaaagatgaaaaaaatgaggctcacaatggttaattacctttcaaatgtcacacagtgagtgaataacagagttataatttcttctttttttttttttttttttttttttttgagacggattcttgctctgttgcccaggctggagtgcaatggcatgatctctgctcactgcaacctctgcctcatgggttcaagcaattctcctgcctcagcctcctgagtagctgttattacaggcatgtgccaccatacccggctaattttgtatttttagtctagatgggtttctccatgttggtcaggctggtctcaaactcctgacctcaggtgatccacccgctttggcatcccaaagtgctgggattacaggcatgagccaccgcacccagtccagagttgtaatttcttatgcagcagtagcaaactaatacagcaatatggatatattttatttaagccatgatgccattttcctttacgagagctgtaattgcctcctatggtttccatgaccatataggctgttgttgttgcttctgctatttttagttgttattgttacattattttcataataataatgttaataaccataagacgttaaacagcactgcaacagagcttaaaaatgctatttgttccttacagtattatgttagtgcaacattcttaagaaagcaggtgaaaagaaagcaaaccagaaatgaacacacttttatggaataaaaacttataaatttgggttttagttaaagctacctgagagggggaaaaatgtactttaaatatgaggtcaaggacagggctggattacacaaaatgtgcccacgattcgtgtacaaatgagaatgcccacagagaactaaaacccacatgacacacagaaaggaacatctgccagcatcagcaaattgatgacatgtataaggcatttcttagaccgatgtgggagtaggaaaacatcacttctttagttaatgatgcttcggcaatgaacatattcaaatgccttggttctgaagacagtgccacttaatgagcatatcatagaccacaagatattgccataastcagaaatgtataagcaacacacaatttcaagctcttaacagctttaaagcatcttcaccaattacatctggtcacttcctttctagtactcctagaaacatacgaagtagtgttgggtttaggtgtgtgaatgcacgcctatattatcaccattttcccta

SEQ ID NO: 38983 - DNA, 440 bp, Homo sapiens
tttttttttttttttragatggagtctcgctctgttgcccaggctggagtgcagtggcacgatcttggttcactgcaacctgtgtctcccaggttcaagccattctcatgcctcagcctcccaagcagctgggattacaagcatgtgccaccatgcccagctaatttttgtatttttagtagagatggggtttcaccacgttggccaggctggtctcgaactcctgacctcaggtaatccaccgccttggcctctcaaagtgctgggattacaggcgtgagccactgcgcccggccttgtttttgttatgcttttcatgcttgtatgagccttttattgagtgctgttaattaggagaaatattaattgatgtaactcctgccatttgtaattttacaaacctgctatctagaatctgaggtagagtgtgtgtgtgtgtg

SEQ ID NO: 38984 - DNA, 602 bp, Homo sapiens
tataatcacattgtccattttgaagaatgctttctcacaatcttcttcctgataataattataaaaccgcaagcataaatctttatggaaaagatttctgtagctagaatactgaaaatacaaaaagtttgttgttacaaaaattaatgtttgaatacttattacacacccgatgctgttaaatgctttgtatctattacctcaaatacctgtggtaacaaccccatgaggtactatccattttcttaatgagaaaacagaagtttagagaagtatagaagttgttggcaagggtcagagccaggattttagagagacagtccaactgcagtgaacagataaatatacacttactgactgtattatacargttcacaatcctttttactcaaaattcaaaaacatcctggaaagtgaaagttgtgttcctaagtttgttgttaaaattaatttggcagtaacaccaaacctaatggtaggttatgacctttttttatccacttagtatgaatattcatttgtttcactgcagaaatacttttgtgacagattatggaatgctgacccagaaaggtattacataatcacagatgtaatgtgta

SEQ ID NO: 38985 - DNA, 579 bp, Homo sapiens
aaataacttcagccaaaagaagtaacagttagatctcagaccaacaatcaagcacagrtgtccttcccctaccccaaggcgctgggaaaatgggaggtaatttttctcttacaggagggaagaagaaacttaatagtttcaaaaatttcactgtcacatcgttcaatctactattgtgatatactttcaggctttcattaacattcataagctaaatggatgcaactcaagcatacagacaggatcaaatttctctcccttgagaataaccataagcaagaatatatctcaaacattttcttcttctaactaaaataccatcaagtatctccctaagaactgtttctgtaactaaacaaacaaataaacaaaaacttcttttcctttacaatgatcctacaagcagggattaaactctgcaaacaccatgaactagtagtgattgcttcagtgatggtgacacacattcaccagtaacaacacaattctattggttgaagcaattaactgcaggctcaagcacaagtaagaatcatacattccatctggtgcgcaaaaatcctcgcaaacttggttcat

SEQ ID NO: 38986 - DNA, 579 bp, Homo sapiens
aaataacttcagccaaaagaagtaacagttagatctcagaccaacaatcaagcacagatgtccttcccctaccccaaggcgctgggaaaatgggaggtaatttttctcttacaggagggaagaagaaacttaatagtttcaaaaatttcactgtcacatygttcaatctactattgtgatatactttcaggctttcattaacattcataagctaaatggatgcaactcaagcatacagacaggatcaaatttctctcccttgagaataaccataagcaagaatatatctcaaacattttcttcttctaactaaaataccatcaagtatctccctaagaactgtttctgtaactaaacaaacaaataaacaaaaacttcttttcctttacaatgatcctacaagcagggattaaactctgcaaacaccatgaactagtagtgattgcttcagtgatggtgacacacattcaccagtaacaacacaattctattggttgaagcaattaactgcaggctcaagcacaagtaagaatcatacattccatctggtgcgcaaaaatcctcgcaaacttggttcat

SEQ ID NO: 38987 - DNA, 1034 bp, Homo sapiens
gttggtggtttgacaaagactacttattgacagattctttcctacagctttgttcaggaagaaatagcctttttgagtttattgtaatcttcagactggtctgatttactgactttttgaaagtatcatttgggaaataaatgtgatgtagagtttcatgaactatgttaagggggaggcattttcattaattattttaattttgattaattaattgaataaattaaatgacatataaaaataagccaaaaaggataagttattcacaaagctttggatgtttgtttcagaaatgattcattgaattatgattaaatcagacaatcaatagtgtcagtacccactttatgattctgtgactgagtttatatgctcttaacaaaaaaaaggttcatttactagtttggagagtttgttcagtaaccctcactatgaggttccgtccctggatgctgttatttctttaaaaggtcaattttgtgttagaccttgagatttaaacttttaaaggacttgtttatttgtagcttattataaagcctaaagagaatacatttatgtaaaagtatattttatgatggtcagcaagcaatatataaactaatagttttatttctgccttttaaaaatgaattatgtctttaagttaggtttgtctttattcttgaaggggaaaaaagaaatgctttgctttaattgctttgtcttgagttgagttttctgttttattaaaagcctcctacattgtaggcatggttccacaggtaagattttcagttcaaggttgtatgtttattgagttttcaatggattttcattagatacaagttgattctattattccggagcataaggatatttctcttcagtcagagagagccatytgctttttcagggtccacagccccaggagggctgcatatatgatatggtaggtaggtggatgggagtgtgtgaaactaatgctagagcacttgttgcaagatcagtgggctcaactctgacaaaagtgggttgatggctgtcatcaccag

SEQ ID NO: 38988 - DNA, 590 bp, Homo sapiens
atttcaagtgctcagtagccacatgtggtatggctgtcacactggtaaatacttcttactgaatacctatgatgtataaaaaggccttaggtagagataagttaaagacatactgcccctcccctcttcaagaatggaggagttgagagaggtacaaaatatagcaatggtgtgagagtagttatttgtctcttcctatagactaatgtgactttatggctaaaagacctctttttgtgattcattttgagttagtgtctataactgagatcactgaggttgctgacagtctgacttctccataggtgaggcattattttgtttttgtcacatattagggttgtgcatgattgttgtaatgcttttcatgatcaaataaagcactttgcatttaaactgtggctttgatcaaatagctccatatttycccatgtggaatcagattttctaatgttaaaatgtacacctttctcaaatattcgagctccctgtccatattattgttaacctcagatttctgtctcatttcatcccttcaagtaactagctttttctcattattttctgcttattgagcccaatgttgcaca

SEQ ID NO: 38989 - DNA, 550 bp, Homo sapiens
agactgtatctttatatcaggagttctcaacctgggacaatttttattcccaggagatgtttggcaatgtctggtgacatttgtggttttcatgactgatgaggggagggatagctggcatctagtaagtagaggtcagggatgctgcttaacatcctacaatgcacaggacagtcctccacaataaagaattatctgactcacagatggcaatagtgctgaggctgagaaactctacctcatatgrttatgaagggagccctgtggtatatttgattcccactcccagcagtcaattatttatatgatttgggggaataattgattgagtaggaaaattggaataaattgctaaggggatgaattttccatgtcctgctgtggggactcctatggataatagataaggaataaaaatagagattaaaaacccttgtcctcataattacagcagaaacttattttttactgttgcatgagtgtaatagaagcaatatgctaaactctgacatgtttctgaattactgacaaattctctaacagaaccaca

SEQ ID NO: 38990 - DNA, 602 bp, Homo sapiens
ttttcatgaagacaaaatttaacaattaatgaacttgacaagatgtcacactttgtagtaatttaattacatacaataaattttgattttgcagttttcttttcatattttagagccagtaagtctttttaggcctcaaacattttcatcaactcctgaaacactcattggccccaggcaccatgcccatcgtttgagggctaaagcggcctgaaagcaggcacaagcatttggaccttttccctggaatgatcagaaatgacatgtgtgatatcaactctgaggttctgcaggaactgaaatgcctttgggaccatacaagctattcctgtgtttaggttattgttttgtactctggttcgctgaaaagcagtgattgacatagaatatatatacatccataaccagaatcttattttgccaagcctctggataaatgagattcgaagacccccaataactgcttctcactgtagccacccctcacaccccatcccccgaccctgtgtgtctgttctcctgccctcatggggtgcccagtgagtcctgatgctggcctgggtgggactytcacctaagcaggccacgtgccgtggcactca

SEQ ID NO: 38991 - DNA, 541 bp, Homo sapiens
acactacaatcgttgaaaaatgggcaaagaacaccaaaaggtaaatacggaagaaaaaaatcattaaagatttttaaaagttttacacctcgacaaagaactgtaaatttttatgttttattttttttgctggctgactggcaaagattaacattagttctaaggacacagagctaagtcagcatggatccctcattcttgagttcgttctggttgggggaaaagaagtagtgtgtgagctctgcacaccccctgggtgcatacacctgctgtgtcctttacccaccaggtaaccttgaggggctcctctaatgaccacagggtctgctttcctacctcacaggagtgtcaggagggtcacctgtggaaatacgtggctaggaccataggaaatgctcagtacacactggctattattattactacttcagtcactactcttagagcaaggagtttataacctgggactytgggaatccattaccttctgaaactgtatacagaattgtgtgagtctgtgcatttttctgaataaaggatc

SEQ ID NO: 38992 - DNA, 572 bp, Homo sapiens
ggcagcatgtgattagcttgtacaggtgtgtatgtttatgtggaggacacacctaaatcctaagagcagttacttcacagtgatgggattataggcagttatacttctcattatacctttctatattctctagaatgaccataaatgcccttttaattgaaaaaaaaagttttaacctccccccaaaaaaatctggtagagacatttaagatacacagaacagcatggggcagccatggagtccacgctggaagagacttgggcgagggtggaacatggaggtgatggacagcctgactgtgctgcagaggcaggccctgaagagatggaagggtgtaaacyctggcagatcaataagggggcaggggcaggcagctaaggtcattcatttaggagtcaaggtgcctacagggctgaatagcagggagttgggggtaggcagctgctgggaaagaccaggcaccaaagggagtaggagaggacccaggtgggtgacgtggagagggctgtccagggagtggagggatggcctttctgcagcggtggagatttcctccagcagcgctgggcag

SEQ ID NO: 38993 - DNA, 1070 bp, Homo sapiens
cctttgtaaaaatccagccttgcgtaggtctgttgataatgacaggagcaacgttctaaatggtagttgcttcatttggaacattctgggagaaaatacaagtggcaggctagcaaaggctgtgggcactcctgccctgcggtctgagccctagatgcctcgtcacatcatagagagcaggagatgcctctaagagggcattaggggatccgtccttacagaccagcctcatattgcagatgtatgggaagccctggtctcaggttgcaacagtaggagtagagtgtctaagaaaagggaggtgatcatccactgtgcagtgtgttcattggtgagtgccacactatgctgcgagtggtctgtgagatgggtcaaactgcagacagcctagaatgccaggctaagtgatcccacctaattgtttggatgaggaggactctggaggcagttggaggggtgggcatgatgggcgcatctggagggaagcagaagtcagggtggctagcagagaagcaccatggagtgtccaaacaggtcagattgagttagcaggtccaggactccctccgcaggagggcctccaagctcagttctcttgggttgcaaataagaccctggaatcacagcaggaccacaaacattttacttgctgctggctcagagcacacaatgatcagccaattaaataactgagaagagggttgtgtagttaattgcctggcattttgagaggaaaccactgttctttgagcttgttgactctttatttatatttacattatacacaaatgtatacaaattatatacatttgtgtgtgtatgtatgtatgtggttatgttgctactctgataataattaaatctggacggtaaatarcaattattagaagaaagttatatcttaatgattaatcaggtagtatgtggaaactacctcaacaatgattaatcttttttgaaatgtacaaactgtataacaatgctgtaaaattttttaaagcacttaaaattccactattccagtactttgtggttctgtattttttgttaagtagttattttaatttcct

SEQ ID NO: 38994 - DNA, 1010 bp, Homo sapiens
ctcccacatcttggattaccaactggtttggatacttccctaccagcacaccatacatttcaacagcttagtaggaacacctgctagctaatgttgatgttttcatctgtcttctgtcctgatgatagtttcacaaacttgattcatgctcaggtccaccagactcactcaagcacagctcaggcttctagcttcccagaaccccracgtcaggggccagctggcagttccagattccctgactgccttggcagaggcccgcttctcaggcctcctgcagtgctgggatgcctcttatggcatggacccattattggccttcatctgtgatcacagaccaatgggcagtgctgaccagaggacgggtggtgagggggtggttctgtaagtcctccaggcaggactacaacctggactgatgatgaatcaactcctgagatccggatttaatttggaggcttccctgggatctgcaggcctaatgacggcaagagcactcctgtcgtcgtcctgcctagagggtcagagaacaacctcttttgggtttccagtcactttggcactttggtttctctttattcacagtatggtatctttgggggttattttgggatctgttagtggctctactacttattaatttgtgatttgggcaaatgactcacgatcctcaaatctcaatagtttcctcaactgcaaatagggataaatgtcagctttgctgttagccttaaaagtatctttgtgggcatcagaaaattgctacaatataaatataaaaaacataaagactatgaatgtgagttgtgtcccctagagtagcacagtgctcaagtggggccaccatgcatggcggccctcaaataacaggccgccttccgagggctgttgggaagattaagtgagataatgtatataaagtgcttgagccatagtgacaatttattgttgttattcttttaattgctggaacttttctcatttctaacctttggggtgaactcaaaaga

SEQ ID NO: 38995 - DNA, 1010 bp, Homo sapiens
ctcccacatcttggattaccaactggtttggatacttccctaccagcacaccatacatttcaacagcttagtaggaacacctgctagctaatgttgatgttttcatctgtcttctgtcctgatgatagtttcacaaacttgattcatgctcaggtccaccagactcactcaagcacagctcaggcttctagcttcccagaaccccaacgtcaggggccagctggcagttccagattccctgactgccttggcagaggcccgcttctcaggcctcctgcagtgctgggatgcctcttatggcrtggacccattattggccttcatctgtgatcacagaccaatgggcagtgctgaccagaggacgggtggtgagggggtggttctgtaagtcctccaggcaggactacaacctggactgatgatgaatcaactcctgagatccggatttaatttggaggcttccctgggatctgcaggcctaatgacggcaagagcactcctgtcgtcgtcctgcctagagggtcagagaacaacctcttttgggtttccagtcactttggcactttggtttctctttattcacagtatggtatctttgggggttattttgggatctgttagtggctctactacttattaatttgtgatttgggcaaatgactcacgatcctcaaatctcaatagtttcctcaactgcaaatagggataaatgtcagctttgctgttagccttaaaagtatctttgtgggcatcagaaaattgctacaatataaatataaaaaacataaagactatgaatgtgagttgtgtcccctagagtagcacagtgctcaagtggggccaccatgcatggcggccctcaaataacaggccgccttccgagggctgttgggaagattaagtgagataatgtatataaagtgcttgagccatagtgacaatttattgttgttattcttttaattgctggaacttttctcatttctaacctttggggtgaactcaaaaga

SEQ ID NO: 38996 - DNA, 539 bp, Homo sapiens
actcctcttttacagatgagggagttgaaacctgtagtgtatgagttgccacttctctagtttgggtctccattgcgtactgcctgggctaatgaaattaccctcccacgtcttctctgaacctttctctgcacacttttaaaaagttaaaatttttcaaattactttacactcagacttctgaataaccttccccaaagcatggtttttgtccttcatttattctttaacacatatttattaaaaactacattccaagcaatgkttttctaatccatcattcacaggtaaatctggtatgtccctagcctacaacaagctcttactctttgggagacactggcacataaacatcatttctacacattgtaaaatgtgtcctgtagaggtacacagaaaaaggcctctaaggtggcatgtaggggcgggtgggaagaatgggtcaaagaaggctaagcacaagctgagaggcttatacagtcagcgaggcagctgatgggggagagagaaggggaataaagaagagagggcctgcttgg

SEQ ID NO: 38997 - DNA, 731 bp, Homo sapiens
tgcataaaatgaagcagtagatcaataattatttaagaaatttgagctgttgtacagattatatatgtataaaaagcaaactctacccaagattgctggatactgtgctctgatttataagataatgatcaacaaaactctacacttttgtgaactgttaaacctagaaactggggtcaggcgcggtggctcacgcctgtaatcccaacactttggcaggccgaggcgggcggatcacgaggtcaggagattgagaccatcctggctaacacggtgaaaccccgtctccactaaaaatacaaaaaattaactggtcatgatggcgggcgcctgtagtcccagctactagggaggctgaggcaggagaatggtgtgaacccgggaggcgaagcttgcagtragccaagatggcgccactgcactccagcctgggcaacagagcgagactctgtctcaaaaaaaaaaaaaaaaaaaaaaaaccaaaaaaacaaaacaaacaaacaaacaaacaaacaaaaaaacactagaaactggagtggacccagaaatcaagagatgtcttcgggtcaggcttgaattaaaaagtaaatatttaatcacttttaccagaattcatcagggctacagtgtacgggatacgtgctaaacaaatgaagaaaacaatcttcagggagtttgatgatgagtcagtgttaagaactttgacatgtatataatgagttggaagtaat

SEQ ID NO: 38998 - DNA, 731 bp, Homo sapiens
tgcataaaatgaagcagtagatcaataattatttaagaaatttgagctgttgtacagattatatatgtataaaaagcaaactctacccaagattgctggatactgtgctctgatttataagataatgatcaacaaaactctacacttttgtgaactgttaaacctagaaactggggtcaggcgcggtggctcacgcctgtaatcccaacactttggcaggccgaggcgggcggatcacgaggtcaggagattgagaccatcctggctaacacggtgaaaccccgtctccactaaaaatacaaaaaattaactggtcatgatggcgggcgcctgtagtcccagctactagggaggctgaggcaggagaatggtgtgaacccgggaggcgaagcttgcagtgagccaagatsgcgccactgcactccagcctgggcaacagagcgagactctgtctcaaaaaaaaaaaaaaaaaaaaaaaaccaaaaaaacaaaacaaacaaacaaacaaacaaacaaaaaaacactagaaactggagtggacccagaaatcaagagatgtcttcgggtcaggcttgaattaaaaagtaaatatttaatcacttttaccagaattcatcagggctacagtgtacgggatacgtgctaaacaaatgaagaaaacaatcttcagggagtttgatgatgagtcagtgttaagaactttgacatgtatataatgagttggaagtaat

SEQ ID NO: 38999 - DNA, 600 bp, Homo sapiens
tgttctgttttgttttataaagcaaggaaatggctaagctttatgcagtctatgttgtattgaacaggggaacctggactctaagagtcaaaagaggccaggaaattttaaaactgacgaatgaatagaaattgtggggtcagttttggattctgacaggctttgaaactcggataaaggggctctcaaattacattgtcagtgcacaaattttacagtaacataagaaagcaccagtattttcagactytactttagaacagaatttaaactcagccggacgtggtggctcatgcctgtaatcccagcactttgggaggctgaggctggtggatcacccgaggtcaggagttcgagaccagcctgaccaacatggtgaaaccccgtctctactaaaaataaaaaaactagctgagcgtggtagtgggtgcctgtaatcccagctactcaggaggcaggagaatcacttgaacccgggagacggaagttgcagtgagccgagatctcgccattgcactccagcctgggcaacaagattgacactccatctcaaaaaaaaaaaaaaaaaaaaaaaagaaaaaagaatgtaaactctcaaat

SEQ ID NO: 39000 - DNA, 1224 bp, Homo sapiens
tatcttcttcatccctgactcgccctttggctagtcagcttgtattaggggctcagtttaaatgttattttctcaagaaagttctcttagccttcctacacttccccctgactgggttccatgttcccacagtatcctgacaaactgtgttaatgatacctaacatgtagtgccagagggcaagtgggggatggagaggatatgttccatcttggtaaaggtatggaccaaccatagtgggctgtttccagtggtacactggatccactttctgtgactcatgaacaattttttgcaattgcttgtctgttgcatggactagagttcaaggacctaacaatagggacagtgtcatggccagtatggtgaytggaatgtagtaagtgagaaggagaagtgacaatagagatggaggcaatggtttcagacctagatttctgaagcctgaatcagttctttgaactgaggtacttgagattggtgtgaaccctggcagctccagagagttatacatataaaagataagcttgttcttggtgcctcagaaatgcccgctaagttttagaagcataaaacatggtttagcaccaaggctaggtaatatagtggaaaccagttctccatacactaatatgagacttgtaaagattccttaaaggtgacacaagatgtgtttcttggtttattggtttttattttgttaaatggttttaagactgaaagtttctaatgcacgatgggtcaggtttggaaagattcaaagagggtcacaaaatgtacaaatgagaaacaccatccacttaactaaacctaaagaccatccagttatactttgacttctatgctttgatttcttaaccctcaattatgagtagaattttggaacaggatttattctgctttcctctctataagcatatcttgtagatcacagccttcttctcccaacctccactattttctgatgttcccttggcattatgtctggcactcttaacatttctaactgagaaatgatcttatgtcaagactgtatcatagtagatggggaccatggttctagcagagttggaatagtggtataaatgtgtggagtaaaaaggatgattcataggataccaaaaacgtttggccagtgtgccaaaaggacgttgcatgctgtttcctccttgtgcaccccctccccaggctccatttcccagttccagcccacgacctcaaatg

SEQ ID NO: 39001 - DNA, 662 bp, Homo sapiens
gtaagtatacatcttgggtttctctagtcctagtgaatcaggtcaattctggtataattattctggtagagtagagtgcgaatcactctaaaaattgtgctggttttgaagatctatgattacttttattaggtgatgcccacaaaagcatttcaaaatatggactaggcaccttycattctaggtcttatctataagagaataaaacacaaagcaggcagaaaaatctatggaaggcaccaatggaatgtctggtattcaagcgaagatacccagttaacaaatctccactggggaatgggggctaggtagagatttcttaggtgtttctgcttgctggcatagtttactctggttgcttttcaatactcaactggtgcacgccctatggtgtactggagaatgctcatcttgatggtcaggggctgggcaacatctgttgttaaatattttgaatgttacctgttactgaacctctctaacctgcgttagcatatcaatagatttcttgatttggtgatgattcaatgacatatcactgtgccacctggggtagttaggattttaaagccagcaaataaatgtaataacaataattgtaaaaaacaataatgctgccaactcaaagtttactatgtttgagaagctgctgtaagcacttt

SEQ ID NO: 39002 - DNA, 662 bp, Homo sapiens
gtaagtatacatcttgggtttctctagtcctagtgaatcaggtcaattctggtataattattctggtagagtagagtgcgaatcactctaaaaattgtgctggttttgaagatctatgattacttttattaggtgatgcccacaaaagcatttcaaaatatggactaggcaccttccattctaggtcttatctataagagaataaaacacaaagcaggcagaaaaatctatggaaggcaccaatggaatgtctggtattcaagcgaagatacccagttaacaaatctccactggggaatgggggctaggtagagatttcttaggtgtttctgcttgctggcatagtttactctggttgcttttcaatactcaactggtgcacgccctatggtgtactggagaatgctcatcttgatggtcaggggctgggcaacatctgttgttaaatattttgaatgttacctgttactgaacctctctaacctgcgttagcatatcaatagatttcttgatytggtgatgattcaatgacatatcactgtgccacctggggtagttaggattttaaagccagcaaataaatgtaataacaataattgtaaaaaacaataatgctgccaactcaaagtttactatgtttgagaagctgctgtaagcacttt

SEQ ID NO: 39003 - DNA, 1198 bp, Homo sapiens
attctggtaaggaataatgcccaaaacatagtgttatgtgaaaaaaagcaaagtacacaactgtgtatgatacattaccatttgtataaaaaaaaagaaaaaagagaatatataaataatcacctgtaaatgcaatctccagaaggattatacaaaatactcataaaaaactagttatcttgggtgaggagaactggtggctgggagacagggatgaccttgccctatatatgcttttgtaccatttgagttttttactatataaatatgaagcaaaataattttgtatcttttcaaaataacaaaaagagcaatgtgaagtacatttaaaaacagtaaggccagacgcggtggcttatgcctgtaatcccagcactttgggagaccaaggcgggcggatcacctgaggtcaggatttcaagaccagcctgacyaacatggcaaaagcccgtctctactaaaaatacaaaaattagctgggcatggtggtgggtgcctgtaatcccaactccttgggaggctgaggcagaagaatcgcttgaactcaggaggaggaggttgcagtgagccaagatcacaccactgcacttcagcctgggtgaaaattaacattattatatgaaacaagcgttaaccctcaaacaataaaaggaagaaaataatttaaggaatatttttcctttagagaaacctgacactaatcctgtaagtgttaataggtaaaataatctggaaaactgttatgtggaacaactcattgctcaaaagttggttaagtatattggactctgacacattttcatttcaatttataaattataacacaaaaaaattatctagcaattataggctatttcctgaagacacctaatgtagttaaaactcctataaaaaccgctgggcatggtggctcacgcctgtagtcccagcactttgggaggccgaggcgggcggatcacaaggtcaggagttcgagaccagcctggccaatatggtgaaacactatctctactaaaagtacaaaaattagctgggcgtggtggcgggcccctgtagccccagctactcaggaggctgaggcaggagaattgcttgaacctgggagggtggagattgcagtgagctgagattatgccactgcaacccagcctggccgacagagtgagactctgtctcaaaaacaaaaacaaaaaaaaca

SEQ ID NO: 39004 - DNA, 1198 bp, Homo sapiens
attctggtaaggaataatgcccaaaacatagtgttatgtgaaaaaaagcaaagtacacaactgtgtatgatacattaccatttgtataaaaaaaaagaaaaaagagaatatataaataatcacctgtaaatgcaatctccagaaggattatacaaaatactcataaaaaactagttatcttgggtgaggagaactggtggctgggagacagggatgaccttgccctatatatgcttttgtaccatttgagttttttactatataaatatgaagcaaaataattttgtatcttttcaaaataacaaaaagagcaatgtgaagtacatttaaaaacagtaaggccagacgcggtggcttatgcctgtaatcccagcactttgggagaccaaggcgggcggatcacctgaggtcaggatttcaagaccagcctgaccaacatggcaaaagcccgtctctactaaaaatacaaaaattagctgggcatggtggtgggtgcctgtaatcccaactccttgggaggctgaggcagaagaatcgcttgaactcaggaggaggaggttgcagtgagccaagatcacaccactgcacttcagcctgggtgaaaattaacattattatatgaaacaagcgttaaccctcaaacaataaaaggaagaaaataatttaaggaatatttttcctttagagaaacctgacactaatcctgtaagtgttaataggtaaaataatctggaaaactgttatgtggaacaactcattgctcaaaagttggttaagyatattggactctgacacattttcatttcaatttataaattataacacaaaaaaattatctagcaattataggctatttcctgaagacacctaatgtagttaaaactcctataaaaaccgctgggcatggtggctcacgcctgtagtcccagcactttgggaggccgaggcgggcggatcacaaggtcaggagttcgagaccagcctggccaatatggtgaaacactatctctactaaaagtacaaaaattagctgggcgtggtggcgggcccctgtagccccagctactcaggaggctgaggcaggagaattgcttgaacctgggagggtggagattgcagtgagctgagattatgccactgcaacccagcctggccgacagagtgagactctgtctcaaaaacaaaaacaaaaaaaaca

SEQ ID NO: 39005 - DNA, 591 bp, Homo sapiens
attcgctagattaattgtaatagccaatcccaaggaacttactctggagctgtagaaaaggtccaagagcttaggaacttcggtctgttttgggaagcagctttcccttcctggaccatagtgtccccacctgtaaatgcagcagtgttagagagcgtggatataagagtccagtggtgagcagaagagacctggcccctgtcttctgggccgtcaagggctttgggggcaaaagaaatgggggactacttctagggccagatgactctggtggagtttgctgaagagcacccagcattgggtggagtttctcttgttgaggggcatgcttccaaccccaagagcagctcagattaggacagcttacgtgttgtaggcaagaggggtagctccgtgggctaataaggaaggctgtgtgaggtaataaggagggctgagccaaagaaaggaggttcctgaaggattccacgaggcggggcagattcygagccacagcttggtgtattaagagctacccttggtaagggctgaactaagtacttgactcctgatagttagacagttctctgtgaggcaggtagggtgaccaca

SEQ ID NO: 39006 - DNA, 552 bp, Homo sapiens
taatgaaccgtgttctttccaggaacctgttggsccagttggtttcaagccagagacattcagaaagtttttagctctatatttgcatggtgctgcgtgagcggaggacccctctgaatcctgaaacccctcttgcctctcttccacggaagagggcctgggccccgtggagcctcagtgcccgtttggcctgctgctctcgctgacaataaagagcccttgcgttgcactgaagcctgtgtttggtatgagggtgccatcgggaagggcgcccacacaagtccaagccctggagcctgacctgccccagctgaagcccagctctgcccttgacccatgttgtgatcttagataaggatcttcatctgtctctttccatttcttcatctgaaacctggggctaatgtgacttacctggcgttgaagactctgggttatgtgtgtgtagtgtctgccacatggcagatacgctgatggtcactaggttcttatggcattatttaaattgtggacacattccacaatgactgcagaaaatctcgctagcatatt

SEQ ID NO: 39007 - DNA, 602 bp, Homo sapiens
ggtgttacctctcaggaccctgcccaggcatcacctcttccaggccgtattggggcttctgttctggccacaatactcatttgctttgagtcactgttggtttatgggcaggtctccccaaaccacttatatttgccactgtctaccctacagctcctgggttcagggcagggcacccaaaggcatgaataaatacccctggagtgcccttcgcttggtggggccatctgggaagtgcatgtggtttcataggaagcctccaggaggaagtgagctcaggtctccactccatcacttactccctcacaagacagcaggcagtcttccctaagcccctaagcttgctgagccccagctttctcacctgtgaagtggggraatcgtgagggttagagtgggtgcatgcccggggggctcagtgaccagaacccactgctactgtatctccattgcttccagctagaccaagggagatggcgtccttggctctttgcaatgcgctctgcggagcggcagccagggaggctctgagtagctgtgaggtctaggcccagttggggccagggtgctcagaaagccagagctgacttcccaaaggtgcc

SEQ ID NO: 39008 - DNA, 602 bp, Homo sapiens
ggtgttacctctcaggaccctgcccaggcatcacctcttccaggccgtattggggcttctgttctggccacaatactcatttgctttgagtcactgttggtttatgggcaggtctccccaaaccacttatatttgccactgtctaccctacagctcctgggttcagggcagggcacccaaaggcatgaataaatacccctggagtgcccttcgcttggtggggccatctgggaagtgcatgtggtttcataggaagcctccaggaggaagtgagctcaggtctccactccatcacttactccctcacaagacagcaggcagtcttccctaagcccctaagcttgctgagccccagctttctcacctgtgaagtggggaaatygtgagggttagagtgggtgcatgcccggggggctcagtgaccagaacccactgctactgtatctccattgcttccagctagaccaagggagatggcgtccttggctctttgcaatgcgctctgcggagcggcagccagggaggctctgagtagctgtgaggtctaggcccagttggggccagggtgctcagaaagccagagctgacttcccaaaggtgcc

SEQ ID NO: 39009 - DNA, 602 bp, Homo sapiens
ggtgttacctctcaggaccctgcccaggcatcacctcttccaggccgtattggggcttctgttctggccacaatactcatttgctttgagtcactgttggtttatgggcaggtctccccaaaccacttatatttgccactgtctaccctacagctcctgggttcagggcagggcacccaaaggcatgaataaatacccctggagtgcccttcgcttggtggggccatctgggaagtgcatgtggtttcataggaagcctccaggaggaagtgagctcaggtctccactccatcacttactccctcacaagacagcaggcagtcttccctaagcccctaagcttgctgagccccagctttctcacctgtgaagtggggaaatcgtgagggttagagtgggtgcatgcccggggggctcagtgaccagaacccactrctactgtatctccattgcttccagctagaccaagggagatggcgtccttggctctttgcaatgcgctctgcggagcggcagccagggaggctctgagtagctgtgaggtctaggcccagttggggccagggtgctcagaaagccagagctgacttcccaaaggtgcc

SEQ ID NO: 39010 - DNA, 602 bp, Homo sapiens
ggtgttacctctcaggaccctgcccaggcatcacctcttccaggccgtattggggcttctgttctggccacaatactcatttgctttgagtcactgttggtttatgggcaggtctccccaaaccacttatatttgccactgtctaccctacagctcctgggttcagggcagggcacccaaaggcatgaataaatacccctggagtgcccttcgcttggtggggccatctgggaagtgcatgtggtttcataggaagcctccaggaggaagtgagctcaggtctccactccatcacttactccctcacaagacagcaggcagtcttccctaagcccctaagcttgctgagccccagctttctcacctgtgaagtggggaaatcgtgagggttagagtgggtgcatgcccggggggctcagtgaccagaacccactgctactgtatctccattgcttccagctagaccaagggagatggcgtccttggctctttgcaatgcgctctgcggagcggcagccagggaggctctgagtagctgtgaggtctaggcccagytggggccagggtgctcagaaagccagagctgacttcccaaaggtgcc

SEQ ID NO: 39011 - DNA, 643 bp, Homo sapiens
ctttccaggagggagtcttaggggcatggcacagccttagtgacattgatgtgtggaagaggttctgggtatttttgagatccgctagctttttagtgtttaacccttcagtttgaccaacatatttgacacacctaagcaccaggccctgtttggccctttaacacgttacttcccttcatcttgtccacctgatttacctcccttagcccctgccaccttgactcctagtgccctgctccaccgcacaggagctgccgggggaggtcgaggctgggaggcaggtgttgtgtgtctgggaccctctgattcttttcctcccrggcttgctaccatgagtctgatggagaccagctctgacctggggagctgggtcttcacctgtgcgcctgcattctgtcactggtgaatttcacctgagtatcatttgagtttgcgttccccacctgtaaagcagaagcagctctccctggttcatctgggagatgaacacttgtaccagcataaggtgtgtggtcagaatgaatggcagatgggaaatccgacaagtgctccttcccagaggctgacatctggtcattccttccttcagcatacattcataagccacggctttctgcccagccccgctgtgctcccaggg

SEQ ID NO: 39012 - DNA, 1203 bp, Homo sapiens
  misc_feature (1)...(1203): n = A,T,C or G
cccagaaattcaagcctgcagtgagctatgatcacaccattacactctagcctgggcaacagagtaaggccctgtctcaaaaaaaaataaaaagaaagaaaaaaaawgctgttgtcacaatactttcctttacagtgtcctaaataagatcagaaagagcctccaaatcaagaaaacctcaactctagagaggcttaccttcttagaaccataacattccaacaactatctaaacttgaaggtgatgagccaatctaaaatgaacaattaaagtttgaaaacaccatttctagatcagggttcagccctatgctctatgtggctaggagtatttaaaccttggaccacgtgaaaaaatgaaagaacagtcattctcaaagcattttaatcctgttgagatagtttggggaaagagcttctcacacttggatgccatatggaagaacatcaacgcacttttgttagcaattactctaaaatagctttgggtctaattagtgacacttgaagtgctcatcatagtaatctgtagttatcaaattttcatcaaagagtaagacagatgcagaaattttaaaaatggaatgaatcagttatgtcatttatttgattacaggtcacaaataaaatctggtattaatggctgggcacagtggctcacacttgtaatcccagcacttttggaggccaaagcgggtagatcatttgaggtcaggggttcgagaccagcctggccaacatggtgaaaccctgtccctactaaaaatacaaaaattagctgggtgtggtggtgtgtacctgtagtcccagctactcagaaggctgaaccagggaggcagaggctgcaatgagcagagattgcaccactgtactccagcctgggcaacagagcgagactctgtcaaggaaaggaagaagaagaggaagaggaagaggaagaagaggaagaggaagaagaaaaacaacaacaagaagaacaacnnnnnnnnnnnnnnnnnnnnnnnnnnnnnnnnnnnnnnnnnnnnnnnnnnnnnnnnnnnnnnnnnnnnnnnnnnnnnnnnnnnnnnnnnnnnnnnnnnnnagggccaagaacaagaacaagaacacgaactagtagttagaggcttaatattttcttcacataatcagagatctgcaagtgggctatccatagctgatgttgctgctctgggctgccatcag

SEQ ID NO: 39013 - DNA, 1203 bp, Homo sapiens
  misc_feature (1)...(1203): n = A,T,C or G
cccagaaattcaagcctgcagtgagctatgatcacaccattacactctagcctgggcaacagagtaaggccctgtctcaaaaaaaaataaaaagaaagaaaaaaaaagctgttgtcacaatactttcctttacagtgtcctaaataagatcagaaagagcctccaaatcaagaaaacctcaactctwgagaggcttaccttcttagaaccataacattccaacaactatctaaacttgaaggtgatgagccaatctaaaatgaacaattaaagtttgaaaacaccatttctagatcagggttcagccctatgctctatgtggctaggagtatttaaaccttggaccacgtgaaaaaatgaaagaacagtcattctcaaagcattttaatcctgttgagatagtttggggaaagagcttctcacacttggatgccatatggaagaacatcaacgcacttttgttagcaattactctaaaatagctttgggtctaattagtgacacttgaagtgctcatcatagtaatctgtagttatcaaattttcatcaaagagtaagacagatgcagaaattttaaaaatggaatgaatcagttatgtcatttatttgattacaggtcacaaataaaatctggtattaatggctgggcacagtggctcacacttgtaatcccagcacttttggaggccaaagcgggtagatcatttgaggtcaggggttcgagaccagcctggccaacatggtgaaaccctgtccctactaaaaatacaaaaattagctgggtgtggtggtgtgtacctgtagtcccagctactcagaaggctgaaccagggaggcagaggctgcaatgagcagagattgcaccactgtactccagcctgggcaacagagcgagactctgtcaaggaaaggaagaagaagaggaagaggaagaggaagaagaggaagaggaagaagaaaaacaacaacaagaagaacaacnnnnnnnnnnnnnnnnnnnnnnnnnnnnnnnnnnnnnnnnnnnnnnnnnnnnnnnnnnnnnnnnnnnnnnnnnnnnnnnnnnnnnnnnnnnnnnnnnnnnagggccaagaacaagaacaagaacacgaactagtagttagaggcttaatattttcttcacataatcagagatctgcaagtgggctatccatagctgatgttgctgctctgggctgccatcag

SEQ ID NO: 39014 - DNA, 1203 bp, Homo sapiens
  misc_feature (1)...(1203): n = A,T,C or G
cccagaaattcaagcctgcagtgagctatgatcacaccattacactctagcctgggcaacagagtaaggccctgtctcaaaaaaaaataaaaagaaagaaaaaaaaagctgttgtcacaatactttcctttacagtgtcctaaataagatcagaaagagcctccaaatcaagaaaacctcaactctagagaggcttaccttcttagaaccataacattcyaacaactatctaaacttgaaggtgatgagccaatctaaaatgaacaattaaagtttgaaaacaccatttctagatcagggttcagccctatgctctatgtggctaggagtatttaaaccttggaccacgtgaaaaaatgaaagaacagtcattctcaaagcattttaatcctgttgagatagtttggggaaagagcttctcacacttggatgccatatggaagaacatcaacgcacttttgttagcaattactctaaaatagctttgggtctaattagtgacacttgaagtgctcatcatagtaatctgtagttatcaaattttcatcaaagagtaagacagatgcagaaattttaaaaatggaatgaatcagttatgtcatttatttgattacaggtcacaaataaaatctggtattaatggctgggcacagtggctcacacttgtaatcccagcacttttggaggccaaagcgggtagatcatttgaggtcaggggttcgagaccagcctggccaacatggtgaaaccctgtccctactaaaaatacaaaaattagctgggtgtggtggtgtgtacctgtagtcccagctactcagaaggctgaaccagggaggcagaggctgcaatgagcagagattgcaccactgtactccagcctgggcaacagagcgagactctgtcaaggaaaggaagaagaagaggaagaggaagaggaagaagaggaagaggaagaagaaaaacaacaacaagaagaacaacnnnnnnnnnnnnnnnnnnnnnnnnnnnnnnnnnnnnnnnnnnnnnnnnnnnnnnnnnnnnnnnnnnnnnnnnnnnnnnnnnnnnnnnnnnnnnnnnnnnnagggccaagaacaagaacaagaacacgaactagtagttagaggcttaatattttcttcacataatcagagatctgcaagtgggctatccatagctgatgttgctgctctgggctgccatcag

SEQ ID NO: 39015 - DNA, 1203 bp, Homo sapiens
  misc_feature (1)...(1203): n = A,T,C or G
cccagaaattcaagcctgcagtgagctatgatcacaccattacactctagcctgggcaacagagtaaggccctgtctcaaaaaaaaataaaaagaaagaaaaaaaaagctgttgtcacaatactttcctttacagtgtcctaaataagatcagaaagagcctccaaatcaagaaaacctcaactctagagaggcttaccttcttagaaccataacattccaacaactatctaaacttgaaggtgatgagccaatctaaaatgaacaattaaagtttgaaaacaccatttctagatcagggttcagccctatgctctatgtggctaggagtatttaaaccttggaccacgtgaaaaaatgaaagaacagtcattctcaaagcattttaatcctgttgagatagtttggggaaagagcttctcacacttggatgccatatggaagaacatcaacgcacttttgttagcaattactctaaaatagctttgggtctaattagtgacacttgaagtgctcatcatagtaatctgtagttatcaaattttcatcaaagagtaagacagatgcagaaattttaaaaatggaatgaatcagttatgtcatttatttgattacaggtcacaaataaaatctggtattaatggctgggcacagtggctcacacttgtaatcccagcacttttggaggccaaagcgggtagatcatttgaggtcaggggttygagaccagcctggccaacatggtgaaaccctgtccctactaaaaatacaaaaattagctgggtgtggtggtgtgtacctgtagtcccagctactcagaaggctgaaccagggaggcagaggctgcaatgagcagagattgcaccactgtactccagcctgggcaacagagcgagactctgtcaaggaaaggaagaagaagaggaagaggaagaggaagaagaggaagaggaagaagaaaaacaacaacaagaagaacaacnnnnnnnnnnnnnnnnnnnnnnnnnnnnnnnnnnnnnnnnnnnnnnnnnnnnnnnnnnnnnnnnnnnnnnnnnnnnnnnnnnnnnnnnnnnnnnnnnnnnagggccaagaacaagaacaagaacacgaactagtagttagaggcttaatattttcttcacataatcagagatctgcaagtgggctatccatagctgatgttgctgctctgggctgccatcag

SEQ ID NO: 39016 - DNA, 1178 bp, Homo sapiens
tggcccctataatacakgggtggaagaaatatttttaggtccttacccaccctcattctgtacacccggatgatatccccaaccagaccttccagttagaaaatgatgatcagatgtctgcatgaggaaggagtgggttattcagtaaaaggttgtagcagacagaattgcttaccaactcaatagtcatctccctcttcctccttgtggaaagaatccccatttttaaggtaattcatcctcctccgcatgagtctgtgctcctctatgccagtcatggtcgttttatcccccttgccagtgatcagcctagttataggcatggtgaaattcaggccactgtgatgtgagaggaggtatgctggagagattctgggaaagttttcttgaatgataaaaataagcatacaggaagaggccttcctcttttaccattgaatattgccatgtctggaaacaatgcctgaccggcaatagccaccttgtgaccatgaaagttgctaaataacatgctgaggtttgcaaatcagaaagatggaaagaatcaggattttttaatgacattgttgaactgctgaattaatcagctccaaagccacccactactgaacttatatgcaagataatatatttccttttttaaaaacagtcatctaagttgggattttctgttattgcaactgaaaacatagcaaaagattcaagtgggatgtggatgaggcattagctcagtgggggaggacggaacggagatagatggattaaatcgcagaaacagatttcctgtgctgtcctaggtgctgaacaaactagtcctggtctccactctaaggttgttaacagccttgctggagataaagttggacatgtagaaagacaaaaagggcacactacagagaatacatatggacaaagttaacttgtgtacaactatgtgaagccagtcacttcccaatgattttattagtaagtttagacatccagggcttcagatcactactcctttccattgagattgagtgactttcgtgttccacttactctcagcaggtaattccatttgttcacttcataaagaaaattcagccaattggagtggacctcacaccttccaaatacacgtatactttaattctcaataacgacaatgagggcactctgctgggttccttacatgc

SEQ ID NO: 39017 - DNA, 1178 bp, Homo sapiens
tggcccctataatacatgggtggaagaaatatttttaggtccttacccaccctcattctgtacacccggatgatatccccaaccagaccttccagttagaaaatgakgatcagatgtctgcatgaggaaggagtgggttattcagtaaaaggttgtagcagacagaattgcttaccaactcaatagtcatctccctcttcctccttgtggaaagaatccccatttttaaggtaattcatcctcctccgcatgagtctgtgctcctctatgccagtcatggtcgttttatcccccttgccagtgatcagcctagttataggcatggtgaaattcaggccactgtgatgtgagaggaggtatgctggagagattctgggaaagttttcttgaatgataaaaataagcatacaggaagaggccttcctcttttaccattgaatattgccatgtctggaaacaatgcctgaccggcaatagccaccttgtgaccatgaaagttgctaaataacatgctgaggtttgcaaatcagaaagatggaaagaatcaggattttttaatgacattgttgaactgctgaattaatcagctccaaagccacccactactgaacttatatgcaagataatatatttccttttttaaaaacagtcatctaagttgggattttctgttattgcaactgaaaacatagcaaaagattcaagtgggatgtggatgaggcattagctcagtgggggaggacggaacggagatagatggattaaatcgcagaaacagatttcctgtgctgtcctaggtgctgaacaaactagtcctggtctccactctaaggttgttaacagccttgctggagataaagttggacatgtagaaagacaaaaagggcacactacagagaatacatatggacaaagttaacttgtgtacaactatgtgaagccagtcacttcccaatgattttattagtaagtttagacatccagggcttcagatcactactcctttccattgagattgagtgactttcgtgttccacttactctcagcaggtaattccatttgttcacttcataaagaaaattcagccaattggagtggacctcacaccttccaaatacacgtatactttaattctcaataacgacaatgagggcactctgctgggttccttacatgc

SEQ ID NO: 39018 - DNA, 1143 bp, Homo sapiens
aatgattgtacttgtttacaatctatgttttacataaatttcatagacatatttatgtaatcttttttctttcataacaaaaattaactgagaataggatgtttatttttgtagatagttatgccaatattttctctttaataaactatcaatttcatagaaataatctcagttcaastattgatgatatctagctggtatgacattagaaatatcagagtactttagtactttatataattacataattagttctgtctaaaacaaccatgcgacggtataaaaaggtcctattttttcttgagaaaatataagaccgttttcaattagaagattcttctcacggtcagtgctttgatttggatatggtttgtttgtcctcaccaagtctcatgctgaaatctgattcccaatgttggaggtggggcctggtgggaggtgtttgggtcatggtagcagatctttcatgaatagtttgggtccattttcacagcagtgagtgagttttggctgttagttgctgtgagaactaattattgaaaagaacctggcacttcctcctctctccttcttgcttcttctctcaccatgtgatctgcacacactactccacttcaccttccttcctccaagagtggaaattctctgaagctttcaccagaagcagatgttgacatcatgcttcttgcacagcctgcaaatgtgtgagccaaataaacatcttttgtttataaattatccagcctcaggtattttttatagtaacacaagtggagtaagacagtcagagatcacttgaaattgttgctcttctgtaccataatgtgccatgtaattccatagatttcatttttaattgtattagtttcaacttgataacagaatatttttcatacgttagtagcatgtacaattattagaagcttaaatagctgatcttctttcaaagtgcctcatcatttggaggaactattctggtcttgtctttatgagattcctcagaaatggtctgaaattcccagttgcacaaggtgttagtcagctccatcacacgttctttattagttttttctttttggtgtttcacttcctccactctctcattctaccttcctaggatcacctcccaaataaaaataccta

SEQ ID NO: 39019 - DNA, 1104 bp, Homo sapiens
tttgtcttttgatgaaaacatgaactctgcacatattaaaaaaaaaaaaaaaaggcttatgggaccttcaaaatggacccagcgagcctagtgcctggaaaccctaacttgctaacactgtygtccaccaaacacagctttatgagtaagtggattaactatatagccaatgaagaggaacatgaaggagaatttgtctgagtttttttattccttctaatatcatgctaatatattagaaagctccatagatgggggtagcattgcaagataagggtaattaactgaattatattatatcttatatatatttatctttctcttaaatctatattcaaattcccgtgcaattttttatctcccagcacccattttagatgttaagtaatgttacacaaaagttaattaattaatttatttaaccactagggatttctctgtgccagagactgtaccaggaccccaggcaatgagtagtcactcaaagaagcaggaagccttttttattgaatttaatgatcatgacagatatttgtccaataaatgcagaatagtgtaatttgaaatttcattttatttgaagaatagataggaagatgtaagggctaaagcaaaggaatctgatcaagtatcagggcatatggcatgcaaatggagaagagatgtgtgatgaggagttaaattggtgaagatatgaagtggaatgaaattctagacaggaggctgggcaggcctaataccctgatattgggggaaacattctaggtagaacctaatgcagatagtacaggtagtaacaagaagaacatttgcagatgagccatccttcaggggcttacaggtcatgaggtctaagtaaggtgtttgagcattagctaaataactggcaaatggttttaagcagaaaggtagcatgactggactatagctgcacttgatgaaggtcgttctgacttgacaggcaaatggataaagaaagcttggggttgcggtggggtcatcagtaatattgtcagtaagaatgcttaggagattcttagactagagtgatgctcatggctatgcacatccttttcttcatttccccaagctttgaacattgag

SEQ ID NO: 39020 - DNA, 1104 bp, Homo sapiens
tttgtcttttgatgaaaacatgaactctgcacatattaaaaaaaaaaaaaaaaggcttatgggaccttcaaaatggacccagcgagcctagtgcctggaaaccctaacttgctaacactgtcgtccaccaaacacagctttatgagtaagtggattaactatatagccaatgaagaggaacatgaaggagaatttgtctgagtttttttattccttctaatatcatgctaatatattagaaagctccatagatgggggtagcattgcaagataagggtaattaactgaattatattatatcttatatatatttatctttctcttaaatctatattcaaattcccgtgcaattttttatctcccagcacccattttagatgttaagtaatgttacacaaaagttaattaattaatttatttaaccactagggatttctctgtgccagagactgtaccaggaccccaggcaatgagtagtcactcaaagaagcaggaagccttttttattgaatttaatgatcatgacagatatttgtccaataaatgcagaatagtgtaatttgaaatttcattttatttgaagaatagataggaagatgtaagggctaaagcaaaggaatctgatcaagtatcagggcatatggcatgcaaatggagaagagatgtgtgatgaggagttaaattggtgaagatatgaagtggaatgaaatyctagacaggaggctgggcaggcctaataccctgatattgggggaaacattctaggtagaacctaatgcagatagtacaggtagtaacaagaagaacatttgcagatgagccatccttcaggggcttacaggtcatgaggtctaagtaaggtgtttgagcattagctaaataactggcaaatggttttaagcagaaaggtagcatgactggactatagctgcacttgatgaaggtcgttctgacttgacaggcaaatggataaagaaagcttggggttgcggtggggtcatcagtaatattgtcagtaagaatgcttaggagattcttagactagagtgatgctcatggctatgcacatccttttcttcatttccccaagctttgaacattgag

SEQ ID NO: 39021 - DNA, 574 bp, Homo sapiens
aactgtgagtcaattaaacctcctttctttatacattacccagtctcaggtattctttatcagtgtgaaaatagactaatacagtatcatagctcttaggtgttaacagctcttgcagtttcaatcaccaactgctttgctgcctcttgccrtctctccactcatcatctcaccgactgccatctctcaccattgcctgactgaatgctgcttctctcgccatctctcatgccactgtcttttctctgtgccctacattgggtgctagggcagggcaggcaatccccaaattagggcttagccagggagagttctttgcttcacccaggaaagaatttaagagtgaatcagaggtagaagaaaacagctttgttgaaacagcagtgctacagctctggtggtgtcacagttcaggcagtgttaaagctctgtggctgctcctgtagaggaaggctaccccataggcgctgtactgagagtagcagctctaggtatttctgcagttatatttatacccacttttaattacatgcagattaaggagcagtttatgcagaaatttctagggaaagtg

SEQ ID NO: 39022 - DNA, 546 bp, Homo sapiens
tttgacgtctggggaagccctacgtgtttgtgtgtgtggaggtgtgcatatcttctccttctaaaccaataaatcttttctagccagccataaatagcaatcaagtgtccaaaagacagaagaaacaactcaaaactcagtatggttgaaaatcaagggagcctgttttgggcaatccacagcgttggtctgacttaacaacctttgattttaatcaataagcatttccatcccaggatgcatgcactttttcccaaacagtatttattgaggtctactatgtatcaggcaccactccatcaaaaagagaagcrtaagcagcttttttctgttttaaactggttgtctgtggacatcatttgagttgacactgaggttcttctggctgggaaatgagcacttgcatagggcattagagatagaggagtttttccacaacctggttttgattccatggtctttcactgcagttcctccagctaatttttttttttttttgctagttttgatcctaccaatcatacatcagtttggattccatctttt

SEQ ID NO: 39023 - DNA, 548 bp, Homo sapiens
gttctttgcttttgtgtgactttctctcctacccttaaatgaatgtcatttctttgaatttcctgctgcaataactgctttgataacaaatgaaaaagcaaagaggaccttgggtttactctcccgggttggactcagttccagtaaattgcagcacttaaatctactgatttattgtacayttttccatgtctacatggcaaaagtcccttataaagagaagctaatccactgtttattgttctggttttttgttcatattttagcaatcttaatgttaatctcagattgtctatgtcaataacaaatcaatcacctgaaaatcaatcattaaaataacttgtaaaaaagttttgcatataaaatgacctgattcttcaataaatccccatttattttattcaagataattgttattatattaaatggttgaaatatatatatatatatatttatccaaataagataaattattcttttttgcttctaattttgttgagtcttttcatcagacaaatcttccttccagacagttctgaatgacatgt

SEQ ID NO: 39024 - DNA, 803 bp, Homo sapiens
ttttgtgaatatctcaccttgatccttcctgcttctccttcctattccatttgtctgttgtggttttcctggggggagacttaaaatacaaaataatataagctcggccaggtgcgctggctcacgcctgtaatcccagcactttgggaggccaaggcgggcagatcacgaggtcaggagaccaagaccatcctggctaacacggtgaaaccccgtctctaataaaaatacaaaaaaagcaaaattagccgggcacggtggcgggcacctgtagtcccagctactcgggaggctgaggcaggagaatggtgtgaacctgggagccggagcttgcagtgagccaagaatgcaccactgcactccagcctgggcaacagcgagactctgtctcaaaaaaaaaaaatagacagaaatttcatttttcactttatatatttttgttttgttttcacaatgagcttatattttatatatatatatacacatatatatattccatcatactcctttgagaaagctataataatawtttggtatatttccactgcacttagtattcttcaatctacctcttcatttagcaagttattttgatcatctttgcaaaagtgtgtaaagagcctctcattcattttaactgcaatgagtatgacatttaaaaatgtaccctaacatatttaatcaatctcctgatcaagggacattttcctgctcttctttgatgaagttctactgaatcatttatttcatgggtttctgtgtcagaggaaaagttggaatatctttgccaaaggtacatcttt

SEQ ID NO: 39025 - DNA, 832 bp, Homo sapiens
ttgaggaatcaccacactgtcttgtacaatggttgaactaatttacactcccaccaacaatgtaaaagtgtttctatttctccacatcctctccagcatctgtagtttcctgactttttaatgattgccattttaactggtgtgatgatattacaaccatttttctaagtagttaaatggtgaatgagaaaagtctcattcagcgatgtgattttaacgaaggtacattttttgtgggttaactagcatttctgtgtgcttgataatttttggaaacactttaaaattgttagatttattatatcttatctttagctctcacagtactatggtttgtgatctggttcctgtccagcctcaattgtcactctttccccacctgcttaccaagctgcagtcacttggtttctaagcatggaggctcacacttcatcccaccttacctctattgtggtgtggtctgtgccatgaatcctgccttctgcttatctttctagtgaatgttgcatgytcagaaactttacttattgcttcccctgtaaatctcttcctcttcctcatctcatctcattccactaaacatagctgttttctccttcccacttccattgcactgtgtctacagtaataaagtgtttaaagtctgactttttctctagggaataggattcatgatggcaggtactacattgtgagtgtttggtctagtctgcagcccaggaagctgatgcctagatatctggtgattttgtgactctaacccacttgactcaaagggaagctacctatagatccacttttcttttttggtggggaggagaggttaatattt

SEQ ID NO: 39026 - DNA, 1417 bp, Homo sapiens
ccatcctcttaaagagtgaaaggcatgagatcttctaatccttccctgtcacttagtcgcctccactcctccacagaaggcgggacatggagccattaggaactgttgtggtggttttaggaaggtgagggctaaaggctttgatgtgagaagtcaggatttccttgaagccatattggctattttctagaagggaggcatgcagagaaatcatgtggcttcactgacagggaaggactgagctctggcaagacacagatgtttsataatcttcctcaacatgtgggctttctatgcttctgcatttataccctcttatctgagagccaagggacaaaagccacccagggttccctgatacagtaatcaggccctcaaacctgtgctctttggctttggatattttgaattcagatatctgagataaatctccctttttcaggggctgcttttagctggcaaaacaaattcatgaagatggtttaatagcttaaccttttacctgtccaaggagtcatgtttacatgagccatagatttcaataccctcttaactcagtgatatggttaatggtagaactgtctagaaacccagaggaagtgctctaattgagcaaaaagggatcctttacaccaggggacaataagttaaagtacattcatccagggggttgctcaaagtgttccattgggaagaaaatgtaggcatttatatatatttgtatttttgttatccttttaaatttatttgatagtacataatttactggtttagtagggcacatataagatttagagataaatttatacatattgatgttgtgtgcactatggttttttctttctgataatgatgtaccttgttccattcaaaccttgctattctgatgactttctacattatttcagactccaaaaggtgtttgcattctgatttgactgctctaaatgtcctgggcctggctgtttccattccatttcagtaaatgtttaaggcattggacatgcagctataagggctgctttctttactgcttaaaaagaacacatggctgactgagctaggatatctccattctcaatgtgttataagcccagcaatattgatctgtatagagattctgcaccaacttacagattgagcaatgcggaagtggttatggtttttagatgcattgcctaccagtgcatggtgcatttccttcttatgatgattatttttttttcttactcacttaaagtcatcaggttgaaatgatcatgttctttccctggtaaagaactcctgccccgtctgtctgcttagggaatacagttaaaaccattcaaaacagaacttcaatagaataagaacacacatgtaaaatgttttagaaaattcttagataccaattacaaaagtacagcatggagatgaa

SEQ ID NO: 39027 - DNA, 1417 bp, Homo sapiens
ccatcctcttaaagagtgaaaggcatgagatcttctaatccttccctgtcacttagtcgcctccactcctccacagaaggcgggacatggagccattaggaactgttgtggtggttttaggaaggtgagggctaaaggctttgatgtgagaagtcaggatttccttgaagccatattggctattttctagaagggaggcatgcagagaaatcatgtggcttcactgacagggaaggactgagctctggcaagacacagatgtttgataatcttcctcaacatgtgggctttctatgcttctgcatttataccctcttatctgagagccaagggacaaaagccacccagggttccctgatacagtaatcaggccctcaaacctgtgctctttggctttggatattttgaattcagatatctgagataaatctccctttttcaggggctgcttttagctggcaaaacaaattcatgaagatggtttaatagcttaaccttttacctgtccaaggagtcatgtttacatgagccatagatttcaataccctcttaactcagtgatatggttaatggtagaactgtctagaaacccagaggaagtgctctaattgagcaaaaagggatcctttacaccaggggacaataagttaaagtacattcatccagggggttgctcaaagtgttccattgggaagaaaatgtaggcatttatatatatttgtatttttgttatccttttaaatttatttgatagtacataatttactggtttagtagggcacatataagatttagagataaatttatacatattgatgttgtgtgcactatggttttttctttctgataatgatgtaccttgttccattcaaaccttgctattctgatgactttctacattatttcagactccaaaaggtgtttgcattctgatttgactgctctaaatgtcctgggcctggctgtttccattccatttcagtaaatgtttaaggcattggacatgcagctataagggctgctttctttactgcttaaaaagaacacatggctgactgagctaggatatctccattctcaatgtgttataagcccagcaatattgatctgtatagagattctgcaccaacttacagattgagcaatgcggaagtggttatggtttttagatgcattgcctaccagtgcatggtgcatttccttcttatgatgattatttttttttcttactcacttaaagtcatcaggttgaaatgatcatgttctttccctggtaaagaactcctgcccygtctgtctgcttagggaatacagttaaaaccattcaaaacagaacttcaatagaataagaacacacatgtaaaatgttttagaaaattcttagataccaattacaaaagtacagcatggagatgaa

SEQ ID NO: 39028 - DNA, 630 bp, Homo sapiens
agggtctactggaggaggctgcaaagtgtgcttggctgctaagtaaatctcataatacaaaggtgctcagagaagagctgacatgataaccacaacaattatgatatttcatgttggctgagcacatttatatgtgcctgacatgtgtttaacatgtctgacttcacttattccttacagcaattctgtgatttatataccagcaccagtgtcacttaagagtaacggaactgaggctcagagaggtaaaacaaagcaactcatccaagattgcacaactagcaagtaggactagactggatttgaactactctttgtctacacatagaagaaacttaataaatgcccatcaagtccatgactatcttccatttcttgagcacttgctgtactygctatttgatttaatactcacaactctatgaagtcagtacaattattgaccctattttatagatgaggaacccaaagctcagagatgttaagtaacttgcccgagttcacacacttattaagtggtaaagcgaggatacaaactcagggctgaccaactccagggcctttctcatttgtcttctagagcttttctctggggttgcatgctcagtaaagctcagttgccttctgtgc

SEQ ID NO: 39029 - DNA, 604 bp, Homo sapiens
aagcccttcctacgctggaagactagcggtaatgcaaccacacacagaagtgactgtaaactacataaagctgtctcatcccaagccagatcctaaaaatgcctatgaccattccaacatgaggggcacgaggagcaatgagatggaggggaaatcagagtggaaagagccagccatcttaactacagtcaagtgctgcacgaggacatttcagtcaatgacagaccatgtgggaccatgatggtcaggcaggggcacatgacaggcaggcggcaggggcaggaaggactagcagctcttccctggctagcagcgggggttctgcctccacctgcctccccaggacagaagccagatgagctggaccatgatggtcccttcagattatcataccatatttttcccgtaccttttctgtggttaggcatgtttaaaaaaacaagtacttgccatkgtgttacaattgcctagcatattctgtactgtaacacgctgcaatggcttgtagcctagaagcgataggctataccaggcagcctaggcatatagtaggctctaccagctagtttctgtgtaagtacacctgatccatttgcacaacaac

SEQ ID NO: 39030 - DNA, 713 bp, Homo sapiens
gagaggaatgaaaaaatgttttttagaaagttatgtttaaatgtttaacagtaaatactaatagctataatccacaaagaaagctctttggtgtcctcaatatgttggaggtgtgtaaagaggtttcaccaaacaaaccaaccacaaaaaactcccaaaccccctgccccaaaccaaatctgggtactttaagacaaaactgctgctttaagataaaactacagttctttgttttccttaaaatacagaaggccgggtgcggtggctcacgcctgtaatccaacactttgggaggctgaggtgagcggatcacctgaggtcaggagttcaagaccagcctggtcaaaatggtgaaaccccatctctacgaaaaatacaaaaattagccaggcatggtggcgggcacttgtaatcccagctatttgggaggctgggggcaggaggatcacttgaacctgggaggtggaggttgcagtgagccgagatcatgccattgtactccagcctgggcaaccaagagtgaaactctgtctcaaaaaatatatataaataaataaggccgggtgtggtggctcaggcctgtaatcccaactcttagggaggcagaggcaggaggatagcttgagcccaggagtttgagacctggctgggcaatatagtgaaaccctgatctccacaaaaaggaaaaaaaaagayaaaaaaaaccccaaaaa

SEQ ID NO: 39031 - DNA, 611 bp, Homo sapiens
agaaacagaaatgagatcaaaacgaattaaaatgtcttagaaactgtgaaggctttgatgcaaaaatccaaaaacaaaaaaaaatggcttctttcctttcttttaagagaggagcagaaatatacaattaaagatgagatcaaacagaaaaccaaagacatagaagagaactaagttcagagctgctttgtagagctcagtgctagaggtggagagagctggccatgcctgctgggaggggcggggcagcccaggaagtgggagtggggtcggcctggtgggggtygggaggtggggccctgaagctgctgctgggctacttttcgcccaagggtgaagatggaacagccctgggttgtctatacaggtcgaggcctccacctcatcccaccccacttactctcccgaggagggcatggataccatgccagggggcctgaagagggttgcagagccctggaggaggccagggccaggggctgccacgggaagtggaaggcagcgggccccactcctcccagagaggcttctgggaagcctgcacagagcctgggagtccagggctgcccctcctgctggagaatacactgttcagaactaaaggaacagcg

SEQ ID NO: 39032 - DNA, 985 bp, Homo sapiens
ctttgctgtcgtcaatgacaggatctaggctcagcagggtgagcaccctgggaactttgccctccctgggactggctcctaccacctgacactgtcaaagcacagtgggttcctcctgggtttccttgtgtttggctttttggcatctgccattgatagaaggagcacgcatccccatctgtctgtgcctgctgtctacccctctcctctgtttctggctgagtttccagcttatgaggtagagatggtatgtttttttcttaaaaaacatcatgttacattttaaaaacttatgaatttagcaactacctagtttaaaggtttatttctaaggtctttgagtagcgcagtctaacacattgccaagaaaaagaaggtacttcatagactcagactaattggcaatctttatgcttcctgcattgaaagttcttgtcctccagaggggattgagcctgatctaacttgtctgcatcgagtccttctctcaggagactacatctctgggaaggcaggggccgtgcctgactcacttgtgtattcccctggtttaacttagtgccggctcaaagaggacaccaagctggtcaaagaggtcatgttcagcccygagttgtagtctgggattcaggccgcctttggaagacgttccaaagatctcagaaggcccttgggggtgttggcattgcataacaggcatgggtttggattctgtggaggttgtttcccaagatggctgctacaatcctggccagtcccgatgcccttttgacatgtgactttgtctctactcctatccacaggtagagttcattgcccttcccctccagactgggctggctggagaaaccatgtcaagaaagagggaccctaagaatgagcctccacaagcaaagagaagccttggaagatgaaagaccatgagtagagagaggctctgcggagggcagacatctgagagaggccatctggggtcttccagagg

SEQ ID NO: 39033 - DNA, 511 bp, Homo sapiens
ccagatgatggttccttattcctctacaattttctagtccttgttacaatattgaataatgcctgayaggcactctcatctccctgcaagggaaggtgagtgaagcaaaaataaaatgccaaccttagctcttctcagtatttaaatgcaatattatattatagtatcaatccattcattggtaatgaaatgacaaaaaacgtcacttcatttccccccatcaataatgacaacttttcttcttcccaaaaagctgtttcaggaggttttagtgggatgaataaatgtattcctttttaacacttttgttgtttaaaaatgctattgtttcatttgaggtgtgaggaaatgtgctaaccctgtcattgttggtgcagcagtgcagaaatgataactgtatatagttttttctttttacaaaaatagagaggagcaagaaggagacaacttatttaaatcccgaatacagtcagacctcatatgcattgttaaaaaaaaaagcctgaagaat

SEQ ID NO: 39034 - DNA, 1330 bp, Homo sapiens
tcttttactaggacccattttcccaaggaaagatgttttaaaatacaatattcaaaatgatttatactattgagggcctcttatgtatttgcagtttgacagatattttcagctccttgtcatttcttaccgcgcagagttagaggcaaaattgcacatttactaattctccttcagagaacaatttaaaagctagccctatgcaattctgagctagaataatgttatttgcatggttagcgttaagtcagcacttaactgacaaatcagtccattaagtaacatgagattttcacacattataaatatttaaggggggaaaaaaaactaaagaagaaacagtagtgactttaaaattttccccttaaatactgctcagagtgtggatttgtctcgtttgttgtgtccagaaaatatagaaaagtactttcgttcttacaagcagtttaattagtatttatggatatctttatgcacatggaaatatatatttagattactaaaggggggggagtgagtagggggtacgagaagtaagttaggcatttttgtgtaaatgagtaggtgataaacttaatttcaacctactgttaagataaaatgttagtatatcacgagagctgtcactggtttatctccctttctgttgagtcagttatattgctttgctttcacattacagtaataccaactgttataattctgaaaagagtgcccttggcaaacatttctctctatagattgtgaagaaaatatcaaactctagaagatgaggtagtgcattataggtagatgtccactagctgtccttagtgactgcatattgcattgctttgtaattaagtaagagatgaaaagtgacttgcagtctcagtggctgctcctgtatgtttgagcgtgagtgtgagtgtgtgtgtgtatgcacgctcacacatgcacatccacccacatccatgctcacacagggaatattagccaagagatggatttaggaggaactgaaagattataaggctgtgcttgcatcagtttgaaacactcaagggaagaaacaaccttaagatgtgtaaaaataaaaatgaaaaataaacaaaggtargactgcccgctcaagtgtagtttgaaggttagtgtacttcgggctgtagaattggagagtttaagacgtcttcgtgtcaggaagaatgtcttatccaagcacgcccagattctgaactttctcttgtaaataaataaagaaaacaaactttaaaaatcccccagaggcttctttttgaagtagtttccttgaatttaacttcttatagctaatttgaataattcgtttaga

SEQ ID NO: 39035 - DNA, 1184 bp, Homo sapiens
  misc_feature (1)...(1184): n = A,T,C or G
agcaagtgctaaatattctccggccacacacacacaaacataatcttcccaccacacacacacacacasacacacacacacacacacaggggccttgccatgtcctgaaatggtgactcagtgcagtggcagcaaaggaaatggaagtttgggagtttgaagagtgctcctcggtgcaatagtccttgctctcaaggtctaaccagacttacaagccagtgtgttttttatctgagtagaatatatggtttttaaacagggctgaagttgtttacgaaacacgtaggcaaatgctctcattttataaatgagaaaactgagagtcagggtggtacaatgacttgcctcaggttacacagtgcctggatccagagctagaacccatgtctcctactctgtcgaatactacaagaagtcagggctccctgggaaaggagaagagaagaaaagcaagcggcagaaaccctggtatagtctttttttttagttgattttttagaatggcattttatatttagaaatttttctctgcatgtttgcatttggacttttgaatgtgacaaacgacaagcaggtcctgatttgaactcttggcttttcagtggcttctactggcttcactggatgctatgtttctgctgaataatcctttctttttttttttttttttttttttggttaacaatacctgtcatgctacaaaataaatccttagtcatttccatggcttgaattaaatatatatgcagatttatgttattttcccttgcctgcaaatagtggcttgtgtattttagctttacgttctcttcaagtaactagcttgatgaaatgtttatttaaaaagaggatagaggaggaatttttaggattaataattagctgagttcccctcctccctgtctccccactactctcctacttcagctggacaacacctgataccaacaatataatgtcacctctgctatagatcacccaagaccagctgcatttacatccagatgttaactactgcagactaagcnnnnnnnnnnnnnnnnnnnnnnnnnnnnnnnnnnnnnnnnnnnnnnnnnnnnnnnnnnnnnnnnnnnnnnnnnnnnnnnnnnnnnnnnnnnnnnnnnnnnaattttcatatgtgcttgaagcaacctttatttcaacaatgatttcctagcatttag

SEQ ID NO: 39036 - DNA, 587 bp, Homo sapiens
cttttccgggggaagctgagggtgtggatcggaagaagccgctgccttttccaggggaagctgagggtgtggctctgggatgaggatgaggctccatccttcactgttacagggaccagcttgggaagctgacgcacctttttgtcaaaaccaattccaagtggaaagaaactataggcaggtgtgcatgtgtacacacacctacacagacgtgcacacacaggatgccagaaagaagaatcaaaaggacaggcctcccttcttccccaagcccagctgcaatgtcctgttccccttggtggggccagtccaggggctaggcagcctctacgtggggctgccatgaggcccttccagcccctgaaactcccctgccccaccccacaccagcttatccataatgggcctgagaccagaaaaccaaaggtgtgggctgccgagctgcccgccttaacgcggaccagacatcattactccagtctccattagcagtgaacgcagaggygacgttcaccttctcactgagccatgagtgcatctgccttggccatctcggaagctagcagatcgcagaaggaaagcaacat

SEQ ID NO: 39037 - DNA, 1104 bp, Homo sapiens
gtcacagcttggtgctgtcttcgtgacggtgaattctcctgagatctggtcatttactctctccctttctcttactcttgctttcaccatgtgacaggctgctcccccttcaccttccacaatgattgcaagcttcctaaggccctccccagaagccaagcagatggtggggcyatgcttgtgcagactgcagaaccatgagccaattaaatctcttttctttataaattactgagtctccagtatttctttatagcaatgcaagaatggcttaatacatcagttctcattcgctaaatgccaagggagctccctgtcattgtatcaacacaaattcccctatacatttcccaacatttttgtgtcactacccgcacagcatgattgagggcctttgtggcactcagaaagcctcgttgaatcttcggacatcagtgctagaggacatattacattcaactctttcatttggatgagaaggaaatggaggccaaaagaaatgaaatggcccactccatggatctttctagtaaacaaactgctttggagaaagtgagcgcatttgatggccactctctgaattcaacatttttccactttgaattctctccctattttccttgttttcactctccatctctgcccttttttctcatttccaggaaagcagtgctctttctgtttgttggcttcagcaaacaaagcaggtggaaacctgccgcctggaacctcccttcccagggcattgcttcttctaatagcaggattttagaatagaaggtgaataggtgaaaatctagcccaatgactccaatggtactgtgagaaagattttctaatgaagtaaggaaagtcctctgccagggatttaaggaggggagaaggtttgaaacagtccggagggtcgtagggtgtaaacaacaggatgaataaaagaaagtctttttttattgtattcggttctgctaaggttcagctggtgagcttgcacaaaaccttaactgacctaatcagcgcatttttattatttccttcagcagctttcagcagtgaaagaatgtgagaagagaaagcctcttggaagtcgttcataactgatgaatg

SEQ ID NO: 39038 - DNA, 1104 bp, Homo sapiens
gtcacagcttggtgctgtcttcgtgacggtgaattctcctgagatctggtcatttactctctccctttctcttactcttgctttcaccatgtgacaggctgctcccccttcaccttccacaatgattgcaagcttcctaaggccctccccagaagccaagcagatggtggggctatgcttgtgcagactgcagaaccatgagccaattaaatctcttttctttataaattactgagtctccagtatttctttatagcaatgcaagaatggcttaatacatcagttctcattcgctaaatgccaagggagctccctgtcattgtatcaacacaaattcccctatacatttcccarcatttttgtgtcactacccgcacagcatgattgagggcctttgtggcactcagaaagcctcgttgaatcttcggacatcagtgctagaggacatattacattcaactctttcatttggatgagaaggaaatggaggccaaaagaaatgaaatggcccactccatggatctttctagtaaacaaactgctttggagaaagtgagcgcatttgatggccactctctgaattcaacatttttccactttgaattctctccctattttccttgttttcactctccatctctgcccttttttctcatttccaggaaagcagtgctctttctgtttgttggcttcagcaaacaaagcaggtggaaacctgccgcctggaacctcccttcccagggcattgcttcttctaatagcaggattttagaatagaaggtgaataggtgaaaatctagcccaatgactccaatggtactgtgagaaagattttctaatgaagtaaggaaagtcctctgccagggatttaaggaggggagaaggtttgaaacagtccggagggtcgtagggtgtaaacaacaggatgaataaaagaaagtctttttttattgtattcggttctgctaaggttcagctggtgagcttgcacaaaaccttaactgacctaatcagcgcatttttattatttccttcagcagctttcagcagtgaaagaatgtgagaagagaaagcctcttggaagtcgttcataactgatgaatg

SEQ ID NO: 39039 - DNA, 1104 bp, Homo sapiens
gtcacagcttggtgctgtcttcgtgacggtgaattctcctgagatctggtcatttactctctccctttctcttactcttgctttcaccatgtgacaggctgctcccccttcaccttccacaatgattgcaagcttcctaaggccctccccagaagccaagcagatggtggggctatgcttgtgcagactgcagaaccatgagccaattaaatctcttttctttataaattactgagtctccagtatttctttatagcaatgcaagaatggcttaatacatcagttctcattcgctaaatgccaagggagctccctgtcattgtatcaacacaaattcccctatacatttcccaacatttttgtgtcactacccgcacagcatgattgagggcctttgtggcactcagaaagcctcgttgaatcttcggacatcagtgctagaggacatattacattcaactctttcatttggatgagaaggaaatggaggccaaaagaaatgaaatggcccactccatggatctttctagtaaacaaactgctttggagaaagtgagcgcatttgatggccactctctgaattcaacatttttccactttgaattctctccctattttccttgttttcactctccatctctgcccttttttctcatttccaggaaagcagtgctctttctgtttgttggcttcagcaaacaaagcaggtggaaacctgccgcctggaacctcccttcccagggcattgcttcttctaatagcaggattttagaatagaaggtgaataggtgaaaatctagcccaatgactccaatggtactgtgagaaagattttctaatgaagtaaggaaagtcctctgccagggatttaaggaggsgagaaggtttgaaacagtccggagggtcgtagggtgtaaacaacaggatgaataaaagaaagtctttttttattgtattcggttctgctaaggttcagctggtgagcttgcacaaaaccttaactgacctaatcagcgcatttttattatttccttcagcagctttcagcagtgaaagaatgtgagaagagaaagcctcttggaagtcgttcataactgatgaatg

SEQ ID NO: 39040 - DNA, 815 bp, Homo sapiens
ctgtcaacactgtaaacaaatcaagattacatactaaatgtgaggcagaagttctcctggttctcatttacctgggaaatgaataagataaaaagtgccgagataccattttttatgttgacctataatgaataattctcccaattgcagagaaattgacaatgaatgtttgaaattaatcaattcactaaattcttaaggagtacttattatgtgccaggcgttaatatgctagggaatacaactgagaacaagataaacaaatgtcctgggtattttggtacttacattttgtcagacatagataggcaatagacgagtaactaaaaaaatcccaagtaatttgagctaatgataagtgtcattaaaaacataaaactatataatgcgagagagtgactacagtcagagaaaacctctctgaaaaagaggcattgaagctgagatctgaatggtaagaaggagccaacyttataaagctttgaggaacatgattccacagacagaaccataagtgcaatgacctctaagtaagagcaagcttggcatgtgcaggggacaaataaggccagtgaggcctgagcagatgggcaaggaatcatgtacttttatttaagcagtctgtatatatttttagattttacagttcgcgccaaaaaatttgagcacttttagaatattgcaaaccatacttgattataagttttagtttttacctattgttccaatagtcagagaaaacatctgttttattcagaagtaagactatataatcattcatgttttgctggctgttgtcatggagtgcacatgct

SEQ ID NO: 39041 - DNA, 815 bp, Homo sapiens
ctgtcaacactgtaaacaaatcaagattacatactaaatgtgaggcagaagttctcctggttctcatttacctgggaaatgaataagataaaaagtgccgagataccattttttatgttgacctataatgaataattctcccaattgcagagaaattgacaatgaatgtttgaaattaatcaattcactaaattcttaaggagtacttattatgtgccaggcgttaatatgctagggaatacaactgagaacaagataaacaaatgtcctgggtattttggtacttacattttgtcagacatagataggcaatagacgagtaactaaaaaaatcccaagtaatttgagctaatgataagtgtcattaaaaacataaaactatataatgcgagagagtgactacagtcagagaaaacctctctgaaaaagaggcattgaagctgagatctgaatggtaagaaggagccaaccttataaagctttgaggaacatgattccamagacagaaccataagtgcaatgacctctaagtaagagcaagcttggcatgtgcaggggacaaataaggccagtgaggcctgagcagatgggcaaggaatcatgtacttttatttaagcagtctgtatatatttttagattttacagttcgcgccaaaaaatttgagcacttttagaatattgcaaaccatacttgattataagttttagtttttacctattgttccaatagtcagagaaaacatctgttttattcagaagtaagactatataatcattcatgttttgctggctgttgtcatggagtgcacatgct

SEQ ID NO: 39042 - DNA, 815 bp, Homo sapiens
ctgtcaacactgtaaacaaatcaagattacatactaaatgtgaggcagaagttctcctggttctcatttacctgggaaatgaataagataaaaagtgccgagataccattttttatgttgacctataatgaataattctcccaattgcagagaaattgacaatgaatgtttgaaattaatcaattcactaaattcttaaggagtacttattatgtgccaggcgttaatatgctagggaatacaactgagaacaagataaacaaatgtcctgggtattttggtacttacattttgtcagacatagataggcaatagacgagtaactaaaaaaatcccaagtaatttgagctaatgataagtgtcattaaaaacataaaactatataatgcgagagagtgactacagtcagagaaaacctctctgaaaaagaggcattgaagctgagatctgaatggtaagaaggagccaaccttataaagctttgaggaacatgattccacagacagaaccataagtgcaatgacctctaagtaagagcaagcttggcatgtgcaggggacaaataaggccagtgaggcctgagcagatgggcaaggaatcatgtacttttatttaagcagtctgtatatatttttagattttacagttygcgccaaaaaatttgagcacttttagaatattgcaaaccatacttgattataagttttagtttttacctattgttccaatagtcagagaaaacatctgttttattcagaagtaagactatataatcattcatgttttgctggctgttgtcatggagtgcacatgct

SEQ ID NO: 39043 - DNA, 815 bp, Homo sapiens
ctgtcaacactgtaaacaaatcaagattacatactaaatgtgaggcagaagttctcctggttctcatttacctgggaaatgaataagataaaaagtgccgagataccattttttatgttgacctataatgaataattctcccaattgcagagaaattgacaatgaatgtttgaaattaatcaattcactaaattcttaaggagtacttattatgtgccaggcgttaatatgctagggaatacaactgagaacaagataaacaaatgtcctgggtattttggtacttacattttgtcagacatagataggcaatagacgagtaactaaaaaaatcccaagtaatttgagctaatgataagtgtcattaaaaacataaaactatataatgcgagagagtgactacagtcagagaaaacctctctgaaaaagaggcattgaagctgagatctgaatggtaagaaggagccaaccttataaagctttgaggaacatgattccacagacagaaccataagtgcaatgacctctaagtaagagcaagcttggcatgtgcaggggacaaataaggccagtgaggcctgagcagatgggcaaggaatcatgtacttttatttaagcagtctgtatatatttttagattttacagttcgygccaaaaaatttgagcacttttagaatattgcaaaccatacttgattataagttttagtttttacctattgttccaatagtcagagaaaacatctgttttattcagaagtaagactatataatcattcatgttttgctggctgttgtcatggagtgcacatgct

SEQ ID NO: 39044 - DNA, 664 bp, Homo sapiens
tacccacagcacaggcaagtggaacgttctctgagtttagctttgtttgtgtaggtagttcactgtgggagtctagcttttgggggacacacctgagaccctcccagctaccctgccctctccccagatcagctcggtaggctccaatccagagagtcaggctgggaggggagcacggagccgcccctgctggacacgtatcccggccatctcaggcccacccattgcctcattgctccctgcccccggtccagtcagctgagtgccccgtggtgtgggtgcrtcatgccatggcgaccagccccaaagggtgagcctttgagttgttcaccaatcattggggtttcgaacaagcctgtgctgacggccctggcacacagggtttctgaattaactctgccatcgttcctggcctcagctgtggtggggaaggcagttcggggtcatgagaaccctgagggttgctcccaagtcagtgtttgctgggtctagtgggggcctctccacctggagtctgtctgggaggttagaaagaccgtcagtgagcttgggccctgctggggctggtcatctgctcagggagagggcgatcccctgccagcccagcaaggccaccccagcggtcacccccttgggagggtgtggacaggagcctccccctccc

SEQ ID NO: 39045 - DNA, 664 bp, Homo sapiens
tacccacagcacaggcaagtggaacgttctctgagtttagctttgtttgtgtaggtagttcactgtgggagtctagcttttgggggacacacctgagaccctcccagctaccctgccctctccccagatcagctcggtaggctccaatccagagagtcaggctgggaggggagcacggagccgcccctgctggacacgtatcccggccatctcaggcccacccattgcctcattgctccctgcccccggtccagtcagctgagtgccccgtggtgtgggtgcgtcrtgccatggcgaccagccccaaagggtgagcctttgagttgttcaccaatcattggggtttcgaacaagcctgtgctgacggccctggcacacagggtttctgaattaactctgccatcgttcctggcctcagctgtggtggggaaggcagttcggggtcatgagaaccctgagggttgctcccaagtcagtgtttgctgggtctagtgggggcctctccacctggagtctgtctgggaggttagaaagaccgtcagtgagcttgggccctgctggggctggtcatctgctcagggagagggcgatcccctgccagcccagcaaggccaccccagcggtcacccccttgggagggtgtggacaggagcctccccctccc

SEQ ID NO: 39046 - DNA, 983 bp, Homo sapiens
aagaaaagttaaacagcagagaaatattaactacttttatctgtgatacaaatgaaatgaagcagtcgtttgataacgtcaatgctgtggcttccttaaatttcagtagcgctctttctaagagtaaggccaagcagaaggaaggtgtcaggtagaaaacagtttgcagaatttataatctgtcctatcagcaagcccaagatccctgtgggtctcagctgactccttaactgtgattagagcaagccagagatgcagaagcagagggaaaaaatgctaaggatatcattagaagccttaatttctgaatatgtctttgctgcaagctctcttggtaacctttcctagcaacttccagtggagaagtctttcctgatatgctggtaaaatgtctcctgctgcaactattgtcaatttttcttacttcatccccagagcccttctttcaacaactgcatggcaagtgcctgcttcaggcaggtgaacaagacagacctgggccctgcactcaaggagggtgcaacccagcgacgaattccacaagtccttgagcctgtgatcagttttggagggtggggaatgagtaagatagagaattgatggtggactatatgcaatagtgtmgtcaggaagggccctgcgagaggtgacatttaaactgagacctgaggagtgatggaagccatctgtgcaaagtgtggacagagagccgtctactcacagaaacatgttcaaaggtgggagatcggagagtcccactgcctgactgggcagaaaagggcggtgagggtgggagagtagcaatcctgaggaaactggatggttggtcactttcagcaggctattagcataggggcttagaagtcatggaggagagtgtggatttattctaaatgcaatgggaaacactgtatttaagcagggacttgcaatgtcagtaaggagtaccccagattgcccaagtcaaaatacaggaatcattt

SEQ ID NO: 39047 - DNA, 1143 bp, Homo sapiens
ttgctaattgatacatgactcagccagagggccttggcctctggataatcccaaagcatcatgacatgtcacacacacacacatgcacatatgcacacaaatatacacagagaactgtgctgttctttgtgcataacgataacatgactcaccttttaagaatgaaatgccacatgcctgtaatcccagcactttgggaagccgaggtgggtggatcaggagactgagaccatcctggccaacatggtgaaatcccgtctctactaaaaatacaaaaaagtagctaggcatgatggcgtgtgcctgtagtcccagctacttgggaggctgaggcaggagaattgcttaaacccaggaggcagaggttgcagtaagctgcgatcatgccactgtactmcagcctgggtgacagagcaagattttgtctcaaaaaaaaaaaaaaaaaaaaaaaagaaatacaaaaactcagccctacattatgccaaaagtagtgtagttttcaaatatgtggtcagaataaggctcacagcccatggtcatgaacaataataagggctcatgctccctgaatgtggaccttgaggtaggcaccaggcaggaactgagctcgtcacagtgtgggcagtaacaggcccatgagaaatgtactgaggctggcagagattaagtcacttgccacaaggctagaaagtgtagacgtggggtttaggcccagacaggctgatgcagaagcctaatctcttacccactggggcctttctacggaggagctgaaataattacattgtcacgtctgtaacagcaagaaaaggccctaacccaccactgcagcatttgcctgaaaagttgacccacatgcagtgatggtagtaataacagtagtagcagctaccatttattgtgtcttctttatgctagacattcattcattcaataatgatagcttacactcacatggtatgtcctctaagcttggcactactttcagtgctgtccctatacaaagtcatttaatccttatggcaaccctatgaggtaggtactatgattttatggaaaactgaggcacagagaggtgaacttgccccaggtcacacagacagaaagtagtgaggtcagaattccaaactgggcaatccacag

SEQ ID NO: 39048 - DNA, 1143 bp, Homo sapiens
ttgctaattgatacatgactcagccagagggccttggcctctggataatcccaaagcatcatgacatgtcacacacacacacatgcacatatgcacacaaatatacacagagaactgtgctgttctttgtgcataacgataacatgactcaccttttaagaatgaaatgccacatgcctgtaatcccagcactttgggaagccgaggtgggtggatcaggagactgagaccatcctggccaacatggtgaaatcccgtctctactaaaaatacaaaaaagtagctaggcatgatggcgtgtgcctgtagtcccagctacttgggaggctgaggcaggagaattgcttaaacccaggaggcagaggttgcagtaagctgcgatcatgccactgtactacagcctgggtgacagagcaagattttgtctcaaaaaaaaaaaaaaaaaaaaaaaagaaatacaaaaactcagccctacattatgccaaaagtagtgtagttttcaaatatgtggtcagaataaggctcacagcccatggtcatgaacaataataagggctcatgctccctgaatgtggaccttgaggtaggcaccaggcaggaactgagctcgtcacagtgtgggcagtaacaggcccatgagaaatgtactgaggctggcagagattaagtcacttgccacaaggctagaaagtgtagacgtggggtttaggcccagacaggctgatgcagaagcctaatctcttacccactggggcctttctacggaggagctgaaataattacattgtcacgtctgtaacagcaagmaaaggccctaacccaccactgcagcatttgcctgaaaagttgacccacatgcagtgatggtagtaataacagtagtagcagctaccatttattgtgtcttctttatgctagacattcattcattcaataatgatagcttacactcacatggtatgtcctctaagcttggcactactttcagtgctgtccctatacaaagtcatttaatccttatggcaaccctatgaggtaggtactatgattttatggaaaactgaggcacagagaggtgaacttgccccaggtcacacagacagaaagtagtgaggtcagaattccaaactgggcaatccacag

SEQ ID NO: 39049 - DNA, 564 bp, Homo sapiens
ttacagttcggaggtcagcagtcagatgtcagtagggcttgttcytccttccacacatcactccaatctcttgctcccattgtcacaactcctacctccacatttgacctccttgtctcctcaagaacccttgggattacactgggcctaactagataaccaaggataatcatcccatctcaaaatcttaatcaccaagtttcttcccatgtaagataagaacaatgcacaggattagaacatggacatctttggagaaggggaattattctgcctaccacagatgctatcaggaagaggacagaaatgactgatactgttgggatggctgtgtgtgtgtgtgtgtttgtgtgtgtgtgcagtgtatgtgttgaggggtagggcagacagcagccctaggcttaacatcacactcaggcttttgggttttcaccctgctcaaggaaaatgtgtcacttcttgcagtttttgcttcaggacgtgctgtctggcccagctggctgctggaacagggcggtgctatggatggcagctcctctgcctgtagggcacaaggcccacgat

SEQ ID NO: 39050 - DNA, 697 bp, Homo sapiens
ttttttggagagatggagtctcgaactcctgtgctcaggtgatcctcctgcctctgcgggccaaagtgctggaattacaggtgtgagctcccgtgcctggcmacagagttaacttttgattgttttgccttccaacattttatatatgttttatacaaaggggattatattatacacctttgtagcctgctttttttcctctcagcaatatacttactatgtgcgttttcccatatcgatagcttctttacaacaccatttttaatactttcatatcattccttcaaatggctataccttttcctagccaattctgggaacaactgaccccctggcatttggcatgggcccaggacagaatgtgtactgtaatgaccgccccccgtcccaattctccagataggacattaagttcctgccagcatctgcagcccgtctcctgactcaaagttcaggctgctgctccaacatagtgccactcagaggagggctccacacctgcccccaaccttgccctgccctgccctgccttggccggcgccgcgcacctaaagcgccgctctggcggtggggctggacagaagagaccctgcgcggtccggccgctcgccgcgcatgctccttcctgcgcgctgccctccccggccccgcctccgcggctcccgcccgcgagcggttgggatttgaatctgccgcg

SEQ ID NO: 39051 - DNA, 787 bp, Homo sapiens
gtccgccaagaagcgtatcccgctgagcggcgtggcgcgggggcgtcatccgtcagctccctctagttacgcaggcagtgcgtgtccgcgcaccaaccacacggggctcattctcagcgcggctgttttttgttcccgagaccacggctcactgcagcctcgacctccccgggctcacgcgatgcctcacctcaggctcccaagtagttgggaccgcaggcgcacgccatcatgcctggctaatttttgtattttttgtagagacggattttcacctgttgcccaggctggtctcgaacgcctggtgtcaagcgatcagtccacctcgccctcccaaagtgctgggattacaggcgtgacaccgcgcccggtcaacgcggctgcttttcatgcgcgggcagctttacgctgttcttggccttgctatgaagtccttgtgctcattactccaaatatggagcattcctgaaacagcctcctcttctacctccctctccctttggcaaacgccatagtagccaccattcactgtgtagctggtacacaacatatggactctgcttgggctagaatcctgcctcctgtactcaagagcggtgaccttgtgaaacttagttctctctccgtgccttcctttccactctgaggaatgaagataagcacttacttcaagagctatgatgattaaatgggatcactcaagtwagaaccgtgcctacttattagtgatttttttttttttggaacggcgggtcgctctcttgcccaggctggtcttaaactcctg

SEQ ID NO: 39052 - DNA, 787 bp, Homo sapiens
tttcattattgagtccagcaaagaatatcaatataatacagccttcagaattatttctaccatttggtgaaaatagaaaagttaattataaaaaaagaaatcacaaaggggattacaaattcgacttcaaaaggtaaaatttcatgttatttttacccattggataggaaaaaaattatctagtagataatttgctcacaagttaaaccaattatctagtggtttcgaattttctatttgatcccacttcaatagtttgtctctgggaaagattccaattcagtctggagcactgttttttccatgggaaaatatgtaaaagaatattcccatgtattctctaatatactaattaagtgtcaccatttagactataaacttatttcagaatttaattgacttgtggttaaagaagatgaaagtattttgttttaaagaagtatgtcyttcaagcaatttttccaataccagtatctgtacaattagtatcaaaggggttaacttggacttataacccaagcatattttttaatttcctgggattctaaaaattgttacaagcattagcattttggttttaagttttactttcagctaagcaccatgaacaccttgtataagtttctctttttggtgtctgtaatgattgctaacattatgctgattgaaacttgtgtgagagaagtagtaactgctctacactttttggtaggacatttgcatgttagaggatgagtgataaaatggactaaaattcagaggccttctacctcagtgaaatttctag

SEQ ID NO: 39053 - DNA, 787 bp, Homo sapiens
tttcattattgagtccagcaaagaatatcaatataatacagccttcagaattatttctaccatttggtgaaaatagaaaagttaattataaaaaaagaaatcacaaaggggattacaaattcgacttcaaaaggtaaaatttcatgttatttttacccattggataggaaaaaaattatctagtagataatttgctcacaagttaaaccaattatctagtggtttcgaattttctatttgatcccacttcaatagtttgtctctgggaaagattccaattcagtctggagcactgttttttccatgggaaaatatgtaaaagaatattcccatgtattctctaatatactaattaagtgtcaccatttagactataaacttatttcagaatttaattgacttgtggttaaagaagatgaaagtattttgttttaaagaagtatgtctttcaagcaatttttccrataccagtatctgtacaattagtatcaaaggggttaacttggacttataacccaagcatattttttaatttcctgggattctaaaaattgttacaagcattagcattttggttttaagttttactttcagctaagcaccatgaacaccttgtataagtttctctttttggtgtctgtaatgattgctaacattatgctgattgaaacttgtgtgagagaagtagtaactgctctacactttttggtaggacatttgcatgttagaggatgagtgataaaatggactaaaattcagaggccttctacctcagtgaaatttctag

SEQ ID NO: 39054 - DNA, 1060 bp, Homo sapiens
cagcatcaggaatgactgagaggattctggcatgagctactggatgaatgcggggtgatatttactaagactgggacattatagtaggacatagtcgggtagcgatactaggattccatgtgggttatgttaaatttgaggtggtaaatatgtggttgatttataaaatattccccttcccagcagctcctgccatcctcttggggaagtttccatttctatgtcagtgactcaccttcagacttcccagcactttaacctttgcwgtaggtcaatatccactcccatgttcatagataggatctaatctctgaccacaactctaatcattccagctgttttactctatttcccctattatcctatactgtgactgcattaagtcttgcagacatttggtccattagtgccttagtgaagtggtccccttttgactccttccttcactcctctattcccctgtgaaacatcatctcttcactgtccagggtcttatgaatttcttctttggacttctagcactgtatcatggctactggttcatgtctatcatcatgtttcctattagagtcttgtcactgagggcttagattgtgtcctattcatctttctatctctagcaccaatctcagtgcctgaaatataatggctgcccaacagaactttaaaaccctgaattgtgcagataaaatttaccgctttttctttaaactaccctaagtccatcataataattaaaacagacttaacaatgttcaaaaatccagtttaataaactaaaggtggttattttaaaatttaaagccattaaatctactttgtattcatattggaaattctattccaagaagtgacagatttctttttcctgggaaatcaagggaagaaattatttaggtttcttgggctaaagtagtctctgatctagtgagttaccagaattagtgtcagtgcaagttagagatgagcagctggagagtttaagagtgtgaaaggaagatgagaagtgagtaataaagatgtgagaaaagaacaagtcttcattttgtggttctttgtt

SEQ ID NO: 39055 - DNA, 1060 bp, Homo sapiens
cagcatcaggaatgactgagaggattctggcatgagctactggatgaatgcggggtgatatttactaagactgggacattatagtaggacatagtcgggtagcgatactaggattccatgtgggttatgttaaatttgaggtggtaaatatgtggttgatttataaaatattccccttcccagcagctcctgccatcctcttggggaagtttccatttctatgtcagtgactcaccttcagacttcccagcactttaacctttgctgtaggtcaatatccactcccatgttcatagatwggatctaatctctgaccacaactctaatcattccagctgttttactctatttcccctattatcctatactgtgactgcattaagtcttgcagacatttggtccattagtgccttagtgaagtggtccccttttgactccttccttcactcctctattcccctgtgaaacatcatctcttcactgtccagggtcttatgaatttcttctttggacttctagcactgtatcatggctactggttcatgtctatcatcatgtttcctattagagtcttgtcactgagggcttagattgtgtcctattcatctttctatctctagcaccaatctcagtgcctgaaatataatggctgcccaacagaactttaaaaccctgaattgtgcagataaaatttaccgctttttctttaaactaccctaagtccatcataataattaaaacagacttaacaatgttcaaaaatccagtttaataaactaaaggtggttattttaaaatttaaagccattaaatctactttgtattcatattggaaattctattccaagaagtgacagatttctttttcctgggaaatcaagggaagaaattatttaggtttcttgggctaaagtagtctctgatctagtgagttaccagaattagtgtcagtgcaagttagagatgagcagctggagagtttaagagtgtgaaaggaagatgagaagtgagtaataaagatgtgagaaaagaacaagtcttcattttgtggttctttgtt

SEQ ID NO: 39056 - DNA, 556 bp, Homo sapiens
tgattttgctgattctacatgccatagagttctcatttttccagctttgcttttttttcagagccagacctagatatcaagcaattatttcttgttaagacagtataactaggaaataaaaggcctgttaaaataaaaaatagatccccaaatgtatgtgtctgtatgattatgtgtggattaaaaaaagagttgatttgccatgtaccatcctcctatccaccttggatatttgaagtttcatttctgtttttgagtacacacacacacacacacacacacgtacacasacacacatttatatctatagccttacttccaagtatgtgtacatatcatattataatatctatcccctccaataattcagatgagtgtaaacatttagaaactatcagttatatttcctttgttgattttttaaaagaaaaatcaagagggcaaaaattaaacacattagacagagctgtagttgtttgcttgtgaagcaaacgagagcctgggtcacttaagaaatgagttcagtgggtttcccaagctgaaagcagaagtgcta

SEQ ID NO: 39057 - DNA, 556 bp, Homo sapiens
tgattttgctgattctacatgccatagagttctcatttttccagctttgcttttttttcagagccagacctagatatcaagcaattatttcttgttaagacagtataactaggaaataaaaggcctgttaaaataaaaaatagatccccaaatgtatgtgtctgtatgattatgtgtggattaaaaaaagagttgatttgccatgtaccatcctcctatccaccttggatatttgaagtttcatttctgtttttgagtacacacacacacacacacacacacgtacacacacacacatttatatctatagccttacttccaagtatgtgtacatatcatattataatatctatcccctccaataattcagatgagtgtaaacatttagaaactatcagttatatttcctttgttgattttttaaaagaaaaatcaagagggcaaaaattaaacacattaracagagctgtagttgtttgcttgtgaagcaaacgagagcctgggtcacttaagaaatgagttcagtgggtttcccaagctgaaagcagaagtgcta

SEQ ID NO: 39058 - DNA, 2163 bp, Homo sapiens
attctcctgcatcagcctcccaagtagctgggactacaggcacccgccaccacacccagctaattttttgtatttttagtagagatggggtttcaccatgttagccaggatggtctcgatctcctgacctcgtgatctgcccacctcggcctcccaaagtgctgggattacaggcatgagccactgagcctggcagccgtgagtttataatttttattagagttgagatgcttttgaagagatctgcaccagggtaccttgtcctcaaatgcccattgggttgcgtattttcctaaagtttaccaatggtatcagattctacaagtcaagttcagccataccctgggtatctgcagatagtcttgcctctccacacccaggattatgttctcatcattataatagctatcatcacaataataaccatttaatgcctaaaaggcacagacagaatcacatatcggaaccagatctgtcagactataaagaggctggttttcccactttgctaagctgcatcccagaaagccctataacctatattcacacagttcccatggtagattactgtctcagtggttgtcagcaatacttttcttataaaaatgcttcagggaatttgtccatgagaaacaccagctacttcctgagccaagattcctgctctttcagaaaatcattgactgatttgggagggcagctcctgctctttcagattacctaaggaccaatcaacacagacagaatggagatgctttgctaccacttccttaatcctgccctacgtcaggaaggagcctaaatttcaacctcagccgaacttctcaggccatttatttattttatttatttatttatttattgagatagagtcttcttgtcacccaggctgctggagtgtgggggtgtgatctcggctcactgcaaattctacatccccagttcaagtgattctcttgcttcagactcccgagtagctgggattacaggtgcctgccaccatgcctggctaatttttccatttttagtagagacaaggtttctccatgttggccaggctgatcttgaactcctgacctcaagtgatccacctgccttggcctcccaaagtgctgggattacgggcataagccaccgtgcctgcctattcctttaaaaaacaaaaaccaaaaatcccaagtctacgttgccactattggtactctagggtgtatgtttggggaacagtaaagtgtgcaacttcttcctcctgcaaactcactgtcactcttaatccaccccctccccataaacaaaacaaaacaaaacaaaaacaccctggcagcaggaatagagaagaggtagaatcatttcaagattccaagtatactggaggccagaataggtatatcctcaggttactataacaaaataaatgaggtatttcctcaaattaaaaggacaccagagtaacatctaaatgatagcaaatagcagtttcttctttgctacctttttaagtaaactctttatttcatgcatgtacaaggcatacccttggyggctcaggaagctaacatcgtaaatatcttttaactggtgagtatttctatacactaatgggttgaaagaggcttccaacctaggaatgattatattttgactgcttgagggattcaaatgtaatggcacaacaacataacttcaggacacagaatggaagttagaacaagttcaggctctttgcatgcaataaactagctcctagccctttcaatcactaagagacaatctgtcctattatgtggacctagtcaaagggtttaacaaagtaatcatttcctgaagaagaatatctatattatgcctgaaatactggtgtttcagcaatgtttattaaattgaattgaattaaatgtcccttggaaaattgttatttctttcagtctagaaaatttgtctagtgataatctttgctgaaattttccaatttgatattggcgcagagaaatgtatattaagttgaacttgagaactatttatgttggaatagaaagtgccctagtcttggttctagtcgtaatcctgacactgcctgactgtgtgatgataagtaagatgagctacagtttccctatcctgcaaatataggggctgggaccgaataatatctttaagataaaa

SEQ ID NO: 39059 - DNA, 921 bp, Homo sapiens
tatggccgttttccctgtatatagattttaacaattttaaaaggtgtcaatttacttatcttatacaactaaacatatagaagtgaacattagaattttgacccatgaaatttgggaaaatttgaaatttaaatattgattttgaaattctattgtttggaaattaaattttgatttcatatttacatatccaggatcactattagtttgaatgtgacagggtaatgttttattatgaaatgtgtatttcttgcttctgggtcttagtcaactttgctaattgtttcagagaacaacaaatctgtaaaacctgtccctatagtacccattgccttcgtttaactatctattcctagaccacagatatcagtgtcagactctttcatggctataagcatgaattctttaagtatacacccaaaagaaatagaataagatagaaaatgatgaaattaacttccctttacaaatgttttctttgaaaattatcaagtcatataattttttttttttttgagatgaagtctcgctttgttatccaggctggagtgcagtgacatgatctaagctcactgcaatctctgcctcccaggttcaagtgattctcccacctcagcctcccgagtatctgggactacaggctcacaccaccatgcccagctaaattttttgtatgtttagtagagacggagtttcatcttgttggccaggctggtctagaactcctgaccttcaagtgatctgcccgcctctgcctcccaaagtaccaggactacaggcatgagccacygtgccaggccaagtcatacaattttttattcatacccaaggtgcctgtgtgaactagcaagaatgtaaattatccatactttacttcaaggataccatatttcctaattgggaatttacttattcagtctg

SEQ ID NO: 39060 - DNA, 540 bp, Homo sapiens
agcagggttggtttctggtgaggcctctctgctaggcttgcggttggtgccttcccactgtgtcytcatatggccttttctctgtgtgcatgcatgagagagagtgagagatcgtgtgagcatgcacactctggtatatttttctcttcttaaaaggacaccagtcctatcggattagggccccacttttttgacctcattgaaccttaattaccttctttaaagccgtgtctccaaatgcagtcacactggggcttagggcttcaacatatgacttttggggagacacaaatcaggccataacaccatcttttcaaataaatacaaatttctacataactgatttattcaaaatgaaaacaagaccgggtggggttgcttacgcctgtaatcccagcactttgggaggccaaggcaggcagatcacttgagcctagcagtttaagatcagtctagccaacatggtgaaacttcatctctactaaaaatacaaaaattagctgggcatgggggtggatgcctgtagtcccagctacagtg

SEQ ID NO: 39061 - DNA, 666 bp, Homo sapiens
tgcatttgaattgtttccttatgtaaggttgttcccaagaatggtggacaggtacttgacttacatgtctgtgagtaaacaagcaaataaataaacaaatacgctcaccaaagtagtcactttcataatgaaggaggttttactacactgataaattctagctcccatccagmatatcaagttattttggattcctaaaatgtctggtttttcacctttaattaaacagcaacacaagcatatggaaaaaaagttaaacactgatcattagagaaatgcaaatcaaaagcaaaattagatactatttcataccagtcagaatggctattattgaaaagtcaaaaaacaacagatgctggttaagtcatggagaaaaaggaacacttacacaccgttggttggattgtaaatttgtttaatcattgtggaaagcagtgtgtggcaattcctcaaagagctaaaagcagaaataacatttgacccagcaatcccattactgggtatatacctagaggaatataaatcattctattataaaaacacatgcaagtgaatgttcactgcaacactattcacaatagcaaagacatggaatcaatgtaactgcccatcaatgacagaatggatacatatacaccatagaatactacacagccataaaaaaga

SEQ ID NO: 39062 - DNA, 575 bp, Homo sapiens
gcactgctcctttggcctctggtagggcaggttgatctaccttctgacttggagtatttactgtgcactctcgctctctcagtgcagaccaccctcctttcagagattcacatgagtaattcacgccctcacttgattcaggtctgggcttaaatgttatcccacctgtcactatcctctcactctaatttattttgatttatattacttatgtattgtgcatttatttayttattgttttattttcttacctgtcctgcccctttttttgtagagactttgttttgctcatggctatatcctgagcacctactatagtgaccaacacatagttagaactcaacacgcatttcttttcttcttctttttttttttttttaagatgtcactaaaggatatagtaggagctctaggatatggcatgagctcacttccagggactcaaagtccagcactggccatttaacataagccaaaagatttaagcgaacaatctactattacatgatacagataagaaaataaactcaaaattgccttttccattttgacatctgaacataggttagtaataa

SEQ ID NO: 39063 - DNA, 520 bp, Homo sapiens
taactgagaggctgaattgagaggattacttgatcctaggagatattatacttcagagatattataattcagcaacagacagtggtatcctttgggagttgttttgatagtgctatggtctccagaatggagatctgtcccaaagcctatctcatatatgccctcatgtctggaacaaagaggcgaggacagagtccaattgatttaactgtagtacaaagacagttaatttatcattgttttataagaaagccctccttccgctttaaagttttgtaacctggctgaccatacaggaatgataggagaaggacttgattggcatcaggggtgaatcaaggcctcarttcaaaagaggagagaatcgtatattttcaggaaaaaacaaacaaacaaacaaaaaaaacaagggcaagaatgctgccttttgtttcactgtggcaactccagttttcccaaaatatgtttaggcagactcagatagtgccctcaaggtaactgtgctttcttacttacatct

SEQ ID NO: 39064 - DNA, 520 bp, Homo sapiens
taactgagaggctgaattgagaggattacttgatcctaggagatattatacttcagagatattataattcagcaacagacagtggtatcctttgggagttgttttgatagtgctatggtctccagaatggagatctgtcccaaagcctatctcatatatgccctcatgtctggaacaaagaggcgaggacagagtccaattgatttaactgtagtacaaagacagttaatttatcattgttttataagaaagccctccttccgctttaaagttttgtaacctggctgaccatacaggaatgataggagaaggacttgattggcatcaggggtgaatcaaggcctcagttcaaaagaggagagaatcgtatatttkcaggaaaaaacaaacaaacaaacaaaaaaaacaagggcaagaatgctgccttttgtttcactgtggcaactccagttttcccaaaatatgtttaggcagactcagatagtgccctcaaggtaactgtgctttcttacttacatct

SEQ ID NO: 39065 - DNA, 758 bp, Homo sapiens
taactgaccctgtttaatgtcctttaaaagtttttagagtatcagtataagtagtgggtgtatggaaagggtagatatcagtacaaatggatttaaacctaattataagtttttccttttacatcaagcctcargattaatcttcattgtctaatggaaagttttccattatggagtatgttactatttaattacttgcattttatagtatcctgaaaatagaatggaggcttatgggagcacattaaaaatcaaatttaaaatgatgaatttacttttcttactcttttttaatagaaaacattttccaaccacatgaaatgcctgggaatgtattcagaactttgaacataaacaaagctcttaaccaattttcacacagaaaggacttaaagaatgtgatcacagttctgtaacacattaatcagaaatatcctactttattctaacaaaaaaaggagaaaattagacaaaatattttgattctttaaatgaatatcatatatcaagcctttttatattgattttaaaatataaaattagctggtattttaaatgatcacttatacattttcaaagcgaaaaattgggtgtctagataatctgctaaggaagtaacaataaatctctgcaaccaaggcattccttcaaagagaatttttggaaaagatttccttctcttgggaaatgaggagaagtcttaaattttttaataatgaaatcaaagcgaagcataaaatttaagcaacatgttcatg

SEQ ID NO: 39066 - DNA, 546 bp, Homo sapiens
tgcatacagccaggtgatccttttggttgataagcaccaaattgtgagttaaatgtggcaaacatgggaaaactactttagcagccactgtgtcaccaacccacaatcccattttcttgcttccacwtttttcagctcactagtgacctcccatggggcttcagtctatctccattctagaaacaatctgatattaggcaggaagtttcaaggacccccatcctcttccctagtgcctggtagcatcaagcctcagtgctgaacacaagctccaggctgtgttgtcgatggccttgcagctaatctgacccagtgtaaggtgtctgaatagtgactgtagtcagtgtttatatagttgtctatccctttctcagatcttcaaattgtctgtcctggaatggtccattagtaccatgttttccaagctcaatagtctcacttcttctatcctcatgtgcctcagtcaataggatggtactttagactgaatccctattccaagattttatttgaataacatctgagataactgggacttctattcat

SEQ ID NO: 39067 - DNA, 577 bp, Homo sapiens
ataggagagattatttgtccttttacttttcctgttgggggaggatggagaaggaaagcgaggtaattcaaagcccctccaatgttagccatgacaaatgtgaggcaggcaggacatcgtaagtgttacatgaaaggtggtaaggaaaatgcctgcaaaattgaaaactcacctctctatgagtttgtgtggtcacatggatacagcaccagactggacatcaggaaggagtctcttcactacggacttcaggatattcaaatggacctacagggacctcagtgttgataacagaaatcaatggatgcagaatagcttctcacagcatctttgtgagaaaaagtaaaacagatgtaacggattcagaaaaaatgcaaagcacagtgtaaaataagataacataattggggccrggcgcagtggctcacgcctataataccagcactttgggaggttgaggtgggcagatcacgagatcaagagatcgagaccatcctggccaacatggtgaaactccatctctactaaaaatacaaaaattagctgggcagggtggcacacacctgtagtcccagct

SEQ ID NO: 39068 - DNA, 1325 bp, Homo sapiens
ctctccctcccccaacccctttccccgaaaggccctggtgtgtgttgttctcctcccgctttctatgtgttctcattgttcggttcccacttataagtgagaagatgaggtgtttggttttcctgcattagtttgctcaggataatggcttccagctctattcatgtccttgcaaaggtactcagttttgtaaggcatcatgcaaaataattagtaaactcaaaccagaaaaaaagtattattgaatattatcctgaagataaaatatgaatgtttttgtttggaattatttcctaaaagattcttttgtaatatctaatataattttacatttttttggagcatgtaggatatttatattttattactaggtgcttacttgaacttttaaaatgatatattgaagggaataactcatattcttgctaatttgactttctgaaatgtacttttgcattatcctgaaaaaattaaaattatttgtgaaaatcatcatatattgaccaaatactgttaactttttttctgctttactttctcctgtgttataattaaagatttggatttttctggttgtttaagaaaaactatgttgttgtttttaacgaggtgaccatagacgaaaactgattttcatcaatgttttaagtaactgtgcttacatcagggctttaagtaagtggaagtaagtaagtttactgactactgatgttcaactacaatagaatttattatattgttataatgcttaaagttatttttaatttaaaatacaaggaaattatgatgctaaatcttctatccaaaatgagaaacttacctctatatttataatgataaatctgtagccaacatgcagaaaatagaaataagttatatatttgattgttttacttgtttgttttattttgagactataccctccaatttttttttaaatttttctacaaatactttactttttagttatgaaaaacytacacataatcttttgaaaaatatatacaagacatcaaatctaatgtacaaatatagtaattaaaagattagtatatttgttaataatactgtaaattttaataaagtagaagatatatattctatgtactttgctcacaagaaagttggaactatcgttcaaaaagtattaatttctatttactaagaaaatcattgccttgggggaaaatattatttagcagttttatgtgtgaatcttttcaactgtaatcattcaaatgcataactaaatgtgaattctgccttagggttagcacataaccaatttgtttcacaggttatctgattatgagcagattgtccac

SEQ ID NO: 39069 - DNA, 705 bp, Homo sapiens
tatataaatatttccaaatttgagaggaaatattagaagcatttgaggacgtggttttctcacttacactcaaaatattttactgcataatatttcccctaaatatttttaaagcataattctaaaggaaaaaaatctttaaatcataagctctactaacagaaatattttctggtgagcatatttatcatataatttattagcatgacacagaggtgctgtataattagatatgtcaccattattttggatgtaatacatctcacattaattatttaaaatcaaaattagggatttaggccaggattyggtgcctcacacctataatttcaaaactttgggaggcccagtcaggcagatcacttgaggtcaggagtttgagaccagcctagccaacatgatgaaacaccacctttattaaaaatacaaaaattagccgggtgtggtggtgggcaactgtagtcccagctacttgggagactgaggcaggagaatgcttgaacccaggaggcagaggctgcagtgagccgagattgcaccattgcactccagtctgggcaacagagcaagactccatctcaaaaaaaaaaaaaattagagatttagaaattatagatgtcttaataggtaagtagtttaatgttttagaaaaagtaaatatttcagaacttgaaacctggtagtagaacacagactagtgtaaca

SEQ ID NO: 39070 - DNA, 705 bp, Homo sapiens
tatataaatatttccaaatttgagaggaaatattagaagcatttgaggacgtggttttctcacttacactcaaaatattttactgcataatatttcccctaaatatttttaaagcataattctaaaggaaaaaaatctttaaatcataagctctactaacagaaatattttctggtgagcatatttatcatataatttattagcatgacacagaggtgctgtataattagatatgtcaccattattttggatgtaatacatctcacattaattatttaaaatcaaaattagggatttaggccaggatttggkgcctcacacctataatttcaaaactttgggaggcccagtcaggcagatcacttgaggtcaggagtttgagaccagcctagccaacatgatgaaacaccacctttattaaaaatacaaaaattagccgggtgtggtggtgggcaactgtagtcccagctacttgggagactgaggcaggagaatgcttgaacccaggaggcagaggctgcagtgagccgagattgcaccattgcactccagtctgggcaacagagcaagactccatctcaaaaaaaaaaaaaattagagatttagaaattatagatgtcttaataggtaagtagtttaatgttttagaaaaagtaaatatttcagaacttgaaacctggtagtagaacacagactagtgtaaca

SEQ ID NO: 39071 - DNA, 837 bp, Homo sapiens
  misc_feature (1)...(837): n = A,T,C or G
taatcaatgcaggtaaaatgagaacattattgaactatatcatactttaccgttcagaattaacaacaamaaaaaaaacacataaactggtttctgcttctgctgataaggagtttggaagtttccagtctgttctaacaatgagaacaaagctaaaaagactgaaaaatcaactctttttggattcaaaagagaagtaagagcacagggcaaacttctacccccaagattggagagaaagacagtgaatacagggagacatggggtactggggcagagactcaaaagtagaaactgcccagggaatcaatgctggggaagaannnnnnnnnnnnnnnnnnnnnnnnnnnnnnnnnnnnnnnnnnnnnnnnnnnnnnnnnnnnnnnnnnnnnnnnnnnnnnnnnnnnnnnnnnnnnnnnnnnntgtgctgtaacagtatatcctgacagtcaaatggtcagttctctctgtaagtgcagcctggacctcaatgattgtgagcttactagttaaaaattccaggggactcagtcacagggagacctctacattttgtgagttttaccattaggagttcatctaggttttcagagtaaatatcacagaaaaatctcctcatgcttccagcagtgggaggggaaaagaaatcattttgaaatacatcagagcattgtgtgctgcctaaaaaggcctagcttcaagagaaattatttcactagagtataacctcctggggttttatcagagcctaactgtcctaggggaagggaaatacccaactccagccagctgcagccttctacatgggagaaaggaaatacccaactccagttccct

SEQ ID NO: 39072 - DNA, 581 bp, Homo sapiens
tgtcatatagcatgaaacaagttaaatagcagaactgaagttttacctcaaaatagtcataagccaggttcctatttttctaagtaatgaactttccatgtcagacccaccagtttctgatgtgtctcttttaaatttctgagaattccagaagaaattcggaattcctgagaaagtggaataagtaatttttagttttgagcagcagtttcacccaaataaatttcaactgtcagatcctggtgacttgcagcaaaaacgaatacaaactaatgttatagatcataggccattttacaaagaattttgtttcctgtgatgggtcaaattcacagaaagaaaagacyggaaatcaatgcctagagtaagaaatgaagtaaaagtgggctttgtcttaagcatgttgtttgcttccatttcatctttgcatcaatagactttgtttctttctattccattattatagcaataaactttcttcttcttgtccatgttctccagaaatgttccagtcccaaagtttttaatgaaaattccagaagaacctctggttctgatatgggttggctgtatccccaccg

SEQ ID NO: 39073 - DNA, 247 bp, Homo sapiens
tggtcatggggaaaatcagctggacggtcaggtgctcgaggaagcctcgctgaggcagtcgggctgtcttgctaggtgggggtgaaactttcccagcgcagctgaataggatccaacaagagtctggatgtttctgacttgtgactttccagtctaattagtgaaaaattgggctcaggtttctaaggtttcattgccaagaggccttgtcttgacagaaactaaagatggcaaaraaagtctggga

SEQ ID NO: 39074 - DNA, 602 bp, Homo sapiens
acaaaatagacaatcactagctaatctaatcaaaaaggtaagattgtatatgggaaggggataagaggaaagaacacaaatatacaagataaaaaatgacaaagaaaaataaccattgaaacagagaagatttaagtaatgaaaaagtgaataattttgtagaaaaacataatttgtcaaaactgattccaataaagaaaacagaccaagtactatagaagaaatagagaaagtcaactgttacttctcactctcaaaaaaatcagaaggtcaagatgatttcacaggggaattctacagaaacttccaaatccatgtcatcctatttgtataagaacatagaaaaatgatcttccaaacgtttctgacaaaaasaatgaacattaacaacaaaacttgatgtaaaaaatatttttttcctcaaacctaaagactattttcacttacaaatgttgatgcaatagtctaaaataaatattaacactgccaaacagcatattagcaaaataataattcattaggacaaaagagagtttatataagaaaggcaggataaatcaagaattaaaaatctgcaaatatactagacctgtggagaaaag

SEQ ID NO: 39075 - DNA, 948 bp, Homo sapiens
tactttctaaactcttcctttccaaatctccattttgcccttcctccatcccaaattttctttctttctttcttttttcctgaaacagtgtctcactccattgcccaggctagagcgcagtggcgtgatcacggctcaccgcagccttgacctccagggctcaagtgatactcccacctcagcctccctagtagctacgactacaggtgcacaccaccacacccagctagcttttttgtattttttgtagagacagggtttcgccatgttgcccaggctggtctcaaactcctggactcaagcactctgcctgcctcagcctcccaaagtactgggattacaggcattgagtcactgcacccaccccccaaattttcaatagtggacatgaaatcattatttgtatcagttacgctgtgcggcatttggtttagaaatgtatgcgtgaatgaaaaagcctataagacatataatatgagtaataaacaggaaaaaaaagtcagggctacttctatcccaaccaagattgggcactggggaaaaaaaaggtcctggcaaaggaaggttgttaaatatatgaacaaaattcaccaaagggcaagagacaatttgtgggtaaaaataaagtaaaatatcacagttcagtcacttgatggagtgtacctcatattataagtgaaaaccaattttatctacttcctgtttttgagtgcatttatacaggtttaatgtctccaggtttacacaaataacctaaccataaatgtaagcggttagatcattcactttggctcatttccctttttaccaagtaattagacaataagaaatgcttctcaagtgggagaaccttggaatataatgggatattattgaacagagccatttgcatgtgcttgggactccaaaatgtcaagrcagtaacatttatttgtgccatggagaata

SEQ ID NO: 39076 - DNA, 434 bp, Homo sapiens
gctacatattcctataattttattacttattatgacttcagaatttatttttttttttttttgagayggagtctcgctctgtctccaggctggagtgcagtggcgccatctcggctcactgcaacctccgcctcccaggttcaagcaattctcctgcctcagcctcctgagtagctaggattacaggtgcatggcaccacgcccgactcatttttgtatttttagtagagatggggtttcatcatgttggccaggctggtctcaaactcctgacctcaagtgatccgcccacctcggccacccaaagtgctgggattacaggtgggggccactgcgcctggccgacttcagcatttctataacgacaaacactacaagaagggggacacttctttttatagaaatgaataagaaaatgtcactattacctaaaa

SEQ ID NO: 39077 - DNA, 883 bp, Homo sapiens
aaggaaccatatcttatttgtattcatatctccataactagtataatgtatggtcctttgtggatgtcagatcagtgcgtgttggattaatgaatggggatctttgattacttttctcatactcaacagctttgaaatcagtagacaatgaattaaaaaagcaagaagctagggacataaatattaatataggtaatttttattttgtttctctcttatacacacacacacacacacacacacacacactttgttacatcagcccattcctatttgtcaatcctaaactctttcaacattttactaaactttgtaagtttctctctgtgcctctgtatcctacagtataggctctctgttcaatgctgcaggaaccattagtttgttggttaatcagaaaggttaattaaagagaaacattttttgaagttctacatacattccttaaatatctaatagtaacttaaacataaatgttaatctgttcttacataaaccatagacctgctgcattgtctatgactgagtttttgagractttggatacttttgagtatcctggatatactgactacaatacacaactaaattttgatgatttttttccccagatcttttacaattttctcttccatgcctaattcagcagtaaaatttttttgtagcaattaacctttttttcctaaggctacaattttcttttcgtgaaaacaactttttcttttagcatctatatataagtgaactaaaaacattaatcagataacataattaccaaaacaagccaactggcatgcgtgggtttggtaagcacacttgtcaaatgctgggagcagaagtgtgtggctgtaggagacagcagcctcctgacctgcagcgctca

SEQ ID NO: 39078 - DNA, 883 bp, Homo sapiens
aaggaaccatatcttatttgtattcatatctccataactagtataatgtatggtcctttgtggatgtcagatcagtgcgtgttggattaatgaatggggatctttgattacttttctcatactcaacagctttgaaatcagtagacaatgaattaaaaaagcaagaagctagggacataaatattaatataggtaatttttattttgtttctctcttatacacacacacacacacacacacacacacactttgttacatcagcccattcctatttgtcaatcctaaactctttcaacattttactaaactttgtaagtttctctctgtgcctctgtatcctacagtataggctctctgttcaatgctgcaggaaccattagtttgttggttaatcagaaaggttaattaaagagaaacattttttgaagttctacatacattccttaaatatctaatagtaacttaaacataaatgttaatctgttcttacataaaccatagacctgctgcattgtctatgactgagtttttgaggactttggatacttttgagtatcctggatatacygactacaatacacaactaaattttgatgatttttttccccagatcttttacaattttctcttccatgcctaattcagcagtaaaatttttttgtagcaattaacctttttttcctaaggctacaattttcttttcgtgaaaacaactttttcttttagcatctatatataagtgaactaaaaacattaatcagataacataattaccaaaacaagccaactggcatgcgtgggtttggtaagcacacttgtcaaatgctgggagcagaagtgtgtggctgtaggagacagcagcctcctgacctgcagcgctca

SEQ ID NO: 39079 - DNA, 883 bp, Homo sapiens
aaggaaccatatcttatttgtattcatatctccataactagtataatgtatggtcctttgtggatgtcagatcagtgcgtgttggattaatgaatggggatctttgattacttttctcatactcaacagctttgaaatcagtagacaatgaattaaaaaagcaagaagctagggacataaatattaatataggtaatttttattttgtttctctcttatacacacacacacacacacacacacacacactttgttacatcagcccattcctatttgtcaatcctaaactctttcaacattttactaaactttgtaagtttctctctgtgcctctgtatcctacagtataggctctctgttcaatgctgcaggaaccattagtttgttggttaatcagaaaggttaattaaagagaaacattttttgaagttctacatacattccttaaatatctaatagtaacttaaacataaatgttaatctgttcttacataaaccatagacctgctgcattgtctatgactgagtttttgaggactttggatacttttgagtatcctggatatactgactacaatacacawctaaattttgatgatttttttccccagatcttttacaattttctcttccatgcctaattcagcagtaaaatttttttgtagcaattaacctttttttcctaaggctacaattttcttttcgtgaaaacaactttttcttttagcatctatatataagtgaactaaaaacattaatcagataacataattaccaaaacaagccaactggcatgcgtgggtttggtaagcacacttgtcaaatgctgggagcagaagtgtgtggctgtaggagacagcagcctcctgacctgcagcgctca

SEQ ID NO: 39080 - DNA, 1104 bp, Homo sapiens
caatcaaaccatacttcataaataaatctttattagggattgctttayaatgaaaaaaaccaaccaaccaaaacaaaataaagttctagactaatacctaaaaaacaaagatccagaatatataaccttactagttcctcattatgtataagtggaaacaaagacagtcattaatctgatttcttgctaaacttctaaagtgctgaggagaaaatccgtcacagtaatatgctctgagatctgtcaccttgttccttcctgtccagggctaggggactcttcctccatgaagtaccctttcctcacccacaacacatactccatccatcaaagggaaactttcagtgtcaggtcatggaatttgggaaaactggaagatttctgagcagaggagtgacataatgaaagcagtgttttaggaaagaggaggtgggcaggcctgagtgaccacagacacacaaatagggtccgaaggaatgtatctactaactgtccatccttgcttcttactagcacaacaaaatagtgcttggaaacagtaaattgcttacattcctgtagaaagcattaggcttgaatctcaaagtatttggtaactattacaaccctgtaccattcaaatggggaaaacaaactgatttcactgaactaactcagcatattcacatagaataaaggtatcaaatttggccttggagtctttcattgtattctgctttcaagattcaaaaaaatacaaatgaacaaagagaagacaaaagtcttatttaggaactgagggttcatccaccagttttataagctactgactcctttacagttacttacactagattggtaaatgtcctgaaggtggtcagagttgagccaacagaaaggttattccccgactgactctccctggggcacagtctcctggcccctctccatcttcccctaaagtatggaatatctcatgtaatttattaaatacggtactgaaagtgaaaaacagaagggttgtatgggtactcaccatcaacatacacagctgaaagcacactgggcctgggcccaggaaaagatcaaaattcaaagtcggaagtacaatttctaccgaatgca

SEQ ID NO: 39081 - DNA, 1321 bp, Homo sapiens
aaatattataagaaaatagaaaattattagcatcttccctcctataaagagagtagtttggtgaagataccctcttgtgaactaaacttcaacagcaagtaattcttatcagagttcatttcagatacacagcttggtacaggccttcaagctatattttagttgtttaaatgtttcatgcattacatggtaactacaatagtgactgcatatgattggatttactacttaaaagtacaattcaaaatatatttgctgtattcacttttgcttaaaatgagaatggataatttatttgcaactggtggaaaaattcaaattagtttaatgtgaaatatgtttatgtttggtgtaaaatatacattaaaaaattaaacagagaaatttagtgaaaactgagatatttcatgcacatcactgaccataaatgcctttattcaatgataatgcaagaaatagaaaacatactttacaatttgttaaaaaaattttacaaataggtattcttgttgaaygaagaagaaggaaatgtgtcctttttactcacaagaaggttattttagatcataatatttataattaagaaaattacagttccctttgttggctgggaaatcactaaactgtgtaaataagctctaaatttatgagtgtttcacttgcaggtagtgggttttctgcttcccatggttttaatatctggcgacacatttctactttctaaaatgttaaaacattttgcattctttcatgtattttttagtcttgcatctccaatagattatcttagattgctttcattgccaacgtatcaaatattgggatattttattgattttactttatttaggactttttagtattaaaaaagatatttttatgtatcttctatgcttcatatagctcacatcttagacctcagttttagacttgtgatcatgaactatttgcattgattatgaaaaaatgtgtaatgttttaagtgtctgaaatgattgacctacaaagtagtttagaaaatacatgtttaccttaattcagtctgggaaatatgtattataaagtggattcatccaaaatttaaatctagtctcacttgccttgcagtttatattgaaccagtggagccttttggggaaatctgcttttcagtgtttgctatgcatcacttctttaccttctgttctaactgctttgagttctgggactggatctgagcattcttgctgtatgattcttataactcagtgtggatgatggacagccttgacatacagatgatatgaacatttcctatttttgaaaaaatacaattcctgat

SEQ ID NO: 39082 - DNA, 1321 bp, Homo sapiens
aaatattataagaaaatagaaaattattagcatcttccctcctataaagagagtagtttggtgaagataccctcttgtgaactaaacttcaacagcaagtaattcttatcagagttcatttcagatacacagcttggtacaggccttcaagctatattttagttgtttaaatgtttcatgcattacatggtaactacaatagtgactgcatatgattggatttactacttaaaagtacaattcaaaatatatttgctgtattcacttttgcttaaaatgagaatggataatttatttgcaactggtggaaaaattcaaattagtttaatgtgaaatatgtttatgtttggtgtaaaatatacattaaaaaattaaacagagaaatttagtgaaaactgagatatttcatgcacatcactgaccataaatgcctttattcaatgataatgcaagaaatagaaaacatactttacaatttgttaaaaaaattttacaaataggtattcttgttgaacgaagaagaaggaaatgtgtcctttttactcacaagaaggttattttagatcataatatttataattaagaaaattacagttccctttgttggctgggaaatcactaaactgtgtaaataagctctaaatttatgagtgtttcacttgcaggtagtgggttttctgcttcccatggttttaatatctggcgacacatttctactttctaaaatgttaaaacattttgcattctttcatgtattttttagtcttgcatctccaatagattatcttagattgctttcattgccaacgtatcaaatattgggatattttattgattttactttatttaggactttttagtattaaaaaagatatttttatgtatcttctatgcttcatatagctcacatcttagacctcagttttagacttgtgatcatgaactatttgcattgattatgaaaaaatgtgtratgttttaagtgtctgaaatgattgacctacaaagtagtttagaaaatacatgtttaccttaattcagtctgggaaatatgtattataaagtggattcatccaaaatttaaatctagtctcacttgccttgcagtttatattgaaccagtggagccttttggggaaatctgcttttcagtgtttgctatgcatcacttctttaccttctgttctaactgctttgagttctgggactggatctgagcattcttgctgtatgattcttataactcagtgtggatgatggacagccttgacatacagatgatatgaacatttcctatttttgaaaaaatacaattcctgat

SEQ ID NO: 39083 - DNA, 581 bp, Homo sapiens
tgcctaacaatgtgtgggagtaaaattttcttagtttgatttacctcagtgatgttttttttttttcctttgggctgctaagttttgaggttttgacatgtgtgaagtattaaacatccatggtatcttttagacatgcttgtgatgtgttcaacatttgttaagctcggtaatatgatcctgtttctactggggaagagctatagtgatacagatagattgctcagttgtaaagccgcccattttgtgattttagttgagacaaaatagtttcaaatgaaatctcatggcctaaagacacacctatcacatcttaaggatcctgtttattaacaaaccatcttgtaattcttatttggtggggatgtgaggctaaataacagtcctgctatctgcaggctgtctaaccctagaattggaaagtttaagatgcttaaaatgccaccaggaatcttttttttttttttttcctggcatggaactttagggaacatgctcttttattagaggatcttgagccttcattttagagactgaccagacattgaggatgwactttttcttgagtgttaaataaactc

SEQ ID NO: 39084 - DNA, 1275 bp, Homo sapiens
catctcttaaacttttaaaaatgttctggttaacttctgcttgataataatctcttttgagctttagaactcttatttagaaataatgatatgcttcagtttcagatgccttaatgttttgctttggtattgcaaaaacggatttttttggacatcagaagatttcataaagttatctttacttgcttcccagagcaaagatggggacatttctcctcattgcaagctgtttcttttctttccgaattatttggatatttttatacatatagattattttaaggcaattttaattatgccttaagtttttcataccttgaagataagttaaataatagctgtttacgttaaataatagctattctcattattcataaaaattatatattctgtggtttttaacttttgaaaattgttatgtaattgacccgaaagctgccagtgtgaaatggagacagctagtggtacggaagctagttaagagttgcttttctgatttgcttttcaggaataatcttgctagttgatggttttttataattggtagtcccaagtgcttatgttaaataagtgacttattctacccacagagcatcacattaactatcatctttgtggaaagttttcgtaaagagattacgtacctgaaagtacacttcaattgtatgggatacacattttgctttccatatagtattatctataaggtgctgttgcctccctggactaaaatgcctctgtgttgtcagtgtcttttttctcctacctctgcagttaaaatgccttaagcctggcaaattctaatagtagtaacatttgcaaggaataattttgaacatttraacagctatatgatgcttccttttgaagcctttgaaatatggcctttcaaaaagaacttaacatattttagagtttataatgacatttgaagacaacaagtggaaaacagtcacaaggatgctagtccaaagtgtcactaagattggttttaacatattctccaggttttactgtgtgggtgttagcacacttaataggttcatttaggatattaaaattttgaaagaggaattgttgatcttttgaaaaggtattttaaagattttgtgcttaaagccagtctgtatattgatgtgagaaaatagtaagatctttttatataacattttccattagtatcttaacagtatactgagtgcatactatgaaatatgctatgcagttctgtggtgatacgtcacgttgctataggttaaagggccttataatgca

SEQ ID NO: 39085 - DNA, 723 bp, Homo sapiens
cattcaaaaagtcatgaaaagcaatgtatgtttcactgaacactgaagacaatgaaacatgaattacactatacaacacatggtacaatttcttccccaaatgctctttgagcatatcttcctctcctcaaatgtctgcaccaactctctcctctcctaggcatctttatagagttctggcttctccrcgccaggatctctgcctaagctcctccaatcttttctttcctttcagatcatccgtctcctatcagttccagaaatatccatcccatttctatatgcagataatttttggtcttgtaggaggagtctctctgttcttttctacacttttcctctcagtcagcaccacagtttactcatctgtaaaaatgtggattttttttttttttttttgagatggagtctcactctgtcactcaggctggtgtacaatgttgagatctcagctcattgcaacctccacctcccatgttcaagcaattctcctgcctcagcctcgtgagtagctgggattacaggtgcctgccaccacagctggctaatttttgtagttttagaagagacggggtttcatcatgttggtcagactggtctcaaactcctgacctcaggtgatccacccacctcggcctcccaaagtgctgggattacaggcatgagccaccgcgcctggccaaaaatgtggatattaataccagtctctgataggttaactaa

SEQ ID NO: 39086 - DNA, 723 bp, Homo sapiens
cattcaaaaagtcatgaaaagcaatgtatgtttcactgaacactgaagacaatgaaacatgaattacactatacaacacatggtacaatttcttccccaaatgctctttgagcatatcttcctctcctcaaatgtctgcaccaactctctcctctcctaggcatctttatagagttctggcttctccacrccaggatctctgcctaagctcctccaatcttttctttcctttcagatcatccgtctcctatcagttccagaaatatccatcccatttctatatgcagataatttttggtcttgtaggaggagtctctctgttcttttctacacttttcctctcagtcagcaccacagtttactcatctgtaaaaatgtggattttttttttttttttttgagatggagtctcactctgtcactcaggctggtgtacaatgttgagatctcagctcattgcaacctccacctcccatgttcaagcaattctcctgcctcagcctcgtgagtagctgggattacaggtgcctgccaccacagctggctaatttttgtagttttagaagagacggggtttcatcatgttggtcagactggtctcaaactcctgacctcaggtgatccacccacctcggcctcccaaagtgctgggattacaggcatgagccaccgcgcctggccaaaaatgtggatattaataccagtctctgataggttaactaa

SEQ ID NO: 39087 - DNA, 723 bp, Homo sapiens
cattcaaaaagtcatgaaaagcaatgtatgtttcactgaacactgaagacaatgaaacatgaattacactatacaacacatggtacaatttcttccccaaatgctctttgagcatatcttcctctcctcaaatgtctgcaccaactctctcctctcctaggcatctttatagagttctggcttctccacgccaggatctctgcctaagctcctccaatcttttctttcctttcagatcatccgtctcctatcagttccagaaatatccatcccatttctatatgcagataatttttggtcttgtaggaggagtctytctgttcttttctacacttttcctctcagtcagcaccacagtttactcatctgtaaaaatgtggattttttttttttttttttgagatggagtctcactctgtcactcaggctggtgtacaatgttgagatctcagctcattgcaacctccacctcccatgttcaagcaattctcctgcctcagcctcgtgagtagctgggattacaggtgcctgccaccacagctggctaatttttgtagttttagaagagacggggtttcatcatgttggtcagactggtctcaaactcctgacctcaggtgatccacccacctcggcctcccaaagtgctgggattacaggcatgagccaccgcgcctggccaaaaatgtggatattaataccagtctctgataggttaactaa

SEQ ID NO: 39088 - DNA, 723 bp, Homo sapiens
cattcaaaaagtcatgaaaagcaatgtatgtttcactgaacactgaagacaatgaaacatgaattacactatacaacacatggtacaatttcttccccaaatgctctttgagcatatcttcctctcctcaaatgtctgcaccaactctctcctctcctaggcatctttatagagttctggcttctccacgccaggatctctgcctaagctcctccaatcttttctttcctttcagatcatccgtctcctatcagttccagaaatatccatcccatttctatatgcagataatttttggtcttgtaggaggagtctctctgttcttttctacacttttcctctcagtcagcaccacagtttactcatctgtaaaaatgtggattttttttttttttttttgagatggagtctcactctgtcactcaggctggtgtacaatgttgagatctcagctcattgcaacctccacctcccatgttcaagcaattctcctgcctcagcctcstgagtagctgggattacaggtgcctgccaccacagctggctaatttttgtagttttagaagagacggggtttcatcatgttggtcagactggtctcaaactcctgacctcaggtgatccacccacctcggcctcccaaagtgctgggattacaggcatgagccaccgcgcctggccaaaaatgtggatattaataccagtctctgataggttaactaa

SEQ ID NO: 39089 - DNA, 723 bp, Homo sapiens
cattcaaaaagtcatgaaaagcaatgtatgtttcactgaacactgaagacaatgaaacatgaattacactatacaacacatggtacaatttcttccccaaatgctctttgagcatatcttcctctcctcaaatgtctgcaccaactctctcctctcctaggcatctttatagagttctggcttctccacgccaggatctctgcctaagctcctccaatcttttctttcctttcagatcatccgtctcctatcagttccagaaatatccatcccatttctatatgcagataatttttggtcttgtaggaggagtctctctgttcttttctacacttttcctctcagtcagcaccacagtttactcatctgtaaaaatgtggattttttttttttttttttgagatggagtctcactctgtcactcaggctggtgtacaatgttgagatctcagctcattgcaacctccacctcccatgttcaagcaattctcctgcctcagcctcgtgagtagctgggattacaggtgcctgccaccacasctggctaatttttgtagttttagaagagacggggtttcatcatgttggtcagactggtctcaaactcctgacctcaggtgatccacccacctcggcctcccaaagtgctgggattacaggcatgagccaccgcgcctggccaaaaatgtggatattaataccagtctctgataggttaactaa

SEQ ID NO: 39090 - DNA, 805 bp, Homo sapiens
cctcagtccgtggggcggtagggagtgtggactctagatccaagcgctgccactttcctggagagaagcctgggaaagatccccaactactatgcccctctgtgttctaccctgtgaggcagggatcataagaaaagcaacaatcataactgcactttcctcttgaggttaggacagaggaggaaagtactttgaacagtgctgcacacagtaagagctttgctcatggagtggctttactttgctccctcccattcacccacaacttggcttttcaagtcctttgaaacacagtggggagcaggatgctgccttccctgtcctcttccctgctggggagggttcagctctctggtgcctctctgctctgctccaagaagcccagctggctgcaccagtggcctcacagctgtgccctatcttgtgacaaggcccggctcatggagtggggccagcttggccctgtagccagggagaaactggttggctcccaaggagtgctctgctctgaatgggacctggccaagtgggatagtgccctcagaatgccctcagtcacctagctggcctctcaggcaggtgacatgcatgctgacccccaaccccaggcccctcccaccccacagtacccaccaaagcccgcggaggcttttagttagcaaagacagggtggaaaaggggtagtgggggccaggagctcttgggctcaaaccaaagagaaggccagggttayaagggctttaagtgacaggcagtccaagaacttccctgcacccttggggaaactgagaccctgagaagggaa

SEQ ID NO: 39091 - DNA, 805 bp, Homo sapiens
cctcagtccgtggggcggtagggagtgtggactctagatccaagcgctgccactttcctggagagaagcctgggaaagatccccaactactatgcccctctgtgttctaccctgtgaggcagggatcataagaaaagcaacaatcataactgcactttcctcttgaggttaggacagaggaggaaagtactttgaacagtgctgcacacagtaagagctttgctcatggagtggctttactttgctccctcccattcacccacaacttggcttttcaagtcctttgaaacacagtggggagcaggatgctgccttccctgtcctcttccctgctggggagggttcagctctctggtgcctctctgctctgctccaagaagcccagctggctgcaccagtggcctcacagctgtgccctatcttgtgacaaggcccggctcatggagtggggccagcttggccctgtagccagggagaaactggttggctcccaaggagtgctctgctctgaatgggacctggccaagtgggatagtgccctcagaatgccctcagtcacctagctggcctctcaggcaggtgacatgcatgctgacccccaaccccaggcccctcccaccccacagtacccaccaaagcccgcggaggcttttagttagcaaagacagggtggaaaaggggtagtgggggccaggagctcttgggctcaaaccaaagagaaggccagggttataagggctttragtgacaggcagtccaagaacttccctgcacccttggggaaactgagaccctgagaagggaa

SEQ ID NO: 39092 - DNA, 592 bp, Homo sapiens
aaactatcagatcttgtgagaactcactcactctcactctcacaagaacagcatgggggaaaacacccccatgattcaattatcttttaccgggtccctcccacaacacatggggattatgggattacaattcaagataagatttrggtggggacccggagacaaaccatatcaggtgtgtgtgtgtgtgtgtgtgcgtgcgtgtgcacacatgtacatgcacacaagcacacacctgtgcacaataacatccttcagtatttcaaacattcattttctttcagagaagctataaaaatgtactttacttcttctctgagagataactttttctaacatatggatattttttaagatatagtgagcaattattttaatggccgttcccatgaagtaatataaataccacttcattagcttcagaagacattcctatgctcttgcaactataactgaaactgccatattgtagtgctgcatgacatcaatgcaatacgacatgtaatgttacacttggacaagcccagtcctcacagacttggcttctatctaagtcaatacttaacagccatttcacgaaagcagttggtaa

SEQ ID NO: 39093 - DNA, 592 bp, Homo sapiens
aaactatcagatcttgtgagaactcactcactctcactctcacaagaacagcatgggggaaaacacccccatgattcaattatcttttaccgggtccctcccacaacacatggggattatgggattacaattcaagataagatttgggtggggacccrgagacaaaccatatcaggtgtgtgtgtgtgtgtgtgtgcgtgcgtgtgcacacatgtacatgcacacaagcacacacctgtgcacaataacatccttcagtatttcaaacattcattttctttcagagaagctataaaaatgtactttacttcttctctgagagataactttttctaacatatggatattttttaagatatagtgagcaattattttaatggccgttcccatgaagtaatataaataccacttcattagcttcagaagacattcctatgctcttgcaactataactgaaactgccatattgtagtgctgcatgacatcaatgcaatacgacatgtaatgttacacttggacaagcccagtcctcacagacttggcttctatctaagtcaatacttaacagccatttcacgaaagcagttggtaa

SEQ ID NO: 39094 - DNA, 592 bp, Homo sapiens
aaactatcagatcttgtgagaactcactcactctcactctcacaagaacagcatgggggaaaacacccccatgattcaattatcttttaccgggtccctcccacaacacatggggattatgggattacaattcaagataagatttgggtggggacccggagacaaaccatatcaggtgtgtgtgtgtgtgtgtgtgcgtgcgtgtgcacacatgtacatgcacacaagcacacacctgtgcacaataacatccttcagtatttcaaacattcattttctttcagagaagctataaaaatgtactttacttcttctctgagagataactttttctaacatatggatattttttaagatatagtgagcaattattttaatggccgttcccatgaagtaatataaataccacttcattagcttcagaagacattcctatgctcttrcaactataactgaaactgccatattgtagtgctgcatgacatcaatgcaatacgacatgtaatgttacacttggacaagcccagtcctcacagacttggcttctatctaagtcaatacttaacagccatttcacgaaagcagttggtaa

SEQ ID NO: 39095 - DNA, 592 bp, Homo sapiens
aaactatcagatcttgtgagaactcactcactctcactctcacaagaacagcatgggggaaaacacccccatgattcaattatcttttaccgggtccctcccacaacacatggggattatgggattacaattcaagataagatttgggtggggacccggagacaaaccatatcaggtgtgtgtgtgtgtgtgtgtgcgtgcgtgtgcacacatgtacatgcacacaagcacacacctgtgcacaataacatccttcagtatttcaaacattcattttctttcagagaagctataaaaatgtactttacttcttctctgagagataactttttctaacatatggatattttttaagatatagtgagcaattattttaatggccgttcccatgaagtaatataaataccacttcattagcttcagaagacattcctatgctcttgcaactataactgaaactgccatattgtagtgctgcatgacatcaatgcaatacgacatgtaatgttacacttggacaagcccagtcctcacagacttggcttctatctaagtcaatacttaasagccatttcacgaaagcagttggtaa

SEQ ID NO: 39096 - DNA, 827 bp, Homo sapiens
tggatctggtcctccaccatggggtyagcccagatggaatggcttatccctcagctccaggcaataaatagtgacccccgacagccgcttcctactgtgcacatcctgctgggcacgcagcctgaagtcgacaggtggacaaatgagcgttccttgccctggctcctgaccagcacattccggacggctctattcgcagctccggagtgacacggcccagacacacttgcggtccctccctgactcgcaggagccgggggcttcgtgattctgccaatcaactgggaagtgacaccccagacagcagcatcccacggctgttgtgagcagttacaattgagtgatgcccaagcaggaatgattcccaaacagctcccgtactctctgaatgctgagagcctggaagtgtgagtttttaaggagaggaaccgtgtttgaattataagaaaacaaggctcttgaaataattctcttaacctttaaatatgtcaaaggagagttactgaaatttacagtaagttcaccttttcacagacaacaggctaaaaatgtttaagtccaaataatgttgctctttttcataagcttcagtgtaagatttactcaaacacagtggctgtcctcagactcatgtttcttggataactctatttctttgttctgtgttcttttgtaacattgttttaataattcctttgagcccaagccttttatcataagctgcctcagatctttttgaaagtaggcagtgtttaaaatctacggatgactttcgccaggggtactggactagctctcctgccataaacaactataaaattgtacac

SEQ ID NO: 39097 - DNA, 827 bp, Homo sapiens
tggatctggtcctccaccatggggtcagcccagatggaatggcttatccctcagctccaggcaataaatagtgacccccgacagccgcttcctactgtgcacatcctgctgggcacgcagcctgaagtcgacaggtggacaaatgagcgttccttgccctggctcctgaccagcacattccggackgctctattcgcagctccggagtgacacggcccagacacacttgcggtccctccctgactcgcaggagccgggggcttcgtgattctgccaatcaactgggaagtgacaccccagacagcagcatcccacggctgttgtgagcagttacaattgagtgatgcccaagcaggaatgattcccaaacagctcccgtactctctgaatgctgagagcctggaagtgtgagtttttaaggagaggaaccgtgtttgaattataagaaaacaaggctcttgaaataattctcttaacctttaaatatgtcaaaggagagttactgaaatttacagtaagttcaccttttcacagacaacaggctaaaaatgtttaagtccaaataatgttgctctttttcataagcttcagtgtaagatttactcaaacacagtggctgtcctcagactcatgtttcttggataactctatttctttgttctgtgttcttttgtaacattgttttaataattcctttgagcccaagccttttatcataagctgcctcagatctttttgaaagtaggcagtgtttaaaatctacggatgactttcgccaggggtactggactagctctcctgccataaacaactataaaattgtacac

SEQ ID NO: 39098 - DNA, 827 bp, Homo sapiens
tggatctggtcctccaccatggggtcagcccagatggaatggcttatccctcagctccaggcaataaatagtgacccccgacagccgcttcctactgtgcacatcctgctgggcacgcagcctgaagtcgacaggtggacaaatgagcgttccttgccctggctcctgaccagcacattccggacggctctattcgcagctccggagtgacacggcccagacacacttgcggtccctccctgactcrcaggagccgggggcttcgtgattctgccaatcaactgggaagtgacaccccagacagcagcatcccacggctgttgtgagcagttacaattgagtgatgcccaagcaggaatgattcccaaacagctcccgtactctctgaatgctgagagcctggaagtgtgagtttttaaggagaggaaccgtgtttgaattataagaaaacaaggctcttgaaataattctcttaacctttaaatatgtcaaaggagagttactgaaatttacagtaagttcaccttttcacagacaacaggctaaaaatgtttaagtccaaataatgttgctctttttcataagcttcagtgtaagatttactcaaacacagtggctgtcctcagactcatgtttcttggataactctatttctttgttctgtgttcttttgtaacattgttttaataattcctttgagcccaagccttttatcataagctgcctcagatctttttgaaagtaggcagtgtttaaaatctacggatgactttcgccaggggtactggactagctctcctgccataaacaactataaaattgtacac

SEQ ID NO: 39099 - DNA, 827 bp, Homo sapiens
tggatctggtcctccaccatggggtcagcccagatggaatggcttatccctcagctccaggcaataaatagtgacccccgacagccgcttcctactgtgcacatcctgctgggcacgcagcctgaagtcgacaggtggacaaatgagcgttccttgccctggctcctgaccagcacattccggacggctctattcgcagctccggagtgacacggcccagacacacttgcggtccctccctgactcgcaggagccgggggcttcgtgattctgccaatcaactgggaagtgacaccccagacagcagcatcccacggctgttgtgagcagttacaattgagtgatgcccaagcaggaatgattcccaaacagctcccgtactctctgaatgctgagagcctggaagtgtgagtttttaaggagaggaaccgtgtttgarttataagaaaacaaggctcttgaaataattctcttaacctttaaatatgtcaaaggagagttactgaaatttacagtaagttcaccttttcacagacaacaggctaaaaatgtttaagtccaaataatgttgctctttttcataagcttcagtgtaagatttactcaaacacagtggctgtcctcagactcatgtttcttggataactctatttctttgttctgtgttcttttgtaacattgttttaataattcctttgagcccaagccttttatcataagctgcctcagatctttttgaaagtaggcagtgtttaaaatctacggatgactttcgccaggggtactggactagctctcctgccataaacaactataaaattgtacac

SEQ ID NO: 39100 - DNA, 2120 bp, Homo sapiens
tgcatgaggtgaccttggtagaaagacgtgcaccctaccaaattgaactttgaacttcattaaatgcacgttttattttagttggtaaatgcacaaataatgggctgctggtgagacaacggcattgagtagcagcaagaacatgagctctgaaattaaacaggcctggattcaaattcacactacttcactttcaagctgtgaagtcttgttactaaactcagagtttctatttttctcttggaaactgaaataaaatgaatgtgttgtctcttatgatgtcaagggcccctcaaattctaataatccaagattatattaattgtgctaatgtaagcagcaaatatttaacaatcgttcaaataatttctgagtcttccctgtatttcaggccccatgctgaaagctggggcaarcagaataagaaagaaaaccttgctcctgtcctcaaatagatgatgaccagcatgggcctttaattgaggtaatgagcacacaaaggctaagagacaacaagtgtcttagtagcaagtgccaggaggctggtcggagaaggagggaggagagagtcacaccttgagaaaggagtaaaaataaaatggttagagagaagagagaaagggcagctcaggcatggcggggggcagggacgggggcacagaggagcaacaattctatctcgaacgtgtgtgctgggggctttgtgttagaaaactgagacacacagtctgatacatttttgtgccatttctggacacaagaagcagactgtaaggtatcagttggttttctataacttcctgattgacagatccaatagccactacttaaatccctttgccctttgacttccataaagcactttaacatccctaagcaacctactttgtggaattcagacctcttggtccaccgagagtcaggtggcctcctgagccactcgcctcttcctctcagtcttttctgcttcctccccttcctctgcctagcctggactgtacaaggttcccatgaggtctgttctagttctgttatctttctccttctacctatctttccctagaaagctcttccactctcaccacttcaacttctacctcaaggccaatgacccctgaatgaatacatctactgcaggccagctccctcgagcctcagatccctatggatgggatatctctacctggtgtcccatatgctcctcacgcctagagtgcccaaagctaaatatgaccccaaccccccgcctgcttttcttcctgtgttccttccagtgtttccccatgctctgtgtccacaccaagctgaagcacaaagcataggctccttctgctgccttcaaggcatgttatccaagagaataccctgataaggaaaataccctaaaaagctttatcctcttattaggttttttgtttgtttgtttctgctgtctgcagcattcaaggggccccaaaatacatccacgcctcactcctttctgcctcaaaccctcactcgtccatttctactggtctctgaaccagtagaatgtttgcaaattaaacaaagcatttcaccgggtgtgcaagaggaccccctagtggtaaagaggatcacagcctactttccatttctctccttcccatcatacctgggagtctccacctttctgagtctcattctgtgcacatttaaattgcagacagtcctcaaatatctgtggagttaatgagaaagcgtaaagtgaatttgaaaactgcaatttttaagtatgcatataagagaacttgtagaaaaagcacttttaagaagcaggtcaactgggaaattgccttgttactataaggtgcactaaatcatcactggctaaatagtgcactagatagaaaaatgtagatttatcagagcacctctcgggaaaagtactgtgtgtggttgggcgcttttataacctcgttggagagaaagagtaagacccttcaagggacgtgtcgtagcgaccacaaatggtcactatcaccaccttctttaaatctatgttaggagtgaagagtgacactagcatgttctgttttctgggttctagtaaggtgctatggcaggatagtattatttaattaaattaaatgtattataaa

SEQ ID NO: 39101 - DNA, 930 bp, Homo sapiens
tgctaagcagttatagattctaaagagtaaatatttcctagcactttgagagaccaaggcaggaagatcatctgagcccaggagttcaagaccagcctaggcaacatggtgagaccccatcactaccttaaaaaatttatctctatataggccgggcacggtggctcatgcctgtaatcccagcactttgggaggccaaggggtgcggatcacaaggtcagaagatcaagaccatcctgtcttaacatggtgaaacccygtctctactaaaaaaaaaaaaaaaaaaatacgaaaaattagccaggcatgtggcacacacctgtagtcccagctacttgagaggctgaggcaggagaatcgcttgaacctgggaggtgaaggttgcagtgagcacaccactgcagcccagcctggacaacagagtgagagtctgtctcaaaaaaataaaaaataaaaaaatatatatatacacacacatatacacatatattttttttagccaggtgtggtggtgaatgcctgtagtcctagctgcttgggaggctgagatgggatgattgcttgagccctgggaggtcaaggctgcagtgagacgtgatcatgccactgcactccagcctggatgaaagagcaatgccctgtcttgaaaaaaaaattagaaaaataaaaagtgaatactcactctgccacttacaagttttgtgacttcatctctccaagttgcttctctaaatattcttatctttacctggaaaatgggaatgacagaagtcctacataacctcattagtttgttgcaaggatagaatgacctaatacatgtagcttacatataacagagcctggcatgtgactattatttactaatgcctaccagtatgagtatacctcagtcagtaagcaatacttattgagtgcctattgagattc

SEQ ID NO: 39102 - DNA, 615 bp, Homo sapiens
gcagaaagaaaattgactcaaaaggccttttaattcattattataattaatwactttgtgttacagagaaaagtatcaattcaagtacatataaaataaaattttaaaattttattttttaggaacaggcttatgagatattttccttataacgttcttcctactgtgttaccactaattaccataacaaggtagaaaaaagagagaaggtgaaataaataagtaaatgatgcttcacaaaaccatgacataggtaggtaggcaaaatatttgatatttgtataaactttaattttataacctttgggagttttgttctctgtgaatattcaaggctggaaaaatcacatcttaaatagttccccagcccaagaccctacttcctcttgatcttcacacctcccccataagtccccatagctacatttcctaccccatggcctaaccctccgagccttagctcactggaccaggaatgggcacttcaccaggactaacccaatccatctttcggagactcgcccttgcacctgaaacacactgatttgtttactgactgcttgagttaaggatgtataatcccagacctctgggatagtcatgtttagccaactg

SEQ ID NO: 39103 - DNA, 570 bp, Homo sapiens
tgccatcatctcatctgctgaactcccctttccccttctctgaagtccctcttgcatttcttatttgtttcaggcatccaaatttaaaactcaaaactcatccttcactacttctctctggcattttgtaggcaggcaggtactaagttctgtgtattctctgtctaaaatgtatctagcatcaaacctcttatttcttgccagatgttatcctaagcagctctccacccacaccccctgagctgccactgctttcataattcattctcatcatactcagtggccacttctttaaacccctttattaattttccaactctttgctttatgtcttgaaaagttctaattataaaataaactgcatttatgaagtagcatggtatwttgttagtttatctatgttttctaaatccaagatctataatgtgtaactacaataaaactcttgattgacatgcaataatcagcataactatgtcaaatgcaatgctcttttaacctcctgtcctatccttcctttatcaactaggcattttgggacactgttctaatccacttaggtgaaatacc

SEQ ID NO: 39104 - DNA, 555 bp, Homo sapiens
tgtggcattcattaattagcagtctgcatcacctcttcccttttaaagagctatattcattatytgaatatgaattatacataggataacattttaaccttgtaaaaattgccaataaaaatagttaatcacagtatattctactgaaccatctactgttgcttttatgcagagaagtttagaaaatattaagttacgaagttgtaaagcagacttttgttgatttttttttttaaaggaatttctttgtaaaaccttaaaacttaattcactttccagtgtatcagaagttgttgatgactgttacgggtgcagtgcaggaaaacaaaaggagcatgagaaataatgccagcatgttagggggtttgcagtttatttccttgctactcagtatgtggtcctcatcccccaacccctgaccccaatagcatctgcataatcaggtaactggatagaattgcagaatctcagtctcccctcaactgccccacaacaactgcatcctaacaagatttgtatgcaccttaaagtttgagaagcattgggctgcttggg

SEQ ID NO: 39105 - DNA, 556 bp, Homo sapiens
acaaatggacatagaggtggcagtaacagaaactggggacaactagaggggaaactactaaaggaggagatggaaagggttgaaaaactattaggtatcatgctcacaccttggtgacaggatcagttgtaccccaaacctcagcatcatgcagtatatgcatgtaacagacttggacgtgcacccactgaacctaaaataaaagttgaaattatacaccatatatgtaaatacatagatatgtatacatatatgtatgcatgtgtgtatatatgtatamagatatgtatgtacatgtatatgtgtatgtatagataagtgtgtacttaattccagagggtggctgaaagggaagaaggaaataaaaaattatatatggaagaggccttcctttctctcttttgacgttgacaaaatataaaataatagccttgtctaaatgccattagaattggtcacactttgtcatatttgatgagttgaggtcattgttttctcccatccttgatcctgacctcttcccccaacccttccccaccaccctacaattatcatc

SEQ ID NO: 39106 - DNA, 635 bp, Homo sapiens
tgcatctccagagaccatgaagactgctcaagccctacataggatgtggatccaggctgttaaaaagttgaggagatggaaaggccgtgtgagtccctctgcaagctctccccttgttttccccaacctttcttcatgggaaggggagggaagcaaaaccattctcacagtgagtcctttatcctcagattgatttgtgcttctggcatctttcagcaacaaattgtgagattgtaggttgtagtcactggtgggtttttaaaaatacttgtattaattttagcagatctatgtgaaactgatagcctcttactggatctgtggatcaaaggctgctgttttccatgtgctaggaatctgtaatggttttgcttcctgggtagagcttaacatactggcttttgtgtttgttcatgtttgagaatttcttgttttgggataaaactttttgctttcttacactgcagaaatctatattcttattatgtctaggcttctaacttagaagaaaaagtgttyttcacatgttcttttttcctcttacagtttgaacatgtgtgagtgtttactttgatggcttgagacttttatgaagcatgtcccttacgtggacagcttgcgattatctttgtttt

SEQ ID NO: 39107 - DNA, 1249 bp, Homo sapiens
gtaaccttttaagacaggcttctatggttcatcataatatttttgaggttcaaaagccattatttcgattattgctatcctctgaactcctctggctaatatcccagcattattagcttacttttggggagtgaaggtacttttaaraaaacaagttaatggttaaaatgctctttctggacaaatggagcctctttctgtgcatgtttaagtgtcagacaccttagggtaagtgggaaagaaagctatccctgggtcactgaagccccacagtggcacaagtgacagggcgggatgtgcctgccttgctagtgggaagacccaaaggaacagattagggctgaattgtcccttacccacagctacagtttatgaggctggagagcaaataccaacatttagggagcagaatgctgaagaccagcatgaagaactgtgtccacatttctccatgtcactgggccttaggcaggtgttgagcattgaggtaacaggcaaaggggtcgacaaacaatgcctcacactaggagcaggagagagaaactccagggatggcagcccaaagcccttgcccagggagaagctccttttaaaagaaagtcatcaacctgacaaaccagtcataggtcctttcctgtaatatgcacttattgagtgcctggctaccagggtcatgaaaattaacaaaatgaggtcctaggaatgtcagtgtcatgaggaacaaataagtgaatccgcataaagggcttagaccagggtctggcatatagtactcaatgagcattagctgttattattactgttatcatggtggcttgattgatggattattttctgattattaattgtagtagtagcagtagcagtaagatagggaaatagatgggtagatagatacatgcacagatagacagataaataaatatcaattcagtcctttggggatgggggattctgtcagttgctgtgtagatcttgtgttaggccattcttgcattgctacaaagaaatatctgagactgggtaatttataaagaaaagaggtttaattagctcccagttctgcaggctgtacaagcatggcaccagcatctgcttagcttctggtgaggcctcagggagcttttactcatggcaaaagatgaattgagagcaagagcatcgcatggctagagcaggaggaaggaatagagagtagggaaaagtgacacacacctttaaagagccagatcattgggcgcggtggctc

SEQ ID NO: 39108 - DNA, 1249 bp, Homo sapiens
gtaaccttttaagacaggcttctatggttcatcataatatttttgaggttcaaaagccattatttcgattattgctatcctctgaactcctctggctaatatcccagcattattagcttacttttggggagtgaaggtacttttaaaaaaacaagttaatggttaaaatgctctttctggacaaatggagcctctttctgtgcatgtttaagtgtcagacaccttagggtaagtgggaaagaaagctatccctgggtcactgaagccccacagtggcacaagtgacagggcgggatgtgcctgccttgctagtgggaagacccaaaggaacagattagggctgaattgtcccttacccacagctacagtttatgaggctggagagcaaataccaacatttagggagcagaatgctgaagaccagcatgaagaactgtgtccacatttctccatgtcactgggccttaggcaggtgttgagcattgaggtaacaggcaaaggggtcgacaaacaatgcctcacactaggagcaggagagagaaactccagggayggcagcccaaagcccttgcccagggagaagctccttttaaaagaaagtcatcaacctgacaaaccagtcataggtcctttcctgtaatatgcacttattgagtgcctggctaccagggtcatgaaaattaacaaaatgaggtcctaggaatgtcagtgtcatgaggaacaaataagtgaatccgcataaagggcttagaccagggtctggcatatagtactcaatgagcattagctgttattattactgttatcatggtggcttgattgatggattattttctgattattaattgtagtagtagcagtagcagtaagatagggaaatagatgggtagatagatacatgcacagatagacagataaataaatatcaattcagtcctttggggatgggggattctgtcagttgctgtgtagatcttgtgttaggccattcttgcattgctacaaagaaatatctgagactgggtaatttataaagaaaagaggtttaattagctcccagttctgcaggctgtacaagcatggcaccagcatctgcttagcttctggtgaggcctcagggagcttttactcatggcaaaagatgaattgagagcaagagcatcgcatggctagagcaggaggaaggaatagagagtagggaaaagtgacacacacctttaaagagccagatcattgggcgcggtggctc

SEQ ID NO: 39109 - DNA, 1249 bp, Homo sapiens
gtaaccttttaagacaggcttctatggttcatcataatatttttgaggttcaaaagccattatttcgattattgctatcctctgaactcctctggctaatatcccagcattattagcttacttttggggagtgaaggtacttttaaaaaaacaagttaatggttaaaatgctctttctggacaaatggagcctctttctgtgcatgtttaagtgtcagacaccttagggtaagtgggaaagaaagctatccctgggtcactgaagccccacagtggcacaagtgacagggcgggatgtgcctgccttgctagtgggaagacccaaaggaacagattagggctgaattgtcccttacccacagctacagtttatgaggctggagagcaaataccaacatttagggagcagaatgctgaagaccagcatgaagaactgtgtccacatttctccatgtcactgggccttaggcaggtgttgagcattgaggtaacaggcaaaggggtcgacaaacaatgcctcacactaggagcaggagagagaaactccagggatggcagcccaaagcccttgcccagggagaagctccttttaaaagaaagtcatcaacctgacaaaccagtcataggtcctttcctgtaatatgcacttattgagtgcctggctaccagggtcatgaaaattaacaaaatgaggtcctaggaatgtcagtgtcatgaggaacaaataagtgaatccgcataaagggcttagaccagggtctggcatatagtactcaatgagcrttagctgttattattactgttatcatggtggcttgattgatggattattttctgattattaattgtagtagtagcagtagcagtaagatagggaaatagatgggtagatagatacatgcacagatagacagataaataaatatcaattcagtcctttggggatgggggattctgtcagttgctgtgtagatcttgtgttaggccattcttgcattgctacaaagaaatatctgagactgggtaatttataaagaaaagaggtttaattagctcccagttctgcaggctgtacaagcatggcaccagcatctgcttagcttctggtgaggcctcagggagcttttactcatggcaaaagatgaattgagagcaagagcatcgcatggctagagcaggaggaaggaatagagagtagggaaaagtgacacacacctttaaagagccagatcattgggcgcggtggctc

SEQ ID NO: 39110 - DNA, 2354 bp, Homo sapiens
  misc_feature (1)...(2354): n = A,T,C or G
catggtggggccttttaactcagccttggaaggcctcctggaggaggtgacatttaaggtaatacttaaagcaagagagaacagcactaatgaatccagttggaagcacttccgaaaaacaaaactggtcatattgaaagaggaagtggggctgggcgcrgtgactcacacctgtaatcccaagactttggaaggccgaggcgggcagatcacctgaggtcaggagttcgagactagcctggccaacatggcaaaaccctgtctctactaaaagatacaaaaattagctgagcatggtggcaggtgcctgtaatcccagctactcaggaggctgaggcaggagaatcgcttgaacctgggaggcagaggttgcagtgagccgagattgcaccattgcactccagcctgggcaacagagcaagcctctgtctcaagaaaagaaagagagaaaaaagaaagaaagaaagaaagaaagaaagaaagaaagaannnnnnnnnnnnnnnnnnnnnnnnnnnnnnnnnnnnnnnnnnnnnnnnnnnnnnnnnnnnnnnnnnnnnnnnnnnnnnnnnnnnnnnnnnnnnnnnnnnngaagaggaaggaggaggaaagaaagaagaaagaagaaagaagaaagaaagaagaaagaagaaagaacaaagaaagaaagaaagaaagaaagagggaaagaacaagaaagagtctgtaaagcctgggtttccttctggaagagaagcaccccctccccagcctacggctcttctactggatgctaacttctatttgacttcattgttaaagggtagcccagcagttgcagtgagaggaaggacgctgaggcttcacccccactcttctcttccttttctttaggttgtctctcccaaccttgctcgtctctggttcttccttcgttgtgttagcatttccccatcaactctgaacaactgttggggctatggagtcagcaagacacattcctaccctattcaatgtctggtgccaaataaccactcaatacatgcatgcaaatccacatgattaataatgttccctagaaaagacttggaaccaacccaaatgcccatcaatggtagactggataaagaaaatgtggcacatatacaccacggaatactatgcagccataaaaaaggatgagttcatgtcctttgcaggaacatggatgaagctggaaaccatcattctcagcaaactaacaggggaacagaaaaccaaacaccgcacgttctcactcataagtgggagttgaacaatgagaacatatgggcacagggaggggaacatcacacgctggggcctgtcggggggttggggagcaaggggagggatagcattagcataaatacctaatgtatatgatgggttcgtcggtgcagcaaaataccatggcacatgtatacctgtgtaacaaacctgcacgttctgcacatgtatcccagaacttaaagtataataataataataataataataataataataataataatgttccctctcagcagagacagaatttctaatggaatcatctgcaactttcaggccccttcctgaagaaacaggatgacggaagaactgggccaaaaggcacatacaagtctcaagggtcctcttcacagggctccccagaggtttgcaatccttgcgctgcctgtggaatgtcaacatgttgagtgcgtaagccctcccttaggacacttggaatgtaaccctactgggcaagttagggacacaatctttattctcggatctttgccagtacccagccctctctatggccctcttgttcacacgttgctggagctgtaggtgggaggctctttgaacacatcttagaaagaggcagacttggtccctgcctttatggagctctgttcttcaagtttgtcagaagattcactatttaagcttaacaactctgttgtgagggagtgttttaacctactgggtgtccactttttacttaggatccttctttgaccttcctttttcttggagtttctctcagggatggtggaaggaagctagaccaaacatctacccttgtttgtcacagtagagccagccattgttcctttccaacaccgtcgcccttgctctatttcaaataatcattatccagagtcttggaagcaccgtggggcattcccttaggaatgtggaaatgtggaagatagtattttccaaaattggttacagccatatttccagtcccacatccttccagaaccttacctctctccatcaagacacagattatgtttcctctcctcttcaacctgggtgggactttgtgactgcttcagtgaatgtaaggtagtggaaataacga

SEQ ID NO: 39111 - DNA, 2354 bp, Homo sapiens
  misc_feature (1)...(2354): n = A,T,C or G
catggtggggccttttaactcagccttggaaggcctcctggaggaggtgacatttaaggtaatacttaaagcaagagagaacagcactaatgaatccagttggaagcacttccgaaaaacaaaactggtcatattgaaagaggaagtggggctgggcgcagtgactcacacctgtaatcccaagactttggaaggccgaggcgggcagatcacctgaggtcaggagttcgagactagcctggccaacatggcaaaaccctgtctctactaaaagatacaaaaattagctgagcatggtggcaggtgcctgtaatcccagctactcaggaggctgaggcaggagaatcgcttgaacctgggaggcagaggttgcagtgagccgagattgcaccattgcactccagcctgggcaacagagcaagcctctgtctcaagaaaagaaagagagaaaaaagaaagaaagaaagaaagaaagaaagaaagaaagaannnnnnnnnnnnnnnnnnnnnnnnnnnnnnnnnnnnnnnnnnnnnnnnnnnnnnnnnnnnnnnnnnnnnnnnnnnnnnnnnnnnnnnnnnnnnnnnnnnngaagaggaaggaggaggaaagaaagaagaaagaagaaagaagaaagaaagaagaaagaagaaagaacaaagaaagaaagaaagaaagaaagagggaaagaacaagaaagagtctgtaaagcctgggtttccttctggaagagaagcaccccctccccagcctacggctcttctactggatgctaacttctatttgacttcattgttaaagggtagcccagcagttgcagtgagaggaaggacgctgaggcttcacccccactcttctcttccttttctttaggttgtctctcccaaccttgctcgtctctggttcttccttcgttgtgttagcatttccccatcaactctgaacaactgttggggctatggagtcagcaagacacattcctaccctattcaatgtctggtgccaaataaccactcaatacatgcatgcaaatccacatgattaataatgttccctagaaaagacttggaaccaacccaaatgcccatcaatggtagactggataaagaaaatgtggcacatatacaccacggaatactatgcagccataaaaaaggatgagttcatgtcctttgcaggaacatggatgaagctggaaaccatcattctcagcaaactaacaggggaacagaaaaccaaacaccgcacgttctcactcataagtgggagttgaacaatgagaacatatgggcacagggaggggaacatcacacgctggggcctgtcggggggttggggagcaaggggagggatagcattagcataaatacctaatgtatatgatgggttcgtcggtgcagcaaaataccatggcacatgtatacctgtgtaacaaacctgcacgttctgcacatgtatcccagaacttaaagtataataataataataataataataataataataataataatgttccctctcagcagagacagaatttctaatggaatcatctgcaactttcaggccccttcctgaagaaacaggatgacggaagaactgggccaaaaggcacatacaagtctcaagggtcctcttcacagggctccccagaggtttgcaatccttgcgctgcctgtggaatgtcaacatgttgagtgcgtaagccctcccttaggacacttggaatgtaaccctactgggcaagttagggacacaatctttattctcggatctttgccagtacccagccctctctatggccctcttgttcacacgttgctggagctgtaggtgggaggctytttgaacacatcttagaaagaggcagacttggtccctgcctttatggagctctgttcttcaagtttgtcagaagattcactatttaagcttaacaactctgttgtgagggagtgttttaacctactgggtgtccactttttacttaggatccttctttgaccttcctttttcttggagtttctctcagggatggtggaaggaagctagaccaaacatctacccttgtttgtcacagtagagccagccattgttcctttccaacaccgtcgcccttgctctatttcaaataatcattatccagagtcttggaagcaccgtggggcattcccttaggaatgtggaaatgtggaagatagtattttccaaaattggttacagccatatttccagtcccacatccttccagaaccttacctctctccatcaagacacagattatgtttcctctcctcttcaacctgggtgggactttgtgactgcttcagtgaatgtaaggtagtggaaataacga

SEQ ID NO: 39112 - DNA, 611 bp, Homo sapiens
attcttgtcaacattgttgttatcatcatctttcatgtgaccaaatgatgctaactcctgcgaagtgtagctacaaacaacttcagaatactctgctgtttttgttcatttatggccatctcgccttgggttcattgaagcagaggccaagacaaggatcttcatacaggttagcctatgtgagaggtgatccgaggaagtcagagggaggaaggagcatgagatcctgaagaaggggaaaccagtactgtctaagggtgcatttttgaggttgctattctgggccttggagcttgagcccaagggacttcttgagaaacacgtggatattctcctctgtaggagaytattggctgacattctttgggcgcttattgtgttagatatgctccaaacattcatttaatcatcacaacaacaccaagagtggggtttaaataacccccatttcacagatgagaaagctgaggttcgaaaagcttacactgtccaaagctgcagagtgaggcagtgagggagccccatcctctaacttcaagataatttgctgctttacaatagcgcctactgcgcaaagggggcagagaacttcactgatttttcttagaagc

SEQ ID NO: 39113 - DNA, 551 bp, Homo sapiens
ctttccctacaaaagaagcgaaccagtttcccagtaaacatcccaccccataactatttttgaggcattcataggcttaagaccartgaatttttacatcacccccgggggaattgcatttgcaatgacttctgcctacatttaacttttgatctagttctttgtacactgacaaaagttcacagccaaccatttctcttcaggacaagtgtgagaactttctgcatactgctgaaggcaagggagattttgagtttagcaaggttttctctccttaagaaggttatctttttacgagacacaagttattgaaactaggcggggccactttagtcctgtgtacaataatatgtgtagtaatataaatagtaatttaaaaagtcatgcagacttggttggggagaggcatgaagtttgggtgtggtgggggcggggtgaagcggtagaagggttcgcaatcactgctgaaactttcaacatattctaccaacaatatgagccaccagggaattccttgcctcatctctagaacgaatcccattaagcagttg

SEQ ID NO: 39114 - DNA, 918 bp, Homo sapiens
ttctaactgcattgaaaaatttgctgttaaatatactcgtacctcttgggtattagatccttcaccaggagtcagtattcattttggtgttcacccactcatctccctattttttatttatttatttatttatttaatttttttatttctttttgagacggagtcttgctctgttgcccaggctggagtgcagtggcgcgatttcggctcactgcaagctccacctcccgggttcgagccattctcctgcctcagcctcccgagtagctgggactacaggtgcctgccaccacacctggctaattttttgtatttttagtagagatggggtttaaccatgttagtcagtatggtcttgatctcctgacctcgtgatccacccgcctcggcctcccaaagtgctgggattacaggcgcgagccatcgcgcccggcctcatctccctattttttaaacttatgaaatgtttggtaccataaaagaattaaatatctaaatcatggagcataataattaaacaaatgccatgagcccattacacatatctgcagaccatcaccaagacaaaacacgaaggaaatttgtgtacctcccaccatactctgcctctgcccaggtcacctcatcctgaatgttatgtttttcatttccttgctttttctttatatttccactgcatgcgtgcgtacacacacacacgcccctaaacaatagattaattttgttggcaattttttactatagtgaaaaacgcataccaaaatttactgtctgtaccatttgtraatgtacagttcagtagtgttaagtatattcaagttgttgtaaaacattgttttttgagctatataaaaatggtatcacactctacaaatccttctggggtgtttttttgctcaactttatgtttgagatgca

SEQ ID NO: 39115 - DNA, 550 bp, Homo sapiens
tgaccgttgttataatccactgcagccagggagtaatatcccaattacatgttctattgtttcacttgtgatatragagcgatgcaaattgttgatgataattacgttgattttcagcagtttgcaaattagtaaattagtacatttagaaatataaatatacccaaaggctaatatgtgtgttgggactagttaacaagtatttattgagtgcctacagtatgtgtggtggactgtaataggcacagtggtagagataccagtgacggcataaaacaaacaaggaacctaccctggctcaggttacaatttgtgctagataaaaataaaagtaccttactaattgagttagtctgttctggcaagaagcaaccctgaaatggcataaaacaacaatttattaattcctacaattccgtgggttggctgggctgtttactgactggttttagaggatgaccagtgggagagtcgctgggttggagaggctagcctcactcacaggaatggcagttggcgttggctgtgggctgggcattttgctttttat

SEQ ID NO: 39116 - DNA, 550 bp, Homo sapiens
tgaccgttgttataatccactgcagccagggagtaatatcccaattacatgttctattgtttcacttgtgatatgagagcgatgcaaattgttgatgataattacgttgattttcagcagtttgcaaattagtaaattagtacatttakaaatataaatatacccaaaggctaatatgtgtgttgggactagttaacaagtatttattgagtgcctacagtatgtgtggtggactgtaataggcacagtggtagagataccagtgacggcataaaacaaacaaggaacctaccctggctcaggttacaatttgtgctagataaaaataaaagtaccttactaattgagttagtctgttctggcaagaagcaaccctgaaatggcataaaacaacaatttattaattcctacaattccgtgggttggctgggctgtttactgactggttttagaggatgaccagtgggagagtcgctgggttggagaggctagcctcactcacaggaatggcagttggcgttggctgtgggctgggcattttgctttttat

SEQ ID NO: 39117 - DNA, 207 bp, Homo sapiens
gggaagaatagcacataccagtgcttctcagctacmtctttaaggagggacatgctcagaagtgtcggatccaacctgggcaacaaagtgagaccccatctctacaaaaaattaaaaaattagctgaacatagtggcttacgtctgtagttccagctactggggaccagcggggagggggtctgaggtggggggatcgcttgagccc

SEQ ID NO: 39118 - DNA, 2472 bp, Homo sapiens
tgttgcttcttgggggttctataataacaacaaagacaggaatagccattgagtacagccaacattgcctgactcagkgaggttcaatagatggtatttttgctgcattaagaataatcacaatgggccaggcacggtggctcatgcctgtaatcctagcactttgggaggccaaggtgggcagatcacctgaggtcgggagttcgagaccagcctgactaacgtggagaaaccccgtctgtacttaaactacaaaattagctgggcgtggtggtgcatgcctgtaatcccagctactcattatgtgttttaaattaattaaaggctgaggcaggagaatctcttgaacctgggaggcggaggttgcggtgagccaagatcactccattgcagtccagcctggggaacaagagcgaaactccgtctcaaaaataataatataataatcacattgaaataaagcagaaataatcagatttggaaaaaagtaataattatttcttcaaatttatgaactatctctaactattcagttgagggtggtcttttactgtagcatagtcccagaaattatacctggcttcttcacattgaatatcttgaggagaaaaaaatcaggtgatgatgttaagattttcatgtatgatgtgactgcattatcgaacatgcctatgatgccttcaaataaagcctgggaaaaatgagaagaatgtaaatttaaggtgaaaggagtgctactatttttaatatcaagaggtcttattcctttatgttagcttaataaagattgtcaaagaaggttctcattaattctctacgtgtttatcctcacaacttcaagtaaaagtaagacttgagtagaattactaaaacacagctagagagaaaggggaataaaagtgccacaggcaaaggtacagaaatggtggagggatttgtctattttcctgttgccctgttttcacattgggctgcctccttcaggacttccagcatagattacattattatcacatcgagggttgatttcaagtcctctatttaccctctgtgaccttgaccacatgcttccagccagaatgtgagcttctccctgtacatttccatgagcacctgactcatatatccattagtatcacttttaatccaggtaacccatataattatccaactctgtgtttgcatctccattattaagttgatttctgaaggaaagggacctcccttatttacctttttatcctcagtatctaaatcagtcattaagaagttcaatgcatgtttgtaaactgatccttaattaatatccaccttgcaattgttgtaaggattatgtgagattgtgtacatgacagagtattgaaagtgcttattaatagaaagtgcttattaatagaaagtgcttccctgaggttggttattgttattatgggctaaattggttttggtggaaggaccaagctagtaacatgacttctatttatatcaatgattctgtgacaaagtaatgatagtagtaatcattgatgggcgttagatacttaaatagcacaatagccggcacaaagtgcttttggctatgttttcctgacgtgtacaattgccctttcttatgccacatctctgggcctcaaaatgtgtatttctttgctctaatcttcatgttctgcccagagctagtcggctgtctcctccctcaagggatggaagcctgcttctcttccttcagacactgctgcgggcctgctctttgcagtgcccatcaccttaactgactggctccagtgatcccttcttggggacgtcatcagttatgtcctgcctgtgagaccagaaactgttaggtgttgaaataaattaagattaagccaagacttttttttgaagaaattggcagtctgatcctaaaattcatttgaaggctgggcacggtggctcgtgcctatagtaccagctaccaggagggtgcagtgggaggatcacctgagcccaggaggtcactgctgcagtgagctgtgattgtgccactgcactccagcctgggtgacagagtgacaccctgtctaaaaattaaaaaaaaaaaattatataaaattgcaaggaacgcagagtagccaaaatgattttgaaaacaaagaataaagttgagatctcacatttcttgattgtaaaacttattataaagctacaataatcaagacagtgtggtaccggcataaagatagatatgtagataaatgaaataaagttgagagtccagaaataagttcttatatttactgtgaattgatttttggtgacagtgtcatgacaattcaatatggaaataatatctttgcaacaaatgggtgctggaacaactgggtgtccacaagcaaaagaataaaagttggacccttacctcatacatatacaaaaattagtttaaaatgaatccaaaacataaatataagagctcaaactataaaacta

SEQ ID NO: 39119 - DNA, 2472 bp, Homo sapiens
tgttgcttcttgggggttctataataacaacaaagacaggaatagccattgagtacagccaacattgcctgactcagggaggttcaatagatggtatttttgctgcattaagaataatcacaatgggccaggcacggtggctcatgcctgtaatcctagcactttgggaggccaaggtgggcagatcacctgaggtcgggagttcgagaccagcctgactaacgtggagaaaccccgtctgtacttaaactacaaaattagctgggcgtggtggtgcatgcctgtaatcccagctactcattatgtgttttaaattaattaaaggctgaggcaggagaatctcttgaacctgggaggcggaggttgcggtgagccaagatcactccattgcagtccagcctggggaacaagagcgaaactccgtctcaaaaataataatataataatcacattgaaataaagcagaaataatcagatttggaaaaaagtaataattatttcttcaaatttatgaactatctctaactattcagttgagggtggtcttttactgtagcatagtcccagaaattatacctggcttcttcacattgaatatcttgaggagaaaaaaatcaggtgatgatgttaagattttcatgtatgatgtgactgcattatcgaacatgcctatgatgccttcaaataaagcctgggaaaaatgagaagaatgtaaatttaaggtgaaaggagtgctactatttttaatatcaagaggtcttattcctttatgttagcttaataaagattgtcaaagaaggttctcattaattctctacgtgtttatcctcacaacttcaagtaaaagtaagacttgagtagaattactaaaacacagctagagagaaaggggaataaaagtgccacaggcaaaggtacagaaatggtggagggatttgtctattttcctgttgccctgttttcacattgggctgcctccttcaggacttccagcatagattacattattatcacatcgagggttgatttcaagtcctctatttaccctctgtgaccttgaccacatgcttccagccagaatgtgagcttctccctgtacatttccatgagcacctgactcatatatccattagtatcacttttaatccaggtaacccatataattatccaactctgtgtttgcatctccattattaagttgatttctgaaggaaagggacctcccttatttacctttttatcctcagtatctaaatcagtcattaagaagttcaatgcatgtttgtaaactgatccttaattaatatccaccttgcaattgttgtaaggattatgtgagattgtgtacatgacagagtattgaaagtgcttattaatagaaagtgcttattaatagaaagtgcttccctgaggttggttattgttattatgggctaaattggttttggtggaaggaccaagctagtaacatgacttctatttatatcaatgattctgtgacaaagtaatgatagtagtaatcattgatgggcgttagatacttaaatagcacaatagccggcacaaagtgcttttggctatgttttcctgacgtgtacaattgccctttcttatgccacatctctgggcctcaaaatgtgtatttctttgctctaatcttcatgttctgcccagagctagtcggctgtctcctccctcaagggatggaagcctgcttctcttccttcagacactgctgcgggcctgctctttgcagtgcccatcaccttaactgactggctccagtgatcccttcttggggacgtcatcagttatgtcctgcctgtgagaccagaaactgttaggtgttgaaataaattaagattaagccaagacttttttttgaagaaattggcagtctgatcctaaaattcatttgaaggctgggcacggtggctcgtgcctatagtaccagctaccaggagggtgcagtgggaggatcacctgagcccaggaggtcastgctgcagtgagctgtgattgtgccactgcactccagcctgggtgacagagtgacaccctgtctaaaaattaaaaaaaaaaaattatataaaattgcaaggaacgcagagtagccaaaatgattttgaaaacaaagaataaagttgagatctcacatttcttgattgtaaaacttattataaagctacaataatcaagacagtgtggtaccggcataaagatagatatgtagataaatgaaataaagttgagagtccagaaataagttcttatatttactgtgaattgatttttggtgacagtgtcatgacaattcaatatggaaataatatctttgcaacaaatgggtgctggaacaactgggtgtccacaagcaaaagaataaaagttggacccttacctcatacatatacaaaaattagtttaaaatgaatccaaaacataaatataagagctcaaactataaaacta

SEQ ID NO: 39120 - DNA, 2472 bp, Homo sapiens
tgttgcttcttgggggttctataataacaacaaagacaggaatagccattgagtacagccaacattgcctgactcagggaggttcaatagatggtatttttgctgcattaagaataatcacaatgggccaggcacggtggctcatgcctgtaatcctagcactttgggaggccaaggtgggcagatcacctgaggtcgggagttcgagaccagcctgactaacgtggagaaaccccgtctgtacttaaactacaaaattagctgggcgtggtggtgcatgcctgtaatcccagctactcattatgtgttttaaattaattaaaggctgaggcaggagaatctcttgaacctgggaggcggaggttgcggtgagccaagatcactccattgcagtccagcctggggaacaagagcgaaactccgtctcaaaaataataatataataatcacattgaaataaagcagaaataatcagatttggaaaaaagtaataattatttcttcaaatttatgaactatctctaactattcagttgagggtggtcttttactgtagcatagtcccagaaattatacctggcttcttcacattgaatatcttgaggagaaaaaaatcaggtgatgatgttaagattttcatgtatgatgtgactgcattatcgaacatgcctatgatgccttcaaataaagcctgggaaaaatgagaagaatgtaaatttaaggtgaaaggagtgctactatttttaatatcaagaggtcttattcctttatgttagcttaataaagattgtcaaagaaggttctcattaattctctacgtgtttatcctcacaacttcaagtaaaagtaagacttgagtagaattactaaaacacagctagagagaaaggggaataaaagtgccacaggcaaaggtacagaaatggtggagggatttgtctattttcctgttgccctgttttcacattgggctgcctccttcaggacttccagcatagattacattattatcacatcgagggttgatttcaagtcctctatttaccctctgtgaccttgaccacatgcttccagccagaatgtgagcttctccctgtacatttccatgagcacctgactcatatatccattagtatcacttttaatccaggtaacccatataattatccaactctgtgtttgcatctccattattaagttgatttctgaaggaaagggacctcccttatttacctttttatcctcagtatctaaatcagtcattaagaagttcaatgcatgtttgtaaactgatccttaattaatatccaccttgcaattgttgtaaggattatgtgagattgtgtacatgacagagtattgaaagtgcttattaatagaaagtgcttattaatagaaagtgcttccctgaggttggttattgttattatgggctaaattggttttggtggaaggaccaagctagtaacatgacttctatttatatcaatgattctgtgacaaagtaatgatagtagtaatcattgatgggcgttagatacttaaatagcacaatagccggcacaaagtgcttttggctatgttttcctgacgtgtacaattgccctttcttatgccacatctctgggcctcaaaatgtgtatttctttgctctaatcttcatgttctgcccagagctagtcggctgtctcctccctcaagggatggaagcctgcttctcttccttcagacactgctgcgggcctgctctttgcagtgcccatcaccttaactgactggctccagtgatcccttcttggggacgtcatcagttatgtcctgcctgtgagaccagaaactgttaggtgttgaaataaattaagattaagccaagacttttttttgaagaaattggcagtctgatcctaaaattcatttgaaggctgggcacggtggctcgtgcctatagtaccagctaccaggagggtgcagtgggaggatcacctgagcccaggaggtcactgctgcagtgagctgtgattgtgccactgcactccagcctgggtgacagagtgacaccctgtctaaaaattaaaaaaaaaaawttatataaaattgcaaggaacgcagagtagccaaaatgattttgaaaacaaagaataaagttgagatctcacatttcttgattgtaaaacttattataaagctacaataatcaagacagtgtggtaccggcataaagatagatatgtagataaatgaaataaagttgagagtccagaaataagttcttatatttactgtgaattgatttttggtgacagtgtcatgacaattcaatatggaaataatatctttgcaacaaatgggtgctggaacaactgggtgtccacaagcaaaagaataaaagttggacccttacctcatacatatacaaaaattagtttaaaatgaatccaaaacataaatataagagctcaaactataaaacta

SEQ ID NO: 39121 - DNA, 2472 bp, Homo sapiens
tgttgcttcttgggggttctataataacaacaaagacaggaatagccattgagtacagccaacattgcctgactcagggaggttcaatagatggtatttttgctgcattaagaataatcacaatgggccaggcacggtggctcaygcctgtaatcctagcactttgggaggccaaggtgggcagatcacctgaggtcgggagttcgagaccagcctgactaacgtggagaaaccccgtctgtacttaaactacaaaattagctgggcgtggtggtgcatgcctgtaatcccagctactcattatgtgttttaaattaattaaaggctgaggcaggagaatctcttgaacctgggaggcggaggttgcggtgagccaagatcactccattgcagtccagcctggggaacaagagcgaaactccgtctcaaaaataataatataataatcacattgaaataaagcagaaataatcagatttggaaaaaagtaataattatttcttcaaatttatgaactatctctaactattcagttgagggtggtcttttactgtagcatagtcccagaaattatacctggcttcttcacattgaatatcttgaggagaaaaaaatcaggtgatgatgttaagattttcatgtatgatgtgactgcattatcgaacatgcctatgatgccttcaaataaagcctgggaaaaatgagaagaatgtaaatttaaggtgaaaggagtgctactatttttaatatcaagaggtcttattcctttatgttagcttaataaagattgtcaaagaaggttctcattaattctctacgtgtttatcctcacaacttcaagtaaaagtaagacttgagtagaattactaaaacacagctagagagaaaggggaataaaagtgccacaggcaaaggtacagaaatggtggagggatttgtctattttcctgttgccctgttttcacattgggctgcctccttcaggacttccagcatagattacattattatcacatcgagggttgatttcaagtcctctatttaccctctgtgaccttgaccacatgcttccagccagaatgtgagcttctccctgtacatttccatgagcacctgactcatatatccattagtatcacttttaatccaggtaacccatataattatccaactctgtgtttgcatctccattattaagttgatttctgaaggaaagggacctcccttatttacctttttatcctcagtatctaaatcagtcattaagaagttcaatgcatgtttgtaaactgatccttaattaatatccaccttgcaattgttgtaaggattatgtgagattgtgtacatgacagagtattgaaagtgcttattaatagaaagtgcttattaatagaaagtgcttccctgaggttggttattgttattatgggctaaattggttttggtggaaggaccaagctagtaacatgacttctatttatatcaatgattctgtgacaaagtaatgatagtagtaatcattgatgggcgttagatacttaaatagcacaatagccggcacaaagtgcttttggctatgttttcctgacgtgtacaattgccctttcttatgccacatctctgggcctcaaaatgtgtatttctttgctctaatcttcatgttctgcccagagctagtcggctgtctcctccctcaagggatggaagcctgcttctcttccttcagacactgctgcgggcctgctctttgcagtgcccatcaccttaactgactggctccagtgatcccttcttggggacgtcatcagttatgtcctgcctgtgagaccagaaactgttaggtgttgaaataaattaagattaagccaagacttttttttgaagaaattggcagtctgatcctaaaattcatttgaaggctgggcacggtggctcgtgcctatagtaccagctaccaggagggtgcagtgggaggatcacctgagcccaggaggtcactgctgcagtgagctgtgattgtgccactgcactccagcctgggtgacagagtgacaccctgtctaaaaattaaaaaaaaaaaattatataaaattgcaaggaacgcagagtagccaaaatgattttgaaaacaaagaataaagttgagatctcacatttcttgattgtaaaacttattataaagctacaataatcaagacagtgtggtaccggcataaagatagatatgtagataaatgaaataaagttgagagtccagaaataagttcttatatttactgtgaattgatttttggtgacagtgtcatgacaattcaatatggaaataatatctttgcaacaaatgggtgctggaacaactgggtgtccacaagcaaaagaataaaagttggacccttacctcatacatatacaaaaattagtttaaaatgaatccaaaacataaatataagagctcaaactataaaacta

SEQ ID NO: 39122 - DNA, 2472 bp, Homo sapiens
tgttgcttcttgggggttctataataacaacaaagacaggaatagccattgagtacagccaacattgcctgactcagggaggttcaatagatggtatttttgctgcattaagaataatcacaatgggccaggcacggtggctcatgcctgtaatcctagcactttgggaggccaaggtgggcagatcacctgaggtcgggagttcgagaccagcctgactaacgtggagaaaccccgtctgtactyaaactacaaaattagctgggcgtggtggtgcatgcctgtaatcccagctactcattatgtgttttaaattaattaaaggctgaggcaggagaatctcttgaacctgggaggcggaggttgcggtgagccaagatcactccattgcagtccagcctggggaacaagagcgaaactccgtctcaaaaataataatataataatcacattgaaataaagcagaaataatcagatttggaaaaaagtaataattatttcttcaaatttatgaactatctctaactattcagttgagggtggtcttttactgtagcatagtcccagaaattatacctggcttcttcacattgaatatcttgaggagaaaaaaatcaggtgatgatgttaagattttcatgtatgatgtgactgcattatcgaacatgcctatgatgccttcaaataaagcctgggaaaaatgagaagaatgtaaatttaaggtgaaaggagtgctactatttttaatatcaagaggtcttattcctttatgttagcttaataaagattgtcaaagaaggttctcattaattctctacgtgtttatcctcacaacttcaagtaaaagtaagacttgagtagaattactaaaacacagctagagagaaaggggaataaaagtgccacaggcaaaggtacagaaatggtggagggatttgtctattttcctgttgccctgttttcacattgggctgcctccttcaggacttccagcatagattacattattatcacatcgagggttgatttcaagtcctctatttaccctctgtgaccttgaccacatgcttccagccagaatgtgagcttctccctgtacatttccatgagcacctgactcatatatccattagtatcacttttaatccaggtaacccatataattatccaactctgtgtttgcatctccattattaagttgatttctgaaggaaagggacctcccttatttacctttttatcctcagtatctaaatcagtcattaagaagttcaatgcatgtttgtaaactgatccttaattaatatccaccttgcaattgttgtaaggattatgtgagattgtgtacatgacagagtattgaaagtgcttattaatagaaagtgcttattaatagaaagtgcttccctgaggttggttattgttattatgggctaaattggttttggtggaaggaccaagctagtaacatgacttctatttatatcaatgattctgtgacaaagtaatgatagtagtaatcattgatgggcgttagatacttaaatagcacaatagccggcacaaagtgcttttggctatgttttcctgacgtgtacaattgccctttcttatgccacatctctgggcctcaaaatgtgtatttctttgctctaatcttcatgttctgcccagagctagtcggctgtctcctccctcaagggatggaagcctgcttctcttccttcagacactgctgcgggcctgctctttgcagtgcccatcaccttaactgactggctccagtgatcccttcttggggacgtcatcagttatgtcctgcctgtgagaccagaaactgttaggtgttgaaataaattaagattaagccaagacttttttttgaagaaattggcagtctgatcctaaaattcatttgaaggctgggcacggtggctcgtgcctatagtaccagctaccaggagggtgcagtgggaggatcacctgagcccaggaggtcactgctgcagtgagctgtgattgtgccactgcactccagcctgggtgacagagtgacaccctgtctaaaaattaaaaaaaaaaaattatataaaattgcaaggaacgcagagtagccaaaatgattttgaaaacaaagaataaagttgagatctcacatttcttgattgtaaaacttattataaagctacaataatcaagacagtgtggtaccggcataaagatagatatgtagataaatgaaataaagttgagagtccagaaataagttcttatatttactgtgaattgatttttggtgacagtgtcatgacaattcaatatggaaataatatctttgcaacaaatgggtgctggaacaactgggtgtccacaagcaaaagaataaaagttggacccttacctcatacatatacaaaaattagtttaaaatgaatccaaaacataaatataagagctcaaactataaaacta

SEQ ID NO: 39123 - DNA, 2472 bp, Homo sapiens
tgttgcttcttgggggttctataataacaacaaagacaggaatagccattgagtacagccaacattgcctgactcagggaggttcaatagatggtatttttgctgcattaagaataatcacaatgggccaggcacggtggctcatgcctgtaatcctagcactttgggaggccaaggtgggcagatcacctgaggtcgggagttcgagaccagcctgactaacgtggagaaaccccgtctgtacttaaactacaaaattagctgggcgtggtggtgcatgcctgtaatcccagctactcattatgtgttttaaattaattaaaggctgaggcaggagaatctcttgaacctgggaggcggaggttgcggtgagccaagatcactccattgcagtccagcctggggaacaagagcraaactccgtctcaaaaataataatataataatcacattgaaataaagcagaaataatcagatttggaaaaaagtaataattatttcttcaaatttatgaactatctctaactattcagttgagggtggtcttttactgtagcatagtcccagaaattatacctggcttcttcacattgaatatcttgaggagaaaaaaatcaggtgatgatgttaagattttcatgtatgatgtgactgcattatcgaacatgcctatgatgccttcaaataaagcctgggaaaaatgagaagaatgtaaatttaaggtgaaaggagtgctactatttttaatatcaagaggtcttattcctttatgttagcttaataaagattgtcaaagaaggttctcattaattctctacgtgtttatcctcacaacttcaagtaaaagtaagacttgagtagaattactaaaacacagctagagagaaaggggaataaaagtgccacaggcaaaggtacagaaatggtggagggatttgtctattttcctgttgccctgttttcacattgggctgcctccttcaggacttccagcatagattacattattatcacatcgagggttgatttcaagtcctctatttaccctctgtgaccttgaccacatgcttccagccagaatgtgagcttctccctgtacatttccatgagcacctgactcatatatccattagtatcacttttaatccaggtaacccatataattatccaactctgtgtttgcatctccattattaagttgatttctgaaggaaagggacctcccttatttacctttttatcctcagtatctaaatcagtcattaagaagttcaatgcatgtttgtaaactgatccttaattaatatccaccttgcaattgttgtaaggattatgtgagattgtgtacatgacagagtattgaaagtgcttattaatagaaagtgcttattaatagaaagtgcttccctgaggttggttattgttattatgggctaaattggttttggtggaaggaccaagctagtaacatgacttctatttatatcaatgattctgtgacaaagtaatgatagtagtaatcattgatgggcgttagatacttaaatagcacaatagccggcacaaagtgcttttggctatgttttcctgacgtgtacaattgccctttcttatgccacatctctgggcctcaaaatgtgtatttctttgctctaatcttcatgttctgcccagagctagtcggctgtctcctccctcaagggatggaagcctgcttctcttccttcagacactgctgcgggcctgctctttgcagtgcccatcaccttaactgactggctccagtgatcccttcttggggacgtcatcagttatgtcctgcctgtgagaccagaaactgttaggtgttgaaataaattaagattaagccaagacttttttttgaagaaattggcagtctgatcctaaaattcatttgaaggctgggcacggtggctcgtgcctatagtaccagctaccaggagggtgcagtgggaggatcacctgagcccaggaggtcactgctgcagtgagctgtgattgtgccactgcactccagcctgggtgacagagtgacaccctgtctaaaaattaaaaaaaaaaaattatataaaattgcaaggaacgcagagtagccaaaatgattttgaaaacaaagaataaagttgagatctcacatttcttgattgtaaaacttattataaagctacaataatcaagacagtgtggtaccggcataaagatagatatgtagataaatgaaataaagttgagagtccagaaataagttcttatatttactgtgaattgatttttggtgacagtgtcatgacaattcaatatggaaataatatctttgcaacaaatgggtgctggaacaactgggtgtccacaagcaaaagaataaaagttggacccttacctcatacatatacaaaaattagtttaaaatgaatccaaaacataaatataagagctcaaactataaaacta

SEQ ID NO: 39124 - DNA, 2472 bp, Homo sapiens
tgttgcttcttgggggttctataataacaacaaagacaggaatagccattgagtacagccaacattgcctgactcagggaggttcaatagatggtatttttgctgcattaagaataatcacaatgggccaggcacggtggctcatgcctgtaatcctagcactttgggaggccaaggtgggcagatcacctgaggtcgggagttcgagaccagcctgactaacgtggagaaaccccgtctgtacttaaactacaaaattagctgggcgtggtggtgcatgcctgtaatcccagctactcattatgtgttttaaattaattaaaggctgaggcaggagaatctcttgaacctgggaggcggaggttgcggtgagccaagatcactccattgcagtccagcctggggaacaagagcgaaactccgtctcaaaaataataatataataatcacattgaaataaagcagaaataatcagatttggaaaaaagtaataattatttcttcaaatttatgaactatctctaactattcagttgagggtggtcttttactgtagcatagtcccagaaattatacctggcttcttcacattgaatatcttgaggagaaaaaaatcaggtgatgatgttaagattttcatgtatgatgtgactgcattatcgaacatgcctatgatgccttcaaataaagcctgggaaaaatgagaagaatgtaaatttaaggtgaaaggagtgctactatttttaatatcaagaggtcttattcctttatgttagcttaataaagattgtcaaagaaggttctcattaattctctacgtgtttatcctcacaacttcaagtaaaagtaagacttgagtagaattactaaaacacagctagagagaaaggggaataaaagtgccacaggcaaaggtacagaaatggtggagggatttgtctattttcctgttgccctgttttcacattgggctgcctcyttcaggacttccagcatagattacattattatcacatcgagggttgatttcaagtcctctatttaccctctgtgaccttgaccacatgcttccagccagaatgtgagcttctccctgtacatttccatgagcacctgactcatatatccattagtatcacttttaatccaggtaacccatataattatccaactctgtgtttgcatctccattattaagttgatttctgaaggaaagggacctcccttatttacctttttatcctcagtatctaaatcagtcattaagaagttcaatgcatgtttgtaaactgatccttaattaatatccaccttgcaattgttgtaaggattatgtgagattgtgtacatgacagagtattgaaagtgcttattaatagaaagtgcttattaatagaaagtgcttccctgaggttggttattgttattatgggctaaattggttttggtggaaggaccaagctagtaacatgacttctatttatatcaatgattctgtgacaaagtaatgatagtagtaatcattgatgggcgttagatacttaaatagcacaatagccggcacaaagtgcttttggctatgttttcctgacgtgtacaattgccctttcttatgccacatctctgggcctcaaaatgtgtatttctttgctctaatcttcatgttctgcccagagctagtcggctgtctcctccctcaagggatggaagcctgcttctcttccttcagacactgctgcgggcctgctctttgcagtgcccatcaccttaactgactggctccagtgatcccttcttggggacgtcatcagttatgtcctgcctgtgagaccagaaactgttaggtgttgaaataaattaagattaagccaagacttttttttgaagaaattggcagtctgatcctaaaattcatttgaaggctgggcacggtggctcgtgcctatagtaccagctaccaggagggtgcagtgggaggatcacctgagcccaggaggtcactgctgcagtgagctgtgattgtgccactgcactccagcctgggtgacagagtgacaccctgtctaaaaattaaaaaaaaaaaattatataaaattgcaaggaacgcagagtagccaaaatgattttgaaaacaaagaataaagttgagatctcacatttcttgattgtaaaacttattataaagctacaataatcaagacagtgtggtaccggcataaagatagatatgtagataaatgaaataaagttgagagtccagaaataagttcttatatttactgtgaattgatttttggtgacagtgtcatgacaattcaatatggaaataatatctttgcaacaaatgggtgctggaacaactgggtgtccacaagcaaaagaataaaagttggacccttacctcatacatatacaaaaattagtttaaaatgaatccaaaacataaatataagagctcaaactataaaacta

SEQ ID NO: 39125 - DNA, 2472 bp, Homo sapiens
tgttgcttcttgggggttctataataacaacaaagacaggaatagccattgagtacagccaacattgcctgactcagggaggttcaatagatggtatttttgctgcattaagaataatcacaatgggccaggcacggtggctcatgcctgtaatcctagcactttgggaggccaaggtgggcagatcacctgaggtcgggagttcgagaccagcctgactaacgtggagaaaccccgtctgtacttaaactacaaaattagctgggcgtggtggtgcatgcctgtaatcccagctactcattatgtgttttaaattaattaaaggctgaggcaggagaatctcttgaacctgggaggcggaggttgcggtgagccaagatcactccattgcagtccagcctggggaacaagagcgaaactccgtctcaaaaataataatataataatcacattgaaataaagcagaaataatcagatttggaaaaaagtaataattatttcttcaaatttatgaactatctctaactattcagttgagggtggtcttttactgtagcatagtcccagaaattatacctggcttcttcacattgaatatcttgaggagaaaaaaatcaggtgatgatgttaagattttcatgtatgatgtgactgcattatcgaacatgcctatgatgccttcaaataaagcctgggaaaaatgagaagaatgtaaatttaaggtgaaaggagtgctactatttttaatatcaagaggtcttattcctttatgttagcttaataaagattgtcaaagaaggttctcattaattctctacgtgtttatcctcacaacttcaagtaaaagtaagacttgagtagaattactaaaacacagctagagagaaaggggaataaaagtgccacaggcaaaggtacagaaatggtggagggatttgtctattttcctgttgccctgttttcacattgggctgcctccttcaggacttccagcatagattacattattatcacatcgagggttgatttcaagtcctctatttaccctctgtgaccttgaccacatgcttccagccagaatgtgagcttctccctgtacatttccatgagcacctgactcatayatccattagtatcacttttaatccaggtaacccatataattatccaactctgtgtttgcatctccattattaagttgatttctgaaggaaagggacctcccttatttacctttttatcctcagtatctaaatcagtcattaagaagttcaatgcatgtttgtaaactgatccttaattaatatccaccttgcaattgttgtaaggattatgtgagattgtgtacatgacagagtattgaaagtgcttattaatagaaagtgcttattaatagaaagtgcttccctgaggttggttattgttattatgggctaaattggttttggtggaaggaccaagctagtaacatgacttctatttatatcaatgattctgtgacaaagtaatgatagtagtaatcattgatgggcgttagatacttaaatagcacaatagccggcacaaagtgcttttggctatgttttcctgacgtgtacaattgccctttcttatgccacatctctgggcctcaaaatgtgtatttctttgctctaatcttcatgttctgcccagagctagtcggctgtctcctccctcaagggatggaagcctgcttctcttccttcagacactgctgcgggcctgctctttgcagtgcccatcaccttaactgactggctccagtgatcccttcttggggacgtcatcagttatgtcctgcctgtgagaccagaaactgttaggtgttgaaataaattaagattaagccaagacttttttttgaagaaattggcagtctgatcctaaaattcatttgaaggctgggcacggtggctcgtgcctatagtaccagctaccaggagggtgcagtgggaggatcacctgagcccaggaggtcactgctgcagtgagctgtgattgtgccactgcactccagcctgggtgacagagtgacaccctgtctaaaaattaaaaaaaaaaaattatataaaattgcaaggaacgcagagtagccaaaatgattttgaaaacaaagaataaagttgagatctcacatttcttgattgtaaaacttattataaagctacaataatcaagacagtgtggtaccggcataaagatagatatgtagataaatgaaataaagttgagagtccagaaataagttcttatatttactgtgaattgatttttggtgacagtgtcatgacaattcaatatggaaataatatctttgcaacaaatgggtgctggaacaactgggtgtccacaagcaaaagaataaaagttggacccttacctcatacatatacaaaaattagtttaaaatgaatccaaaacataaatataagagctcaaactataaaacta

SEQ ID NO: 39126 - DNA, 2472 bp, Homo sapiens
tgttgcttcttgggggttctataataacaacaaagacaggaatagccattgagtacagccaacattgcctgactcagggaggttcaatagatggtatttttgctgcattaagaataatcacaatgggccaggcacggtggctcatgcctgtaatcctagcactttgggaggccaaggtgggcagatcacctgaggtcgggagttcgagaccagcctgactaacgtggagaaaccccgtctgtacttaaactacaaaattagctgggcgtggtggtgcatgcctgtaatcccagctactcattatgtgttttaaattaattaaaggctgaggcaggagaatctcttgaacctgggaggcggaggttgcggtgagccaagatcactccattgcagtccagcctggggaacaagagcgaaactccgtctcaaaaataataatataataatcacattgaaataaagcagaaataatcagatttggaaaaaagtaataattatttcttcaaatttatgaactatctctaactattcagttgagggtggtcttttactgtagcatagtcccagaaattatacctggcttcttcacattgaatatcttgaggagaaaaaaatcaggtgatgatgttaagattttcatgtatgatgtgactgcattatcgaacatgcctatgatgccttcaaataaagcctgggaaaaatgagaagaatgtaaatttaaggtgaaaggagtgctactatttttaatatcaagaggtcttattcctttatgttagcttaataaagattgtcaaagaaggttctcattaattctctacgtgtttatcctcacaacttcaagtaaaagtaagacttgagtagaattactaaaacacagctagagagaaaggggaataaaagtgccacaggcaaaggtacagaaatggtggagggatttgtctattttcctgttgccctgttttcacattgggctgcctccttcaggacttccagcatagattacattattatcacatcgagggttgatttcaagtcctctatttaccctctgtgaccttgaccacatgcttccagccagaatgtgagcttctccctgtacatttccatgagcacctgactcatatatccattagtatcacttttaatccaggtaacccatataattatccaactctgtgtttgcatctccattattaagttgatttctgaaggaaagggacctcccttatttacctttttatcctcagtatctaaatcagtcattaagaagttcaatgcatgtttgtaaactgatccttaattaatatccaccttgcaattgttgtaaggattatgtgagattgtgtacatgacagagtattgaaagtgcttattaatagaaagtgcttattaatagaaagtgcttccctgaggttggttattgttattatgggctaaattggttttggtggaaggaccaagctagtaacatgacttctatttatatcaatgattctgtgacaaagtaatgatagtagtaatcattgatgggcgttagatacttaaatagcacaatagccggcacaaagtgcttttggctatgttttcctgaygtgtacaattgccctttcttatgccacatctctgggcctcaaaatgtgtatttctttgctctaatcttcatgttctgcccagagctagtcggctgtctcctccctcaagggatggaagcctgcttctcttccttcagacactgctgcgggcctgctctttgcagtgcccatcaccttaactgactggctccagtgatcccttcttggggacgtcatcagttatgtcctgcctgtgagaccagaaactgttaggtgttgaaataaattaagattaagccaagacttttttttgaagaaattggcagtctgatcctaaaattcatttgaaggctgggcacggtggctcgtgcctatagtaccagctaccaggagggtgcagtgggaggatcacctgagcccaggaggtcactgctgcagtgagctgtgattgtgccactgcactccagcctgggtgacagagtgacaccctgtctaaaaattaaaaaaaaaaaattatataaaattgcaaggaacgcagagtagccaaaatgattttgaaaacaaagaataaagttgagatctcacatttcttgattgtaaaacttattataaagctacaataatcaagacagtgtggtaccggcataaagatagatatgtagataaatgaaataaagttgagagtccagaaataagttcttatatttactgtgaattgatttttggtgacagtgtcatgacaattcaatatggaaataatatctttgcaacaaatgggtgctggaacaactgggtgtccacaagcaaaagaataaaagttggacccttacctcatacatatacaaaaattagtttaaaatgaatccaaaacataaatataagagctcaaactataaaacta

SEQ ID NO: 39127 - DNA, 2472 bp, Homo sapiens
tgttgcttcttgggggttctataataacaacaaagacaggaatagccattgagtacagccaacattgcctgactcagggaggttcaatagatggtatttttgctgcattaagaataatcacaatgggccaggcacggtggctcatgcctgtaatcctagcactttgggaggccaaggtgggcagatcacctgaggtcgggagttcgagaccagcctgactaacgtggagaaaccccgtctgtacttaaactacaaaattagctgggcgtggtggtgcatgcctgtaatcccagctactcattatgtgttttaaattaattaaaggctgaggcaggagaatctcttgaacctgggaggcggaggttgcggtgagccaagatcactccattgcagtccagcctggggaacaagagcgaaactccgtctcaaaaataataatataataatcacattgaaataaagcagaaataatcagatttggaaaaaagtaataattatttcttcaaatttatgaactatctctaactattcagttgagggtggtcttttactgtagcatagtcccagaaattatacctggcttcttcacattgaatatcttgaggagaaaaaaatcaggtgatgatgttaagattttcatgtatgatgtgactgcattatcgaacatgcctatgatgccttcaaataaagcctgggaaaaatgagaagaatgtaaatttaaggtgaaaggagtgctactatttttaatatcaagaggtcttattcctttatgttagcttaataaagattgtcaaagaaggttctcattaattctctacgtgtttatcctcacaacttcaagtaaaagtaagacttgagtagaattactaaaacacagctagagagaaaggggaataaaagtgccacaggcaaaggtacagaaatggtggagggatttgtctattttcctgttgccctgttttcacattgggctgcctccttcaggacttccagcatagattacattattatcacatcgagggttgatttcaagtcctctatttaccctctgtgaccttgaccacatgcttccagccagaatgtgagcttctccctgtacatttccatgagcacctgactcatatatccattagtatcacttttaatccaggtaacccatataattatccaactctgtgtttgcatctccattattaagttgatttctgaaggaaagggacctcccttatttacctttttatcctcagtatctaaatcagtcattaagaagttcaatgcatgtttgtaaactgatccttaattaatatccaccttgcaattgttgtaaggattatgtgagattgtgtacatgacagagtattgaaagtgcttattaatagaaagtgcttattaatagaaagtgcttccctgaggttggttattgttattatgggctaaattggttttggtggaaggaccaagctagtaacatgacttctatttatatcaatgattctgtgacaaagtaatgatagtagtaatcattgatgggcgttagatacttaaatagcacaatagccggcacaaagtgcttttggctatgttttcctgacgtgtacaattgccctttcttatgccacatctctgggcctcaaaatgtgtatttctttgctctaatcttcatgttctgcccagagctagtcggctgtctcctccctcaagggatggaagcctgcttctcttccttcagacactgctgcgggcctgctctttgcagtgcccatcaccttaactgactggctccagtgatcccttcttggggacgtcatcagttatgtcctgcctgtgagaccagaaactgttaggtgttgaaataaattaagattaagccaagacttttttttgaagaaattgrcagtctgatcctaaaattcatttgaaggctgggcacggtggctcgtgcctatagtaccagctaccaggagggtgcagtgggaggatcacctgagcccaggaggtcactgctgcagtgagctgtgattgtgccactgcactccagcctgggtgacagagtgacaccctgtctaaaaattaaaaaaaaaaaattatataaaattgcaaggaacgcagagtagccaaaatgattttgaaaacaaagaataaagttgagatctcacatttcttgattgtaaaacttattataaagctacaataatcaagacagtgtggtaccggcataaagatagatatgtagataaatgaaataaagttgagagtccagaaataagttcttatatttactgtgaattgatttttggtgacagtgtcatgacaattcaatatggaaataatatctttgcaacaaatgggtgctggaacaactgggtgtccacaagcaaaagaataaaagttggacccttacctcatacatatacaaaaattagtttaaaatgaatccaaaacataaatataagagctcaaactataaaacta

SEQ ID NO: 39128 - DNA, 521 bp, Homo sapiens
agcaatcctttatttctcatcattgccagtcactctgggatcttaagctaatcaaatcctccctgcgctttaatttatacccgtgcaaaatggaaaacacagtactgtaacggtgctctgaacacgcacagacaaatcagatggaaacaaaacatttagggtatttgatttgcttcgaattcgaagacatgacctggaaacatcctgtcacagagactaggaattcttaagggagcctaacatcaaataggatggagagaattttggttctagtttattttggatatgggcatgtagatctggccattgwctcttcctttggagggctatgatgaaaagaatattgaaaaagagctaaccagaggctaaattgcaagaatttcccatgcagaaaggcttaacattcacctattcatgcccataaaagcacattaaaatataagagaatctgatgttgcttaaactctcttttaactagcttggctccagaatggaagattctatttcaagaaagtctatca

SEQ ID NO: 39129 - DNA, 521 bp, Homo sapiens
agcaatcctttatttctcatcattgccagtcactctgggatcttaagctaatcaaatcctccctgcgctttaatttatacccgtgcaaaatggaaaacacagtactgtaacggtgctctgaacacgcacagacaaatcagatggaaacaaaacatttagggtatttgatttgcttcgaattcgaagacatgacctggaaacatcctgtcacagagactaggaattcttaagggagcctaacatcaaataggatggagagaattttggttctagtttattttggatatgggcatgtagatctggccattgtctcttcctttggagggctatgatgaaaagaatattgaaaaagagctaaccagaggctaaattgcaagaatttcccatgcagaaaggcttaacattcacctattcatgcccataaaascacattaaaatataagagaatctgatgttgcttaaactctcttttaactagcttggctccagaatggaagattctatttcaagaaagtctatca

SEQ ID NO: 39130 - DNA, 760 bp, Homo sapiens
acaaataatgaggatgattattggcattgagttggaagggctatatgttctgatttccatgtgctccaaagaatcattcattaatatatstatatgaatatgtacacacatacgtgtgtatatataccaaaatggtaaaatattgtttataagtttttcatactagatcctaattttatttaacctataaaaacaacacgtttttgtagagctttgatatacactgagtttttcaggaattcaatgattatttgcaataaaagacatttgcacgctgtttgatttgaatctttactgaaagcttcttgcaatttaaaaaagcatatcacaccaagaatgatactatcactcattacagaatgctaaataaatcagtctctgttttttattgtatcatatattgtgattctatgctgaggttcaaatatataattttgttgttttttttccagcatagctgtgcccagttggatatatacagacctgcaaatttgaatgcaaattgttttcttttatcctataacatattaacatacatacgaacaatattttcacagttattactctaataaataactcttcattgttgggactgccaaaatagcttcccaacttgtctctttgcctctagttctccctgttctccacactcaacatcaaaatttagattaaattagatacactcttttccttaaaaatattttaatgaatacacttgtttgtaaacatgtattcaaatttatttaattatgcaaacttg

SEQ ID NO: 39131 - DNA, 760 bp, Homo sapiens
acaaataatgaggatgattattggcattgagttggaagggctatatgttctgatttccatgtgctccaaagaatcattcattaatatatgtatatgaatatgtacacacatacgtgtgtatatataccaaaatggtaaaatattgtttataagtttttcatactagatcctaattttatttaacctataaaaacaacacgtttttgtagagctttgatatayactgagtttttcaggaattcaatgattatttgcaataaaagacatttgcacgctgtttgatttgaatctttactgaaagcttcttgcaatttaaaaaagcatatcacaccaagaatgatactatcactcattacagaatgctaaataaatcagtctctgttttttattgtatcatatattgtgattctatgctgaggttcaaatatataattttgttgttttttttccagcatagctgtgcccagttggatatatacagacctgcaaatttgaatgcaaattgttttcttttatcctataacatattaacatacatacgaacaatattttcacagttattactctaataaataactcttcattgttgggactgccaaaatagcttcccaacttgtctctttgcctctagttctccctgttctccacactcaacatcaaaatttagattaaattagatacactcttttccttaaaaatattttaatgaatacacttgtttgtaaacatgtattcaaatttatttaattatgcaaacttg

SEQ ID NO: 39132 - DNA, 800 bp, Homo sapiens
gagagaaagaatgattaaaaagatgatttaatttattctaaagaaggcaaaaaatccaatgggaagaacaaaaaaaaggaatgaatagaataaataatgttatgataatattatttcaaacatatcagaaaaatgtaaataggactaaatatttcagttaaaagtgagaatttaaaaactgaatattattttaaaagtagaagaaaaaagaaagacatgacataaataaaatgtagtcactaaacaaatgaaaaagtcatatacatcaaacttctgcattaccagactgaatttaaaattttttaatctaaaattattttagttatgtctgaagaactttctttaatatatttttagtgcaggtttttgataacacattttcttaaatttggtttctctgaaaatgtttcattatttccattattttttccaagtcagatattacatttttgtcacaaataatctttaagacaagttttcatatagatttacatgcatttgtaagaaataatactgagtgatttcaaatatcctttattaattttctccactgaaaccatcttgcaaaactataatataattgaccttrttatattgaagatacagaaaattttcatcaccacaaggattcccacacctatttccctttcacctgttcttctacagttttacaattttagtaatgttatattaagacagaaacatttaatgatttttgttttggctttttgaattgtttaactttctcatagattctggttattagatctttgtcagatgcatagtttgcaaatattttc

SEQ ID NO: 39133 - DNA, 1229 bp, Homo sapiens
ttcatcatttccccagggaagactacccaaagtcttcagctcatgttttgaagaaccaaagtcttcaagttcatgatataaggataatatttaacctccttccttataaaatgttaagtccttatggtcttgtaatctataaaataaagggcaggtcatttgttccaaacaaagagaaaaaaaaataacagcatctagaaatacctgtttggaagagggtaattggaaaacatagcaactagtggtctgtagcacttatgaaatacaattcaagtgaattagtaaaggccctttttgattatggcagaggaakttccttgtttagcccatttgggctgtctacttctgcttcctgaaaagaaatcttttcaccaatatcctccccgaatcatgactgtcttttgggagggtctgtctctctctttccctttttaaaaataatttttaaatggcaaataaaaattacatacatttatggtgtataacatattttgatatatgtatatattgtgatatgactaaatcaagctaattaacatattcattacctgttatacttgctcagtaagcttcgtggctgtatctaaggtgggcactgagaagtatgactgtcttgatggttacataacccgtataacctatgtcctgctaatacatttttgagggctggtgtatatttttcaggatatataaattataggaaatttcatgtcaaatttgcagtctctgtggcaataaatttttcatcaaatttataggtttcttatttgtttctcagttctgtaagcaagctcctataagcaaataatggtgtagacagttaaagtctgaacactctggtcctttacttactgggctcagtgttatgcccaccatcaccaccacctgaccgatgactgttttgagaccacctgaagcaaaaacactcttaatctgatctttactagtatgctggctgctgatctggtgtagaatttttgtgaaagtgcttaaaaagattctgcagcacaattatgctaatgatgtcaatacaagccactgattattattgttttgattactgatataggctggtttaaaatagcaaaactcagattgtagaactgtgtacaaagttcttagtgtagaaaggtgacctgtagatagaggtcaccagagcagacatgttctatctctgtttgcaaactgaccagttgtaggattttgcaaatatagggtaaagatagggt

SEQ ID NO: 39134 - DNA, 668 bp, Homo sapiens
taaaatcctgtatttactaacaaggagaaagcaaatatatttcagaaaaccttcaacaataaggcaagaatgatcagcacactccattccttggacaatatggttaactcaacattttctgtcattaactctaacaatacaattttaaaatgactgccactttcctaaataatgggaatagcttcacaacagtacttccactgtatcttttaaagaactaaaaagccaaagtaatttgtccacatggtgaatgtatttaccttataaagtcctgaaattatatattgctacaatcattaatttaccatctacagcagaatgaagtttccactgatgctccacagagatggaaattaggtgactggacattctccttcctctcacagaatgtccattataagaagaaaagcaacaggcttttgatctggcagaaagcctgctgttctgcccagctgtaaatccttgtgttttaaatgctttttgtataattttattttcctgagttgtaaagtaatacctttcactaaggggcaaacctttttaaatrtagaaaagaattttaaaaataatctcccataaccctaccacccagagataatccctcatatccttctggtcagttaacaccagcaaacttctctcataggttattctacaggtgtgtttca

SEQ ID NO: 39135 - DNA, 646 bp, Homo sapiens
ttacttataatacctaatgaagtgcctacacatcacttcattcacatgaattcaacatagtacttggtgtgcggcaagttcaaattttgttttttggaactttgtagaattattattttttgaatatttttgatccatgggtagttgaatccacagatgcagaatccatggatatggaaggccgactatataaggaaaacagaaactagaacttactttgctctgggttgatgaactaatcccggaacctctttattagttttaagtcttacatttgagctggcacttttttcctgaaacacataaacacagacatgtgaaagacaggattagaatccacaattaaacaagtgtatgagttttcatcacacaaacgttcaatctgtttggggccctatactacggctggttacctcacaagggcaaaagtccttgcaaagatgacacacagaacaggtagaacctgccaaacagggagcactgctaygaaaagtgaaattagctttataacaactatgactctgtttagaaaacaatgtacagttaatatttaattctttaacactaatagtaatgaatcaaagaacagaagatctagtatcaagagaaacagcagcaatacaatcacagcctttgttcacttgct

SEQ ID NO: 39136 - DNA, 608 bp, Homo sapiens
ggggagaaggatacgaagagaagttgttattgaaaaagacgttgggaatgaaactgaggcctagaatgtcattctaaagttrtgtgtgtgatttttttttcccttgccagaagtggggagattgtttatttttaggcatcggacacacattgatggctattaagcaggacaatgaccaagtgtaactgaggtttagaaaaaagttgatggcagtatcaagtcaaatggatagaggaagaaattcctgaaagaacaaggaaccacaggtcatgacagtaaccttcctagactgctataggtagaagggtcatctcttacggaggcacaatgatgccttctcaaataggaaaaggggtaactacttgtggaaagacagtagggtaagatagcagaatcctgatcctgaagatttatggttaaggatgatggggaaagatagtttctagtaatataatcctcctagcacatcagtgcagtcatactggctgtgtaaacattaaaatacttctgggccggacgcggtggctcacgcctgtaatcccagcactttgggaggccaaggcaggcggttcacctgaggccaagagttcaagaccagcctggccaac

SEQ ID NO: 39137 - DNA, 637 bp, Homo sapiens
caattggaccgtcattgacaatggaacattctgactcagttcctattcttgcattccaaggttcattgagaaccattttccaaactagcagtaatttctaaaacctagaaaaacaacataactaacttaaaaataagttctaaagttcatgaatgtttgcacttgagaaaccttatatttaattagtggaggtagaagacatagacttttgagaatgttttaaagggaagttgagagaattttcaagggtttagaggctaatggtatgggctctttagttttagtttagttttttatttttattgtggaaaaaaaaaacacctctaagaaaagtttataacgtgtatatatatggtgctggttaaaaatagaaaattacactacytggtgaccttccccagtcatacagcattagcactgtgctatgtctatatttgtgtactagggacacatttccctttccttgacattatcaggacaattttttactcattaacctttattagaatcattctagtgatttacggaagaacaaatagaaagggaaagggaaaaacattcctgtgatcacaggaaaagaaccagaagaaggagaaagagggggatgattaaagagaatagatggataggtttttat

SEQ ID NO: 39138 - DNA, 637 bp, Homo sapiens
caattggaccgtcattgacaatggaacattctgactcagttcctattcttgcattccaaggttcattgagaaccattttccaaactagcagtaatttctaaaacctagaaaaacaacataactaacttaaaaataagttctaaagttcatgaatgtttgcacttgagaaaccttatatttaattagtggaggtagaagacatagacttttgagaatgttttaaagggaagttgagagaattttcaagggtttagaggctaatggtatgggctctttagttttagtttagttttttatttttattgtggaaaaaaaaaacacctctaagaaaagtttataacgtgtatatatatggtgctggttaaaaatagaaaattacactacttggtgaccttccccagtcatacagcattagcactgtgctatgtctatatttgtgtactagggacacatttccctttccttgacaktatcaggacaattttttactcattaacctttattagaatcattctagtgatttacggaagaacaaatagaaagggaaagggaaaaacattcctgtgatcacaggaaaagaaccagaagaaggagaaagagggggatgattaaagagaatagatggataggtttttat

SEQ ID NO: 39139 - DNA, 1086 bp, Homo sapiens
tgcatcttgctttactccatcttgtaatctagacctgctgatgccaccggcgaggtttgtcagaggcagtccaaaggacaccgttcacaaagttcttgcctgctttcaggcaagaggctctaactttttattggctttggagctccttgtgcaccatttcctgatggatggtcaaatgaatcatgggaccatgcagatgtgttttggctcgatgccaggtggtctgaattaggagatctggaggagccagttgagaagcagatataggaaccagatgggaatgaaatgcaggattctcttaggtcatttggactggtrtaacaaaatatcataaatcaggtggcttataaacaacatttcccacagctctggagcctggaaattcccagatgaaagtgctagcagattcagtgtctgatgaggacctgcttttttggttcacagatggatttttcttgctgtatcacgatgaaaggggtgagggaccctctggggcctttttaataagggaactaatcccattcatgagggctctgccctcatgacctaatcacttcccaaaggcctccaaatattctcacatggggaattaggttttaatatagaaatttgataggtgggagatgcacagattcagatcacagcaagatccatttcgtggcctgtataggaaactccttttacatgcacccaagtcaagaccatgggaattgcatgtagaggatattaggttcatattcataaggtagatgcttcttttccagacaattggaagttcacagtgtgcttgtaacccttcaagttcagataaacaagagtcagagggccaagagagaaggctagaagacagagcaattcaagacttccagtatggaagcaggagctcactggagaagattctctacttctgagatctgcttggtagacagcaataaccagactccagaggacaaactatgcatgctcaggggccttccgctggcttccccagttggggcaaattatttctcttcttttgggtgggaggaattgaggagaagaggaacaaatggctgtcagattcactattacttaaggtaaaattga

SEQ ID NO: 39140 - DNA, 632 bp, Homo sapiens
cacactcacacacatacacaccaaggaaattcctgttgttatacagggaatacttaagttatacagctaatgcctttcaggggccccttctccagcttggatgtgccagcctactatgtcattctccagggtttctccatcctgtttgaaggtgatactgatttctgatgtttacttgcttatttgctgcgttttttcttttcttttcttcctttgtttttttttttaattcacagaacaggcagtgrtgacatgcatgacaggcatttgggatcagatgttgctgatccagaagcctaggtgtggccattttgtcatggcaactgttaagcaagtaaatagggtagagtagtcatctgacttatctccagcgatgttcagtttgttttgaatttctactctgtgacacttctgctctgaagccaagcatagatagatggtacctttcgttcaactcccaagttttcatttctctcaaatgaagttaagaggtttttaaaatagaaacacatcgatgtgagccattttcagactggatgggtttcctgaaccttgtctttttaatgctttacttctgctcttttagatcaatttctaagtgccaagaagagctattactcctttctcctagc

SEQ ID NO: 39141 - DNA, 1869 bp, Homo sapiens
catcatcatcagctctgctacttcttaaaggaacaggcttggaggtggtttttccctccatgattcctctctgctagctcactcttctgccagggccctccctttatgtaatatagctgatcagtggctgagccaggcaggggccaggaccagtcctggagcttgtgaaggttccgcattctagcctagccttcatatgagtgaaataaaaagagatgagagggtgggtcattcttggcctctgcagccagtctatccccatcagtgtgggttgtctgcagattgtggaggcaacaggagggagctgcctggaagtcgttgaactagggccaaagattgggtagcattttgaccggaagccttaaaattggccarggtcccacactaactggtgttctggggtgcacagcacatgaattgatgccaagtgctctcagatgtactaggaggaggtgcttggctccatttttggtgccctcagaggctgtgggactctggatgcctgactggtgacatcaggcagccagagaatttcactcttggcgctaaccggttctggccactgagctttctccattgtgtctgcttatccaagagttagagtgaagtcagctctctgtggatctgagagttggctcaggccagcctctcagctgggggaagaggtcaagtcagttgggagcttaaaagccaatggaggaaaaggtcaagtcccagccccctccatttgaagaaaggttttttcttttcaagcaagggaatggtccgtgggcatgtgaatgtgcccactctttgctgaggaggaaggaggccatttctatccagatgtctctctgcagacaagaggctaaaggacgaacggtaacaaggtgacaggagctgtctccacatgggtcctgcctcccaactctctcagccttctgctctcatctgtcatccaggggactgtggatgacctcatcccataaccacatctccaatgggagacagtggaacagccattccttcacacaggggaaagctaattggcaataatccttgcgggaaggtcagactcctctcttacagatctagggaaggcctggggtaaaatgatggctctttggaaaatgccaagctccttcagattccataccctctcgggccctctagcataggcaacgaacttgttcctggcttcacgctttctcattgaatcaaagctctcaagcatggcctggatttgtaaacacatgctggctgccagcagtggcaagttagcctcctgacccacttctctcctgctttcactctggtgtatgaagggggatgagggaggggccagagaggtggccacttggacctttggcaggaaatcttcactgtgccaaagcattgtgtttctggagccggagctgcctgaggcactcttctccagcctcctcagccttccatggagctgcagaccctacatagacctacccctgccgggctccaaacagatccccctacccattcctttcatgtactgtttggtcctggaagaggctcacacaagttggctttgggttttgcttcaacatagaaaccacgagccttataccttgaatatgggtagtttcattgccagtaatgggaactctggaactgccaaagggactgtatcctctttctgacctggtgttgctttcttttgttaggcttcccagctctgtgcccagcagcctgtccagagtgagctggtacagagatgccaacaactgcagtctcgcttatccactctaaagattgaaaacgaagaggtgagtttcttccttaggaggctcaaagccacactcttagtttccctgttgaaacttttgctgctgcccgtctgggagcaggtggaag

SEQ ID NO: 39142 - DNA, 1869 bp, Homo sapiens
catcatcatcagctctgctacttcttaaaggaacaggcttggaggtggtttttccctccatgattcctctctgctagctcactcttctgccagggccctccctttatgtaatatagctgatcagtggctgagccaggcaggggccaggaccagtcctggagcttgtgaaggttccgcattctagcctagccttcatatgagtgaaataaaaagagatgagagggtgggtcattcttggcctctgcagccagtctatccccatcagtgtgggttgtctgcagattgtggaggcaacaggagggagctgcctggaagtcgttgaactagggccaaagattgggtagcattttgaccggaagccttaaaattggccaaggtcccacactaactggtgttctggggtgcacagcacatgaattgatgccaagtgctctcagatgtactaggaggaggtgcttggctccatttttggtgccctcagaggctgtgggactctggatgcctgactggtgacatcaggcagccagagaatttcactcttggcgctaaccggttctggccactgagctttctccattgtgtctgcttatccaagagttagagtgaagtcagctctctgtggatctgagagttggctcaggccagcctctcagctgggggaagaggtcaagtcagttgggagcttaaaagccaatggaggaaaaggtcaagtcccagccccctccatttgaagaaaggttttttcttttcaagcaagggaatggtccgtgggcatgtgaatgtgcccactctttgctgaggaggaaggagrccatttctatccagatgtctctctgcagacaagaggctaaaggacgaacggtaacaaggtgacaggagctgtctccacatgggtcctgcctcccaactctctcagccttctgctctcatctgtcatccaggggactgtggatgacctcatcccataaccacatctccaatgggagacagtggaacagccattccttcacacaggggaaagctaattggcaataatccttgcgggaaggtcagactcctctcttacagatctagggaaggcctggggtaaaatgatggctctttggaaaatgccaagctccttcagattccataccctctcgggccctctagcataggcaacgaacttgttcctggcttcacgctttctcattgaatcaaagctctcaagcatggcctggatttgtaaacacatgctggctgccagcagtggcaagttagcctcctgacccacttctctcctgctttcactctggtgtatgaagggggatgagggaggggccagagaggtggccacttggacctttggcaggaaatcttcactgtgccaaagcattgtgtttctggagccggagctgcctgaggcactcttctccagcctcctcagccttccatggagctgcagaccctacatagacctacccctgccgggctccaaacagatccccctacccattcctttcatgtactgtttggtcctggaagaggctcacacaagttggctttgggttttgcttcaacatagaaaccacgagccttataccttgaatatgggtagtttcattgccagtaatgggaactctggaactgccaaagggactgtatcctctttctgacctggtgttgctttcttttgttaggcttcccagctctgtgcccagcagcctgtccagagtgagctggtacagagatgccaacaactgcagtctcgcttatccactctaaagattgaaaacgaagaggtgagtttcttccttaggaggctcaaagccacactcttagtttccctgttgaaacttttgctgctgcccgtctgggagcaggtggaag

SEQ ID NO: 39143 - DNA, 1794 bp, Homo sapiens
cacgtttggctactgagctcttgaaatgagctcagtcagtgtaaaatatacacagtgttgaaagacattatgaaaaaagaatgttaaaaccatcattcatacttttaaattttgattacatgttgaaattcaaattcccaatattggataaaataaggaaggttaaaatcaataaattaatttttaataccactaccaggaaatattaaattgcatacgtagattgtttttctgttggatggtctgggttacagttattaataaaaggaagagtcaaatgtgccctataatagagtgggtgattttatttttaaagcactgtgatgtctaatattcaatttgaacttgttttgagccatagccatgtaaacatcctctttgcctccctccagatctttgcataagtctattccatacttaatttgctctttgtgagtgcattttctgggagcagaaattaagtttcacctctgggtctctggtacagtccagtgacaacacttgtaggacgaggtgatcatgaaaaagacagattttctataccaggaattcataggttccttggtggggggtttaacttctgcaggatgaggatttggagctctgagccaaaatcatctaagtgtcaagaggtagcagtgctcctgcagccatctgggtggcatcgttttgtaggagttgttaagtttataggtgagaagtttagaaggcacctggtctaatccataagaaagatcagcgacgacaggatccaagcccccatgatgagtgggaggaattgtctgcccatcactttaactatctattattggctgacttctgggatactctgagtaagcaaggtggatgagattggggaaggacttagtgaccaaatgcaaacataaatgcgatgtgggaggcagcagagcctttctgttagagcagtttgtggtctgtacacctcctgtgtagagctgatgttttcacactcatccccgacaccctcctgctatttagggctaacgctcgacccatggattattgagggagggaaaatattgctgctgctgagaccctagggtttgatcacccatgccttctgtatctcagttcccatccagacacctgttacacatttttacagcaagcctcacactcacacagcagtagtttcaggagaaaagacttcctggaactattcaaatattttgtcaaagtctctctctctctctctctcattggaggctccattcttttttctaccttctggctttgaggcaagagaagaagattccatgaagctcacattccaacattggagacagcatggagctgtcagtgacctccccacttccaagcagaaatcgtcacatgtaagaaggtacgggtccataatccctcatctgaaatgcttggggccagaagggattcggaattcaggagtttgcagattttagaaaggtaacatggtgcataaatcctataacatgacatcctaggaagacttggggcagcactcataagcaaactcatcgatgtttctgcagtgaaacatacgaagattcactcagtgaaataaataaagactccaaatagcctcatctcagttcaggacaagctttgatgccatatgagtttgttcttcacttacraaaacaaacaaacaaacaaatctctttgattgtcagagctcttggattccctaatacagaggtgcaaatgtgggtgtgctaccaatgccacggctctgttggtgctcagctgagctgggcatgccaatatgagctttactcccactagcagtgctctagt

SEQ ID NO: 39144 - DNA, 638 bp, Homo sapiens
gtacacacattttaaacacaaaggataaaagcagatttgaaaaaatgttaaaatgatgtgactgtatctcaagaacctaggcttccattcccatggtcaccatccgggattcagatcttcagcattcctgtgcctagatcaccagggtcctacatggtatttctgcttccaggaccctgccccattgtcttgaccattcttcacatcatagcctagagctttgctgtgatcatcttgctcttctctcctataaacttcagtggatcagatcccaccacacacttaataaggacaaagccccttatgtggctttcttgtcccaacttgcctttattgccttttagggctttttactctttactatccaggtaatataaatttacttcgctcaaacaagggccatcctttggtgacttagtggctttgcttgtattaatcctcctgcctatatactcattatcacactcctcaccttcatttaccaaacatctgcccatycttcaaatcctagcacaagtgtagaatgtggtattcacctcctctaatcatttttaacagtgcttttgtagctcccagggacccatgctggcctatgttatgattatttatataattatttctggatttttaacctaatc

SEQ ID NO: 39145 - DNA, 399 bp, Homo sapiens
tgcccagggtctgaaaaccattgtttcagctattttatccagttttgtagttgaggcartagggtaaatccagttcttttaactctatcatgaccagagcagaaatctagcttacccttttcatctcctttaatactagttcaataatcacatccctaaccaaagtttgtgaatccctcttcttcccgagagaattgattgtgacttcatctgcagttttgcggttttttactttctctagcatcattatataacatctgtgttctatgttaagaggtttacaagttgcttctcaataaatcatgaatttcttgagagaagattttatgacacatactttttgaaatccccggttgcatagaacaaagtgtgtggtacataaatgatccttaataaagg

SEQ ID NO: 39146 - DNA, 399 bp, Homo sapiens
tgcccagggtctgaaaaccattgtttcagctattttatccagttttgtagttgaggcaakagggtaaatccagttcttttaactctatcatgaccagagcagaaatctagcttacccttttcatctcctttaatactagttcaataatcacatccctaaccaaagtttgtgaatccctcttcttcccgagagaattgattgtgacttcatctgcagttttgcggttttttactttctctagcatcattatataacatctgtgttctatgttaagaggtttacaagttgcttctcaataaatcatgaatttcttgagagaagattttatgacacatactttttgaaatccccggttgcatagaacaaagtgtgtggtacataaatgatccttaataaagg

SEQ ID NO: 39147 - DNA, 663 bp, Homo sapiens
gaggtcatagctgaaagaacatgaaggcaaacaggcagtatcccagtagacagagggaggcagaatatggcaattccttgttcattctgactgaccaattattatttctgtgtaccatctgtctgagtcatcactaacctctccataaggcctgtccaattttttttgtattctagtggaatttactggtttctattctttcctattagtctttctgaaaatwgtaggcactatcagtaatgaaatttctgctggaacaacatttcaaagctcataggcatatggacattgttttgactcttaattgttaaacaagtttggaggagcatccttccttctccttatcagaaaatgatggaacagaactgaattcccaaggtcctttagggttctaactttctggaaatagaattgtttaatatcttagaaaatccaggacataaaaaacattgatttcaaaagtctatacacttctagataagcagcctttctaattaaaatgtagagccaaaatgtttagtggaattgacttattttgacatgatattaacaagtcttccctttaatcagtgacttttttctaccttaaataatactttttaccaatagtttcctcaattcccttagctctaagaattccaaacaagctgttcatagtttatg

SEQ ID NO: 39148 - DNA, 663 bp, Homo sapiens
gaggtcatagctgaaagaacatgaaggcaaacaggcagtatcccagtagacagagggaggcagaatatggcaattccttgttcattctgactgaccaattattatttctgtgtaccatctgtctgagtcatcactaacctctccataaggcctgtccaattttttttgtattctagtggaatttactggtttctattctttcctattagtctttctgaaaattgtaggcactatcagtaatgaaatttctgctggaacaacatttcaaagctcataggcatatggacattgttttgactcttaattgttaaacaagtttggaggagcatccttccttctccttatcagaaaatgatggaacagaactgaattcccaaggtcctttagggttctaactttctggaaatagaattgtttaatatcttagaaaatccaggacataaaaaacattgatttcaaaagtctatacacttctagataagcagcctttctaattaaaatgtagagccaaaatgtttagtggaattgacttattttgacatgatattaacaagtcytccctttaatcagtgacttttttctaccttaaataatactttttaccaatagtttcctcaattcccttagctctaagaattccaaacaagctgttcatagtttatg

SEQ ID NO: 39149 - DNA, 2083 bp, Homo sapiens
cattagcttctagtaaacacggctgtgttctcactagagcactcgccgcccatgtagatgtcacgtgtcaattgtatgtcctacatttctaatacctggtccttgtcacattgttttccagctcgtattaaccgttggcttattagctgttgttgtatacctatacactgtggtggcattcaattttttccgaaaattctacaataaaagtgaagatggtgatacaccagatatgaaatgtgacgatatgctaacagtaagttcataacctttgatctcacataaacaaaaatgtctcctgcttctgcagtctaagtaattgtgtatttattctctaacagtacaaaatagaaaatagtctaaacaaataaaaagttgcagggctgtttaaagattcagcagttttcaattttagcagaacataaaggagcatttctgtcaattttccatatgtgctgcacagcctaataattagaattgctgagtaatgtacttagaactcgaaggagtaatgtcatcacttaagcctgttgttcacatatcccaggacaacgggtaaaactatttcccagagaacatttggaagccttagttttttgttcaccttaawgactttaactgaaattactaaatttcaaaaatatatctcttcctagaactactggtttttgcttttatattgagtatcttggcttaaatgtcttttttggtcttggttttcaaaaatcaacagctgttaaagctttcatattgctttatatcgctgttctacaacctgtctctctaatattggcagctgagaggtaatcatacatgagatcttagatcaggaaggggaacatgagacaaaatatatatcactagctggaaagagatgtatccttcagtaagctcctcacgaaaatacctacatcatttgtgttggggatgtaggtatagaggctgatataatgacacataaattactctagaaaaaatagcccaaaagattgatgagaatgaccagtattacaaagactaacaattaagataattttatactaaagaatgacaactcagtgggacagagtagttcagaaacagatgcaaatactcatggaaattaaaagatgataaagatcttttgaagtaatgaaatgaaaaataatttaataaatgacattagtaccatggacaagctatttggggggaaatgataaaaatggatgccaaccttgctttttaaataaattctgaaatgagcatattttaatgcaataagaaggaataatcacaagacagaatttgatgccttaaataatagtaatactcatttttacatggagaacggtctgagtatgacataaaactcaggatctatgaaagcataaacattatttgaaaaaagagcaactataaataaagttgtaaaggcaaatggtaaactgggaaagatatatttaacaccataacaaagggccattttccttaatctaccaagtccttatcacatcaataagaaataagccaatagaagaacaagtaagtcacatgaccagacaattcacggtaaaattaattcagtgggcttgcaaatttgaaaagacgctcagcctctgtcaaagtgaaagaaatgcaaattaaaacaatgaaaaaaacactttttacctatcaggtttgcaaagtattcacgtttgttaaaacccacagttggtgaattgatgggaaaaatcagcattttcatgactctggttgggaggttgaattgacaacaattttagagaagttttgtgacacctatcaaatttttaagtatatatatcctttgacctattaattccactgctagtactttacctaaaggtttactcacaaacaagcctctgtatgttcaagaacattagctgccctcacaagctaggaataatctaaatgatcattagtagtgtcctgattaagtcagttacgataaatccataacaagtatgcatctgtttgaaaatgagagaaattcatgtatacagatatggagagatatataaattacattttaattaaattacatttaatttaaaaaaacaagatcttggatcagtaatgatag

SEQ ID NO: 39150 - DNA, 557 bp, Homo sapiens
ttggctctggtaacctcaccctggggtttgtccagtagtcttctaatttaatggctttgccacttacagtgtttttagacaatagcttaactagagcaagctcacttcctcatataaaaattggggctaaacgtgcctattcatcagagatcttgctaaaataaaaaagagaccatgtgtgcaaatatattgaacrttgaccagcacttagtaggtgctaaagaaattttcctaaaatgccatttttcacaaaccgttatccttctcatggtactgcagtggcactcaagttcctgtggggtacacaaatatccttgaacttgccctcaagcctctccaacactgccacacttttccaacttggtcttgcaaaacaggaacccaccactgaaaccaaattttccttcccaagcaaactctgtttagtcttacctcagtgtgcttttttttttttttttgagacggagtctcgctctgtcgcccaggctggagtgcagtggcgcgatctcggctcactgcaagctccgcctcccgggttcacgccattctcctgcctc

SEQ ID NO: 39151 - DNA, 1835 bp, Homo sapiens
tcgagaccagtatggccaacatggtgaaaccctgtctctattaaaaatataaaaaaagtagccaggcttggtggcgtgcgcctgtaatcccagctactcgggaggctgaggcaagggaattgcttgatccagggaggtggaggttgcagtgcaccactgcactccagcctgggcgacacagcgagactccgtctcaaaaaaaaaaaaaaaaaaaaaaaaagaacagaaaagaaaagaaaagaaaaaagcttgagtcaactaataccatagattagaaacatcttcctagaagcatttgatagacaaggtttcttctactcgcaaatactattcttttgttggccataaatctgttattaacatatttacaggagattatatttgggtcacttatcccttctactccaaggccaccctgagatctgaaaatgggaaagaaagaaatttcaggccaaccgcttaaccccttcttttccagtaagagaaaatacaattaatttgtcaaatattttctctcaagaaactattaacatacttgatttttttacataatgaggtgttgctttccagtagtgccaaatttctattttcttgccttccttcacattccagtcaatgccggtagaagtattcattaatttaaatggcatttacaaaagccagttatgcatagtgaatgaggactgttttgtagtaataaacagttcagaatagtcttaaatgttcaactgattgatggatagatgataaagaaatgaagagataaaaatggatctagcatttgtgaaatgtaatgccaacccttcacaatattgtatacctctggatatttgagaataaaaacataatttatattatatcttaaaatattttataaattttccactataatgacaatatattatattaggcccattacagtatttaacataacatattatcataatttcattcttatttaaatattgttttaataattttattaccttaaagttgctacagtcagccaagtgaagcttccctaaattgaagtaataatttaaacacacaaaaaatctgtccattataattccagaaaggttgtctaatttgacattcctatgaatacattgttttatgtaatatatatatatatatatatwttttttttttttttgcaagggagtcttgctgtcacccagactggagtgcagcggcacaatctcagctcactgcaacctccacctcctgggttcaagcaattctcctgcctcagcctcctgagtagctgggactacaggtgcccaccaccacaccctgctaattttttttttgtatttttaggaaaggtgcggattcactctgttggccaggctggtcttgacctcaagttatccgcccacgttgacctcccaacgtgctgggattacaggcatgagccattgcacctggcccgtgataaatcttaaatatggcaaaaaaaattaacaattttaccaaaatagaggaaataacttatataaaaatagataatatgtagatagtgtttttatttttaattattcatcctaacattgctagcccagcttctgagcacccaatcatgaataatggtagttaattctatcttctttgatcttgtgccatcttccagataaaatcacagatttaaacacatttgttaagtataatcatcatacagaatttgtcaaagtagaagaagaaaacattttatttcacagttaacttgacgtatagtaacttttaaatattttggcctatgtaactgcggtttttgccttttaaaagtaattgtattatatgcagaacacacatatatgtatgtgtgttgatgc

SEQ ID NO: 39152 - DNA, 619 bp, Homo sapiens
gacttctaatactatattggataaaagtggcaggactgggcatccttgtcttgttttagatctcagagggaaggctttcaattttttgccattgagcataatgttagctgtattacactaataactttatctaccttcatccatcttgaaatgtaaaaaatctatttgtgcaaagaaccatttacgcctggggtatattaacatcctgtaaattagtgttctgaaggctacacttaagaaacgatggcctaagggaataaagggctataaatcagatatgccaccatgcagatcayctgaaaaataacgtaagattttttaacgtgtctagcgtcacaaattttctcactagatgatatgcaaatatttctctaaattactcttcaattttatttctggcctaatacttcagttacaattacagagacaatgcaaaaccactcaaaatttagggatattgctcgtctggtataagtctccacatgttacacttcttgtcacctttcttccttttttccacattctgctttggccttaatgattcctgcgtgaaacgagagaagtggaggtaattccacttgaaaataaatatgctgccttatcttatcctggatactta

SEQ ID NO: 39153 - DNA, 546 bp, Homo sapiens
tttctattggttagccatgagtgcctttataacagcaagaagaaactattttataactttcataacatgacagttaaactctttcgatgtgcttcactatttgtgtgatttgtcttgtactgttgtcttttgcaccgtcatcatagggtatgtttgaacgttagctgtaagcctatgccagagaaccattggttggtcccattgtaccactgtcatgggttgtctgatgttaaggaaatgtagccatatttcttgtgctgaacagatgttaagggaataaaaagcccggcataggtggatatgtgtggaagaayaaatatcttggtttgtgtttgcttctctgatgtttcatttaattgcttattttattttgacttgcctttgatatatccaatgaagagcaaattcttcttgaaggacaaaatacagggtttttttcacagaggtagatacgttgatctttttgatattgtctctctcttcagaaaattaatagacatttctaaaataagcctacactcatttttctttacaaaaataacaata

SEQ ID NO: 39154 - DNA, 1102 bp, Homo sapiens
tttttttttttagtgggcctgtgtcactgggctatgacactcagatctgtttcttagcctctgtcactttcccttaggtgaggtagaaaggctagaacaactggagttggccaattgccacttgcccatggagataaggctttggtgaagtccttcccctaaaagaacaggctgtgatgtggagaatgatctggggtatcgggaaattgttacttttccttcccactgctgggagcacaaggggatttttcttagatctttactgtgaaattagaacaagtatatttattatttctttatgggattttgattccctatctttgtgagaaatatcacttgctcctaggcagtacttatagttctataaactgtaaacatttgttttttttagtatttgtgtttaggaatttaatgtatttggaaattacatcttatggatatccagatatcccggcactatttattaagttattcatcttattccaactgcattattctatcacctgtaccttacattaaaatcatattgttagtgagtatatttctgacatttctactatttttcattatttaagttactgtttaaacattattttattttattagcagttttcttcttgtatctaataaggttaattttccccaacatatactcactgttgttttttaaaatctttttctttgttcttcctgactagatttatttggattgggttggattgggcacataaatatatttcataaaatattaaatatactcttaattacataaaaaatcccaccaagggcttgacatggtgggtcacgcctgtaatcccaacactctgggaggccgaggtggatggatcgcctgagttcaggagttctagaccagcctggccaacacggccaaaccctgtctctactaaaaatacaaaaaattacctggtgtggtggtggatgcctgtaatcccagctactcaggaggctgaggcagagaatcgccygaacttgggaggcggagtttgcgatgagccgagatcccgccattgcactccagcctgggcaacaagagcaaagctctgtctcaaaaaaaagaaaaaagaaaaagaaaaagaaaaaa

SEQ ID NO: 39155 - DNA, 822 bp, Homo sapiens
atgttaactacctaagcggaactgtgagcagagtgcacctcaacccactgcttcttcctcccttcttctcctgctggcagccccttcagatgctcactcctcagagaaccccaatataggtcccaagcaragaggtaacctagatcagtgccagaactctctctcccctggcacatacatgtccctgctaagaagggcctccctggggcaaggaagacaggcacagtccctgggcacagcctcctgcctctgggcagtggcagtgtgccaggcgttctggctcccttgcccctgggatctagtctcttatccacccctcataggacatgaccaaccaagtaaccctgagggggaagcaacagcaaacaggagtcacaagaggggaaaaaaaaaaaaaaaaagagaaagaccaagggagcagggagggcattgctcacgggaagacagtgcaccatttactaatggactcatcagctattgataggaaaggcctttgtgccaccctattgcctggcctggggagctgtgctgtgatgggatctgagcaatcatggtgggccacaaacaattcctgagccagaatttagacctcaactcaaggaattagtggggtggtcaccaggctttctggggtactaccccttctctaagacagaggctgccctgtgcataggaaaatgggctgggaacagcaaaagtttccttcatgaggaacagcaaaatgtttctcatcccaacatggcccaaaacacctgccattagagccccttctgcagaaaaggcactgtgcatctccaggttcccgagaaaaaacccacaatt

SEQ ID NO: 39156 - DNA, 603 bp, Homo sapiens
tctttgggtgtggagaccaggaaggaggcagctgcagagggtggttggaaatgaagtcagaaaggtgtccaggggacagacggtacagagccttctgggycataggacttcaggcttagttctgagagtagtgaacaactactggactttgaacaaaggcataaaacaactcgatttatgttgtttataaaatcactctggcttctgcgagggcatgaataggaacagggaggcctgtgaggagcccaggtgagagtagagcatctggggccaggtttgcttcgcctgccggaagagataagacatctggttcagaagatggtctgaaggcagaggccataggaatccctgttggattagccaaaggctgtgtcccggggtttgggcctgagcaactggatgagggaggagtggtgctactcagagggatgggggttcaggtgtgggggcatgggaaggaagcaagaatttggtttgggatgtgccatgtttgagctgccaattagactctaagtcatgatgttcggtgcacctgagcagggctctctaccctctccatcctctccttatgttcctttcgtggctctcctgggtctttttccc

SEQ ID NO: 39157 - DNA, 649 bp, Homo sapiens
gactagggagcccaccatcggatgggagatggaaggatctaatgtgtgaccccactgtgaaaagtacttcaggaggaagtccaaagggatgatgccgcatgctggagggggccaggtggcaggggagtatagcccctgggagtgcatgtgtgaccatcctgggctcaagtcctgggtygactgcaaagcggtgtgaccttgagcaagttacttctccatgtctcattttcctcttccaaaggcttgaggcagagatactgagagggtcatgtaaggatcaaagataagagtatcaagtgctggcatgtgtttggctttctacaaatgtgactcacagatgactacagttgtgtgactctgaatgactcagttcaatccctggttctatttccttatctgtaaaatgtgagatttacaagctcatggtgctagtccaaatctcaggtgtgcacagagcagcaggtcttttcgttttctgtaaatcagttgaatttctgcagtgtgcccccatctttcaagagcacagaaagaggtggctgagtctggcatccagggccattgtccaggagagttcgctgctgagtcaggctggtggtgcatccctcccttcctcccccactggccctcctgcctatccctgccttcctcc

SEQ ID NO: 39158 - DNA, 1250 bp, Homo sapiens
tggtgggaagagaaggtagtctgtatttatgacagttcctagacaagtggggctaagtaaatatttaccaaattcactttaatttgtttgctcatctcatacacatacccccacaatgcccatttggctgggataatgttttgaaatactggtttgctattactttttctccctgtacttttctttttgttctctctttagttcaagtaggcaactagattgtgctctttactcaagataaatacggaacaaagaggacagtagcttacaatttttctattatcttccaaagcctgatctctggagttttatagaggggattaaragtagaggatccccaaacattgacagtgtattagtcagaaacatgaaaagaaaaagatttcctcccaggagaaaaaaatacaagggatttcttctgggtggagaaagagagagaaagacagagacagagagagagacaaagagagaaaaagaattctgtgggtctacagaatatggaagagcccatcagtaaaaccatcagggtaggcagcaaagcccctgaaaggtaagaactgtaggcagtagaaaggcagacaggaacacagagagccttgctgaagattgtggaggcttaataagcctgtggactgacgagctttgtaaacaaggatgataaatatctcattgacaatcagtgtaagaaaaggctgtggatcctggaggctcactcctttccaccctctgtgatgtggctggaactatggcagacactggaggactctctctctgtctctctagtttgaggtgaactcctgctctccttcctcttggatgagatgctgtctatatctgcaaatcgtctctggactctggggttaaatcttgagggaataagtgaaaggaaatgttaggcatgcaactttccgctggttattctgctacatccatcccctgagactacaaatacaaaagagcacattattcattagacaacttggaaagaaaaatggaaaatacaagaagaataaaagataaatatctccatatgttatctcagccatattctttcctaaataaacatcttatgtctttcaaaatcaaatgtacttttcctaaacgctactcctgccagctccagtactcccaagcctctgcttcttacatcctcagcatctggggtaggggggtatctgctccaggctccctaaggtcaggttggtgagcctaatgtggcacatttctctcctttccagaatgtgtatgca

SEQ ID NO: 39159 - DNA, 546 bp, Homo sapiens
tggaagattcattttagattacttctagtgccttatgaagaaggtctacccaccatcactacccaagaaagcaagttaatgctttatgtttctcctacttcttggaccttcccaactctaccagcccctrccccaaccaatcacagccctagctcacccagtagtaattttgcttcaagtcaaaccctgattcacctgcctttttgcttagtagtgtctttaacctgctctcctagtgagcactcaagaatctttgacattaaatgggtactgcacccctacctgattgaaatggctttgaccttgacaaaaaaagctgatttcacccaatagggcttcctatttttggaaattcaattcacactgacttatcaggggtgagggggagaaaagcaagcaagacagaggttggtggtggaagtaacttgagtccaagacggagacttatagctctatacatggcaagacacccactggaaatctgttgggatgaagaaatggtacaccttctgggagtagttagcccaaagtaataaagtggtcagg

SEQ ID NO: 39160 - DNA, 546 bp, Homo sapiens
tggaagattcattttagattacttctagtgccttatgaagaaggtctacccaccatcactacccaagaaagcaagttaatgctttatgtttctcctacttcttggaccttcccaactctaccagcccctaccccaaccaawcacagccctagctcacccagtagtaattttgcttcaagtcaaaccctgattcacctgcctttttgcttagtagtgtctttaacctgctctcctagtgagcactcaagaatctttgacattaaatgggtactgcacccctacctgattgaaatggctttgaccttgacaaaaaaagctgatttcacccaatagggcttcctatttttggaaattcaattcacactgacttatcaggggtgagggggagaaaagcaagcaagacagaggttggtggtggaagtaacttgagtccaagacggagacttatagctctatacatggcaagacacccactggaaatctgttgggatgaagaaatggtacaccttctgggagtagttagcccaaagtaataaagtggtcagg

SEQ ID NO: 39161 - DNA, 1076 bp, Homo sapiens
atagtttctggttctttctggtcaagagaggctaaaggaaaggtttttaaagatattaattttcttagtcaagtaacttaacctctcaaggcctcagtgtcctagactagcacagaacaagcagatgaaacaaagtttatatcagaatgtcaactgaaaaagtatcatttaccataaatggaagataattgtattaaattctagttagatgctaaaacttcaagaacttttagagtctgtacctgcattctgttaaaaatatagattaaaaaatgctaacatgttaacacaaaggactttccagaaagacttaaagaaaagtgaaaggggaataactgtcttgcaatgtaattcattgtcgtttaagactgggtctatggaacaccctaaatcacctggttccatcacgttctttttaacatggagatggatagtttttccccatactctatatattgagcattctatagttcatgatttttctgcatagagaattgttcaagccgggggtgcaggctcaccgactggatagtgaatcaagaaaatagtgtgttcattagttcatcattaccctgagtttccaacaagaatttagtacaggaaagtagacagcggagctgggagccatctatttgaaactgtcttaagcaaaactaagaaaccgagtaagcttgcttttggtgtctttcatcccttcttgtgtgccccctaattattcactccccaatgcccagacattatgatgccttctcctgctcagagacctttctgggaggaagacctactcagacctggtattccctcatcctaggctctaccctatttttcatccagctgttaaagctgagtgactaatttcacacttatgtacgaatgacccatractggcttaatgctgtgaccatcttgggggtattcaaagctgataaacacttttttaagttatataataatcaaagaagcttatctttctgctttatttcaaatttcaccccacaggccttacttatttttaagatcaatgattttgatgggcccccccttcccactcttaattcagggtatttctggcccca

SEQ ID NO: 39162 - DNA, 1135 bp, Homo sapiens
ctgcgtgtgatgaaatatgatgtgatgttaaacgtctcttcaggagctcctcatttttctctagtgatctataaagttaaaaattaataataattattatcctgcatattagctgtgacctgaaacatagctttgtatcatgtattgtgaaaaaaaaatgacaacctcattcctctttgtccttaataatagaatatgaatggctgagaagccttctccatattgtgatagttgtgttttgaaggggaggtgaggaagtagtgtgtgccttcttcctgcatcccatgggcataacgcagaatacgcacttaagtaggtgtgtgcacattcaatgtgtgttaagtgtgattcggctaaaccagggagtggcaatactgttctcaatgttgtcatattgtctttgattcatgcctttgaacatgtccagagggcatgaccaggagagtaaaggatttggaatccatacatagtgaaatggttggacattgactctatttagcccagaaaagggaagatttaaagaggattggtgactggcctcaaatacttgaagaactagtgatctgttccatgtggccccagatagtaacgctacaattggagagtggagctcccaaagaggtatgtctagaccaatataagcaataactgccaactagagggagctggctggaagcaatgagttcctcatcccaggggacttcaaggggaagcttgatggcagctcctctgatgatattaagtttcttccctctaagactcctgaaatctaaggtaatgtgaagtggtatagatgacttacaggcagctgacccagcatgtgcactacatgcccatggggaagggcatgaagggagaattgcttgtttrgttaagctgggatcagttggaaagtgtttctctcttgtaattcatttgaaaagttctcattgcaaggtaggatttttttgttgttgttaacagctacttagagaaaatacggtaaaagcccagctggtaggtaatgggaggtcatagatggggaaaaaactcaaaaaaaaaaaaaaaaagaaatggttgtacagtatggatgttaaataaacttgcctgattagagtgaaaggagtcaaggaaaattgggtcatcagtaaacaat

SEQ ID NO: 39163 - DNA, 576 bp, Homo sapiens
tggggattggtgagtaagccaatatgggcagagttgattgtgaataaaccaatgcccaaacaacacatttcctctaatatttctcctactcaaagagttatatgcccaactttatcctaagggcctttgtgaaagtagaggtaatgactcatctggtaacttaatttcctagygggtcatcatttcaagggcccccaagaccaccctcatgtttagtgatttgctagaaggattcaaaggactcagaagtaaatgtattcacagttacagtttcttgcagcgagaggacacaaagcaaaaccagcaaaagcaaaatcagatacaaagcaaaatcagctacaaagcaaaatcagcacatggggcaaagcccaaaggaaaccagacataagcttccagggtcctcccagtaaaatggcacaggatgcacttaacagagcctacggtttttattggggactggtcatagaaaccctctgcctagcacatataaaatttcagacttccagcaggacagtggtattcagcataaaccatattgtttgtacaaacagtctaggcacagtaaaccatccttat

SEQ ID NO: 39164 - DNA, 576 bp, Homo sapiens
tggggattggtgagtaagccaatatgggcagagttgattgtgaataaaccaatgcccaaacaacacatttcctctaatatttctcctactcaaagagttatatgcccaactttatcctaagggcctttgtgaaagtagaggtaatgactcatctggtaacttaatttcctagtgggtcatcatttcaagggcccccaagaccaccctcatgtttagtgatttgctagaaggattcaaaggactcagaagtaaatgtattcacagttacagtttcttgcagcgagaggacacaaagcaaaaccagcaaaagcaaaatcagatacaaagcaaaatcagctacaragcaaaatcagcacatggggcaaagcccaaaggaaaccagacataagcttccagggtcctcccagtaaaatggcacaggatgcacttaacagagcctacggtttttattggggactggtcatagaaaccctctgcctagcacatataaaatttcagacttccagcaggacagtggtattcagcataaaccatattgtttgtacaaacagtctaggcacagtaaaccatccttat

SEQ ID NO: 39165 - DNA, 544 bp, Homo sapiens
ctgaagcmtctctagcaatgcttccagtacagcctggggaaccatgagccaattaaacttcttttctttataaattacccagtctcaggtaattttttatagcagtgcaagaacagaataatacatacatactcacacatacagggaccatttaagcatgcccatttgcctaacatgcacaggtttgggatgtgtgaggaaaccagagaaaacccatgcagacgtggcaagaatgtgcaaactccacacagacagttttttatgagagtgagttttttttttttgagttttttttttttcatcatcaatggtataaggaaatgacattgaacaaaacagtgttatttgaggacctgttgtacttcaaatcttttcttgctccaatatttttatctccaactactgttacacatccctacaattcatccttttcttaaaggattattagtgaagtctaccagaactaatattgattcctatttaaagtaaataaaagtttaaagttgccatatacagcacagctaaaagttaatttacaatagaa

SEQ ID NO: 39166 - DNA, 1323 bp, Homo sapiens
ggcttttcaaaaatatattacaaagttaataaagcgtatttttcttttccaaggccaaagtagtggagaggtgctgacagtccctcctcagcttcaggctttgacagtaagagccttggctacaacaaaaccaaagcgtgtttgaatggaagagcagaagagtgatgaagccatgttggtcgctgacagatatatattcctaagtacatgagtcagttctcagagccttctaggaacaactgggtacgtgagccacatttgccaccagccatcctagcttacaaatctcaggaaagccagtgttacttgtcatatgttctcgaatagttaaccagtgctgttactaaggctttatgcttacataaggtaacgaccagcattaaatatttagattgccattctaatatgtaagaatagaaaatctttttgttgttgttaacaaggatgcaggctatagtagagaaagccttcatgtaggagttatgatattagcatatattagcaaaatattagcatattttgatttagtttaggactcaattgttctgtgtcattggacaagtcatttaactttgcctacttttcttcctctgcaaaatcaaggaccttgactgcgttatccctaaggtttctgctggttcttatatcccttagtcctaattacaagtaacttatccaatttctaataattaacatttatctgtctttactggattaggtgttaggtaaatagattgcctttatgttagtcatacattcctataggttagtcatatgtccctgcctagaatataactttttagtacagggactatgttccacacctgcttcatattcagtgtagcaataagaaaagtattggaaaaaataaatacataatacwcattaaagtgtagtaaactgatttcaagtatctcttatgtgtggctgtgttttaatatttgagttatggcctggtgtggtggctcacgcttgtaatcacagcactttgggagactgaggcaggtggattgcctgagctcaggagtttgagaccagcctgagcaatacggtgaaaccctgtctactaaaaatacaaaaaattagctgggcgtagcagtgtgtgcctatagtcccagcaacttgggaggctgaggcagaagaattgattgaacccgggaggaagaggttgcagtgagtcaagatcatgccactgcattccagcctgggtgacagagtgagactccatctccaaaaaaaaaaaaaaaaaaaaaaaaaaaaaaattgagttattttaagatatattttaatattacagattgtaaattatagttttctgtttgg

SEQ ID NO: 39167 - DNA, 632 bp, Homo sapiens
tgggatggcaccagtcagcatagacccattaaaattcttttccatctgtcccctgctgaagaccagaggacctgacactgttagcaggcctacttcttttctttccttctttccttcttycctccttcctttctttctttctttctttctttctttctttctttctttctttctttctttctttctttcgttcgttcgttctgttgtttctttcgacagagtctcactctgttacccaggctggagtgcagtggtgcgatcttggctcactgcaacctccgcctcccaggttcaagcgattctcctgcctcagcctcccgagtagctgggattacaggcgcatgccaccaggcctgactaatttttgtatttttagtagagatagggtctcaccatgttggccaggctgtatatgtactttaaaggcgctgctctctgagcccagtgtcttccccataggcctgccctgcaggccctttcccaacctacctcctcttgctgtcagtgtccacagagctgaacattgctgcttggccaggtggatgagtatgagggaagaactgcttatcctggccagtccctgggcatttttcttaactgagaaataaaacaaggagccattgttcaggcaa

SEQ ID NO: 39168 - DNA, 632 bp, Homo sapiens
tgggatggcaccagtcagcatagacccattaaaattcttttccatctgtcccctgctgaagaccagaggacctgacactgttagcaggcctacttcttttctttccttctttccttctttcytccttcctttctttctttctttctttctttctttctttctttctttctttctttctttctttctttcgttcgttcgttctgttgtttctttcgacagagtctcactctgttacccaggctggagtgcagtggtgcgatcttggctcactgcaacctccgcctcccaggttcaagcgattctcctgcctcagcctcccgagtagctgggattacaggcgcatgccaccaggcctgactaatttttgtatttttagtagagatagggtctcaccatgttggccaggctgtatatgtactttaaaggcgctgctctctgagcccagtgtcttccccataggcctgccctgcaggccctttcccaacctacctcctcttgctgtcagtgtccacagagctgaacattgctgcttggccaggtggatgagtatgagggaagaactgcttatcctggccagtccctgggcatttttcttaactgagaaataaaacaaggagccattgttcaggcaa

SEQ ID NO: 39169 - DNA, 632 bp, Homo sapiens
tgggatggcaccagtcagcatagacccattaaaattcttttccatctgtcccctgctgaagaccagaggacctgacactgttagcaggcctacttcttttctttccttctttccttctttcctycttcctttctttctttctttctttctttctttctttctttctttctttctttctttctttctttcgttcgttcgttctgttgtttctttcgacagagtctcactctgttacccaggctggagtgcagtggtgcgatcttggctcactgcaacctccgcctcccaggttcaagcgattctcctgcctcagcctcccgagtagctgggattacaggcgcatgccaccaggcctgactaatttttgtatttttagtagagatagggtctcaccatgttggccaggctgtatatgtactttaaaggcgctgctctctgagcccagtgtcttccccataggcctgccctgcaggccctttcccaacctacctcctcttgctgtcagtgtccacagagctgaacattgctgcttggccaggtggatgagtatgagggaagaactgcttatcctggccagtccctgggcatttttcttaactgagaaataaaacaaggagccattgttcaggcaa

SEQ ID NO: 39170 - DNA, 632 bp, Homo sapiens
tgggatggcaccagtcagcatagacccattaaaattcttttccatctgtcccctgctgaagaccagaggacctgacactgttagcaggcctacttcttttctttccttctttccttctttcctccttyctttctttctttctttctttctttctttctttctttctttctttctttctttctttctttcgttcgttcgttctgttgtttctttcgacagagtctcactctgttacccaggctggagtgcagtggtgcgatcttggctcactgcaacctccgcctcccaggttcaagcgattctcctgcctcagcctcccgagtagctgggattacaggcgcatgccaccaggcctgactaatttttgtatttttagtagagatagggtctcaccatgttggccaggctgtatatgtactttaaaggcgctgctctctgagcccagtgtcttccccataggcctgccctgcaggccctttcccaacctacctcctcttgctgtcagtgtccacagagctgaacattgctgcttggccaggtggatgagtatgagggaagaactgcttatcctggccagtccctgggcatttttcttaactgagaaataaaacaaggagccattgttcaggcaa

SEQ ID NO: 39171 - DNA, 632 bp, Homo sapiens
tgggatggcaccagtcagcatagacccattaaaattcttttccatctgtcccctgctgaagaccagaggacctgacactgttagcaggcctacttcttttctttccttctttccttctttcctccttcctttctttctttctttctttctttctttctttctttctttctttctttctttctttctttckttcgttcgttctgttgtttctttcgacagagtctcactctgttacccaggctggagtgcagtggtgcgatcttggctcactgcaacctccgcctcccaggttcaagcgattctcctgcctcagcctcccgagtagctgggattacaggcgcatgccaccaggcctgactaatttttgtatttttagtagagatagggtctcaccatgttggccaggctgtatatgtactttaaaggcgctgctctctgagcccagtgtcttccccataggcctgccctgcaggccctttcccaacctacctcctcttgctgtcagtgtccacagagctgaacattgctgcttggccaggtggatgagtatgagggaagaactgcttatcctggccagtccctgggcatttttcttaactgagaaataaaacaaggagccattgttcaggcaa

SEQ ID NO: 39172 - DNA, 632 bp, Homo sapiens
tgggatggcaccagtcagcatagacccattaaaattcttttccatctgtcccctgctgaagaccagaggacctgacactgttagcaggcctacttcttttctttccttctttccttctttcctccttcctttctttctttctttctttctttctttctttctttctttctttctttctttctttctttcgttckttcgttctgttgtttctttcgacagagtctcactctgttacccaggctggagtgcagtggtgcgatcttggctcactgcaacctccgcctcccaggttcaagcgattctcctgcctcagcctcccgagtagctgggattacaggcgcatgccaccaggcctgactaatttttgtatttttagtagagatagggtctcaccatgttggccaggctgtatatgtactttaaaggcgctgctctctgagcccagtgtcttccccataggcctgccctgcaggccctttcccaacctacctcctcttgctgtcagtgtccacagagctgaacattgctgcttggccaggtggatgagtatgagggaagaactgcttatcctggccagtccctgggcatttttcttaactgagaaataaaacaaggagccattgttcaggcaa

SEQ ID NO: 39173 - DNA, 562 bp, Homo sapiens
acggaccaatcagctctctgtaaaatggaccaatctcagcaggatgtgggtggggccagataagagaataaaagcaggctgccaagagccagctgcggcaagtcgctcaggtctccagcttagttgttttgctctctgcagtaactcttgctggtgctaactgtttgggtccgcactgtctttgtgagctgtgacactcatggcgaaggtctgcagcttcactcttgaggccagcaagaccacgaacccactgggaggaatgaacaactccagacgcaccgccttragagctgtaacactcaccgccaaggtctgcagcttcactcctgaagccagggagatcacgaacccaccagaaggaagaaactccaaacacgtccgaacatcagaaggaacaaactcccgacacaccatctttaagaactgtaacactcaccgtgagggtccacgttttcattcttgaagtcagtgagttcaagaacccaccaattgcagacacaataactgtttcagtagcataactgaagtcagggcaaccagacaaaatattttcctcgttaca

SEQ ID NO: 39174 - DNA, 1101 bp, Homo sapiens
acctttttggcaccagggatggattttgtggaagacaagagggcaggtggtttcaggatgaactgttccacctcagatcatcaggcgttagattctcataaggagcgtgcaacctagatcccttgcacttcacaatagggcttgtggtcctatgacaatctaataccactgctgatctgggacagagctcaggagctcacaggagcagggctcagggctggggtccctgccgtagagtgattgagagacaggactgccacacatgaaagagagagaaccgttatgtaagtcagcactaaatcgtgtgctcagaattgttgctgcctcaggaattcaggaaacaggaaagatctgtgaggcctggagttgagagagaggccagtgcttcctggagatgggagctagcccagagggatggtgagatttgaacagaaaaaagtgagagagatgggcatttggcaggtgagtgaaggcatgtgagaaagccattagggcgcacttgcaggacagtggtttagggtaaaatgaattgattgggaagctgggagggaaaaggaaaaatgagcagtgaaatgataaagccatagtagaataaacctccagttttccgaggataaagaaatagttttagtctggtctttcatttgtaccctgccttccccctggaagttgtttatttgttgattgagaccgggtcttaccctgtcacccaggctggagtgcagtgccactatcatagctcactggagcctcgaacccctgtgctcaagcaatcctcctgtctcagcctcccaaataactgggactacaagcatgcaccaccactcctggccccctggaagtaattttaggtagctatgaaagttattgtcgaagtgttggagtrgaattttggcttagttaaaataattgagaacgggaaggatggatgactttgacattaatttaatttgatgactacaatccatctattaaaatggcattccgctgacttgtttttctttttcctttatccctttgctcttcataatattctcaggactttattgctcagtattggctataatgaaattgtattatcattctacatatcaaagtatt

SEQ ID NO: 39175 - DNA, 650 bp, Homo sapiens
gtgagaacagtagttcgagaccagcctggccaacatggtgaagccctgtctctactaaaaatacaaaaattagctggatgtagttgcgcgcgcctgtaatgccagctacttgggaagctgaggcacaagaatggcttgaacctgggagacggaggttgtagtgagctgagatcaggccactgcactccagcctgggtgacagagcaagactccgtctcaggaaaaagaaaaaagaattagcttaataatttttaaatttttggcgaacttcttgtcaagtctactaaagtgttattgtttttatctgtaatttggctgccaaaaagctagtactagaaggagaaacctcagctctgttgtcattttcttgttgttcacttgtgcttgcattattggtattactgttatggaatctttacaggagtctttttaagacatgtctatttcctagcggttgatttggctaaaactagataataatttatagattcatttaattatgcacccataactggattaatgattatctgccaaagcgaacaaacaagtgaaaaagccactggcaatccttctgttttcttcagtatacctgtgcatgacctccttagcaggggtacygcatcaatccatttattaaatactagtaaaat

SEQ ID NO: 39176 - DNA, 663 bp, Homo sapiens
tgccggccagggccggtggctcatgcctgtaatcccagcactttgggaggccgaggcgggcggattacctgaggtcaggagtttgagaccagcctgaccaacatggagaaaccccgtctctactaaaaatacaaaattaggcaggtgtggtggtgcatgactgtaatcccagctactcgggaggctgaggctggagaatcggttgaacccgggaggcagaggttgcggtgagccgagatcacaccattgcattccagcctgggcaaaaagagcacaactccgtctcaaaaaaaawaaaaagtaaaagaggaactaccatttcttggtgaactattctttcaatgctttctcattgcctatgcaagtccagtgtttctgcaagattcccatttcttgcagcaagtggaagactgacaaagggttgctgtatttcttcctgctccaagaaaaagattaacattattttactacaacccacttggaacattgctctgttgaactgttagtgggaatacaacctagcttttctttacaaatatggttgagttacaaaataatatgatggactaaaatagaaaggacaccaaatcctttatgcttctcaaaatcaagtgattaatggaaaagacatctgaggagaatatggcaagaaaatggcatcat

SEQ ID NO: 39177 - DNA, 663 bp, Homo sapiens
tgccggccagggccggtggctcatgcctgtaatcccagcactttgggaggccgaggcgggcggattacctgaggtcaggagtttgagaccagcctgaccaacatggagaaaccccgtctctactaaaaatacaaaattaggcaggtgtggtggtgcatgactgtaatcccagctactcgggaggctgaggctggagaatcggttgaacccgggaggcagaggttgcggtgagccgagatcacaccattgcattccagcctgggcaaaaagagcacaactccgtctcaaaaaaaaaaaaaagtaaaagaggaactaccatttcttggtgaactattctttcaatgcyttctcattgcctatgcaagtccagtgtttctgcaagattcccatttcttgcagcaagtggaagactgacaaagggttgctgtatttcttcctgctccaagaaaaagattaacattattttactacaacccacttggaacattgctctgttgaactgttagtgggaatacaacctagcttttctttacaaatatggttgagttacaaaataatatgatggactaaaatagaaaggacaccaaatcctttatgcttctcaaaatcaagtgattaatggaaaagacatctgaggagaatatggcaagaaaatggcatcat

SEQ ID NO: 39178 - DNA, 560 bp, Homo sapiens
ttcattgtattattgataatggtagttttgagggggaaatttctgtttaacatttcagaaaagtcaatattatgacaattccttctaagaactttctatgcagcattataggtatagtaattgatagattagaatactatggataacrtgcatagtatgtcaaatgagagaagccatttgccaaaatacatgcatcatatttgcaattccatgaaataaacaggagattttaaatgttctgttgaagaaaaaggcaacgaattataaacatgagcctcaactttaaacaaaacttactatcttacatttagtatatattttaatacattctaagtatttagtcctaatactcagatttttttttttgaaaatgttgggagtatataataatagtgggattagatttggtatcatagctgtttgtgaaaacattctcccttttcgctagaaaagattttagtgagcgggtacagtaggcagaaaaatataacccctaagattcctggcccctgatgtgcacactctgtattattccctctccttcaacatgggtgagacat

SEQ ID NO: 39179 - DNA, 560 bp, Homo sapiens
ttcattgtattattgataatggtagttttgagggggaaatttctgtttaacatttcagaaaagtcaatattatgacaattccttctaagaactttctatgcagcattataggtatagtaattgatagattagaatactatggataacgtgcatagtatgtcaaatgagagaagccatttgccaaaatacatgcatcatatttgcaattccatgaaataaacaggagattttaaatgttctgttgaagaaaaaggcaacgaattataaacatgagcctcaactttaaacaaaacttactatcttacatttagtatatattttaatacattctaagtatttagtcctaatactcagatttttttttttgaaaatgttgggagtatataataatagtgggattagatttggtatcatagctgtttgtgaaaacattctcccttttcgctagaaaagattttagtgagcgggtacagtaggcagaaaaatataacccctaagattcctggcccctgatgtgcwcactctgtattattccctctccttcaacatgggtgagacat

SEQ ID NO: 39180 - DNA, 1048 bp, Homo sapiens
ttttataaatcaaaacgcaactgcatgtgatgagaaaatgcaaacttttcaaaaaccaatacatactggctctgagttttgttttttttgagacggcgtctcgctctcttgccaggctggagtgtagtggcgagatctcggctcattgtaacctccacctcccgggttcaagggattctcctgcctcagcctcctgagtagctggaactacaggcacacgccaccacgcccacctaatttttgtatttctagtagagacagggtttcaccatgttggccaggatggtctcgatctcttgacctcgtgatctgcctgcctcggcctccccaaagtgctgggattactggcgtgagccaccgcgcctggctggctctgagtactcttaagacacttgcacaaggctgtaaattttcaaccatccaaactttggaattagtagcataattcttgagaaccatgtatatcaagacccaggattgttcaactttaaaacctgacattttattggtgatattcctgctcttctcaaaagataaaacattttgagcaagaagaaacccccacatgattatcctaatctttgtgtctctgttttacactctgctggttgagtctatgacacttaataagaaaaagctggaatttatttatttatttatttatttatgagatggagtctcactctgtcgcctaggctggagtgcagtggtgtgatctcggctcactgcaacctccacctcccaggttcaagcgattctcctgcctcagcctcccaagtagctgggactacaggcrcccaccaccaggcctggctaattttttgtatttttagtagagacagggtttcaccctgttagccaggatggtctcgatctcctgacctcgtgatccgcctgcctcagcctcccgaagtgctgggattacaggcgtgagccatcgcgcccggcctagaatttattctgagcagccagcttgtttggtatagctgtctctttgcccaaagtagttggcatcccctaaattaggaacaaagccagagctggatgt

SEQ ID NO: 39181 - DNA, 1048 bp, Homo sapiens
ttttataaatcaaaacgcaactgcatgtgatgagaaaatgcaaacttttcaaaaaccaatacatactggctctgagttttgttttttttgagacggcgtctcgctctcttgccaggctggagtgtagtggcgagatctcggctcattgtaacctccacctcccgggttcaagggattctcctgcctcagcctcctgagtagctggaactacaggcacacgccaccacgcccacctaatttttgtatttctagtagagacagggtttcaccatgttggccaggatggtctcgatctcttgacctcgtgatctgcctgcctcggcctccccaaagtgctgggattactggcgtgagccaccgcgcctggctggctctgagtactcttaagacacttgcacaaggctgtaaattttcaaccatccaaactttggaattagtagcataattcttgagaaccatgtatatcaagacccaggattgttcaactttaaaacctgacattttattggtgatattcctgctcttctcaaaagataaaacattttgagcaagaagaaacccccacatgattatcctaatctttgtgtctctgttttacactctgctggttgagtctatgacacttaataagaaaaagctggaatttatttatttatttatttatttatgagatggagtctcactctgtcgcctaggctggagtgcagtggtgtgatctcggctcactgcaacctccacctcccaggttcaagcgattctcctgcctcagcctcccaagtagctgggactacaggcacccaccaccaggcctggctaattttttgtatttttagtagagacagggtttcaccctgttagccaggatggtctcgatctcctgacctcgtgatcckcctgcctcagcctcccgaagtgctgggattacaggcgtgagccatcgcgcccggcctagaatttattctgagcagccagcttgtttggtatagctgtctctttgcccaaagtagttggcatcccctaaattaggaacaaagccagagctggatgt

SEQ ID NO: 39182 - DNA, 467 bp, Homo sapiens
ccagtggggatggaacctatcaggcgtgggcatcaattgagcttgatcctcagagcagcaacctttactcctgtcatgtggagcactgcggtgtccacatggttcttcaggtcccccagggtaaggacggggatcgtggctgtctagggagagagcctggagaaaggggtgagcaggaaaccatgctcgctgccagggaggggaggatagatcactgcctcactcagtgtgccttagaatgggtcttttaaataagtggttctcacactttttggaaccaggacgccttcatactattaaaaaattattgaggaccccagagagcttttgytgatgtgggttatatctattgctatttactacattacaaattaaaaatttaaaaattaaacacgaatgggtgcagtggctcatgcctgtaatcccagcactttgggaggctgaggcaggtggatcacttgaggtca

SEQ ID NO: 39183 - DNA, 658 bp, Homo sapiens
ctgcctagcctttctgggtgtctcatttgccactaggggcctcaaatgaggaaaagtcatattttcttttggtagctctctgggcagtgcttttgtgagacctgggctgagtcaaacccttgggacaatatgctttagtcatgtttgacagcagctctggacaaaagggaaatgaatggactctttggaggccaggagctcagtaccccagttaaaagatgagatattttggcaaacagttgggagtttaaatccaatgtgcttgagatggtgctcatcaaatatccacatgctcctcgcatacgctggcttccctgggcattayaccggggccatgcctggctgtctccagcgggctgtgaatggaagtaatggagccatttccaggcagacacagttaagatggagtatgcctttttatttttacctttcatttttcagactgagtcttgctttgtcacccaggctggagtgtagtgcacgatcaccggtccctgcaacctctgcctccttggctcaagtgatcctcccacctaagcctcctgagtagctggaactacaggtgcgtaccaccatgcccagcaaattttttgtagagacagggttttaccatgttgtccaggctggtctcaaactcctgggctcaaatgattctcat

SEQ ID NO: 39184 - DNA, 658 bp, Homo sapiens
ctgcctagcctttctgggtgtctcatttgccactaggggcctcaaatgaggaaaagtcatattttcttttggtagctctctgggcagtgcttttgtgagacctgggctgagtcaaacccttgggacaatatgctttagtcatgtttgacagcagctctggacaaaagggaaatgaatggactctttggaggccaggagctcagtaccccagttaaaagatgagatattttggcaaacagttgggagtttaaatccaatgtgcttgagatggtgctcatcaaatatccacatgctcctcgcatacgctggcttccctgggcattacaccggggccatgcctggctgtctccagcgggctgtgaatggaagtaatggagccatttccaggcagacacagttaagatggagtatgcctttttatttttayctttcatttttcagactgagtcttgctttgtcacccaggctggagtgtagtgcacgatcaccggtccctgcaacctctgcctccttggctcaagtgatcctcccacctaagcctcctgagtagctggaactacaggtgcgtaccaccatgcccagcaaattttttgtagagacagggttttaccatgttgtccaggctggtctcaaactcctgggctcaaatgattctcat

SEQ ID NO: 39185 - DNA, 549 bp, Homo sapiens
ggtgagaaatgattggggccaatagcaacagtggcacttctcctgaggcatctatcgtacattgccttgttatttgtgtacatattttaaaatttcctgaaatgtcttacctctcttattctcaccaagttgtaaactctttgaagataagtgctagaccttaatcttttctatgtcaaaaccttttctgccaggatctgctctggtatcagcagaaccagagacagtgaaaaaatggggactagcctagaagcagtaggcaagagggagctccccagccaaaagagagaaaggaatgtgaggtttcttttcactccsaccccacacttcctgcagcccagctgggttcccgctctagtttctgagaagcaaggtctgagtcacctctttcttcctaaactcccctcttccccaaagggattggaaggctggaggggtactgagtaggaaggatagcaggcagcaccatctgattctatccccttcttgccatacagacaaacggcagcgatactgacaatggccaagccctgaagaccctagccagaa

SEQ ID NO: 39186 - DNA, 601 bp, Homo sapiens
gatctcttttgctgtcataattttctgttataatttttgcaaaggcagtttcakcagggccacttgtcaactcgtttaacaggtgacggaggctcagaggctttgagggccttgtgcaggggccccttgtagggcagcagtggggagagaaccagcaattcccgagggcccattctgtgctttcctcacatcacttcgcggcccccacagccagctgaggaattataggaagaatcaggcagttatgactggaaaaagtgtgctttctctcctgcctcacttccctgtctctgcgggctactcagccacctgaaggactgtcactgttggaaccagcctgcacgggatgtggaatgtctagggaagttgtttcttccaaggacaatgctggcctcaccagtgtgtggcaataagagacaggattgctctagagactgaaaccacctttgcaaaaatcataactgagaaaattatgacagtgaaagataccagacataactgaccccatcttgcttctaacctctaaactgtccttattcattcctgggtataggctgaactagctttgagaaggaatttagtgtatagtttatataatagc

SEQ ID NO: 39187 - DNA, 1057 bp, Homo sapiens
ctgactggtatcaagagacagtccaatgttaagcatatggtaagggaaattcatatcacttttatttctgctttcaatagtgtggttattcttcccagtctggagaggtcagggagtggcaaactcagtgtgcttgcatgcactttggagagatattatttatgtatgagacaccagtttaagtgaggatgttgttgtctcccaccctgccctggagtatttgcccascaattactgtctcctgctggtgttggcagacacaggaggaggatggtggtctgggggaacctagggcctacaaagagagtgtgaaagctttttggaattccaagtgatctcactcccaggttcctgcaggatgttgggaaagtatgctctttgctttctttcccaggatttcatcaagcaaggtggccatgaagctatcactttcacttatctcagtttaggaaagctctgaattcattgatgaattatgcttagcaggcatgatgcacatgttgaacttttctccgggacaaattagggacatctgagatggaagtgtgtattttcttacacatccaatggcctggaacagcatcttggttttttggaaagcaggggctagagctctggttgctgtaaactgcttggggtgagtacatgaccttagtgtgactggaaaatctttccactcattttctgtgaacccaaacagactctgttcctcttcaatctgatctcacacactaaaaaagagtaggagtattgggctgggctaaattagacagtgagttcagagatctgagatgaacattagttgaccagagtgacaaaagctcacctaagagaagtttataaatttaaaggatgaaaaataatatttattttgcctaggtggataatagcaaggagcatgaatcagaaaataattgctgcgttgaagtcatacaacccttctttatatattgtggttgtcattccttaaatatatttgcacacataatgaaagggtagctatgatacttgtataataaatttctatttccaacagtgcccaattagcagccaccag

SEQ ID NO: 39188 - DNA, 782 bp, Homo sapiens
aaaaatatataggcaggggaaaagaagctaaagaaatagcaaaaaattagacaaaagagggttcagactgaaaacagcaaaatgcaaggtccattagtttgttaactggttatcaattgtattcaagtggttttggcctatgaggctgactgacgaagaaagcgaaaaatggaaatgggaaaggtattccatttaaaagtatctgcatgtgtccacaccatgttccattcaagcctgggagctaaagattacaaattcttatttaaccaaatgtaaatttaagcagataaataaggtggcacttatcaacaatttttaagaagccattaagaatgagttctgtgatgcattaaaaattatctaaagttttaaacraatttccaagaagcatctcctttaagaaatagcatcactaggccaaggcagatagatagcttgaggccaggagttcaagaccagcctggccaacatggtgaaagccgtctctaccaaaaacaaaaactagctgggcatggtgatgcatgcctgtagtcccagctactagggaggctgaggcagaagaatcacttgaacctgggagacggaggttgcagtgagccgaaatcatgccactgcattccaacctggatgacagagtgagaccctgtctcaaaaaaaaaaaaaaaaatagcatcactatgtccacactgcgtacaaacatactagtgttatcttcacccaactctggagtttctaaatctgagctacgtagacctctaaaaaattcatggatgaacacaatg

SEQ ID NO: 39189 - DNA, 1723 bp, Homo sapiens
ccttggcctcccaaagtgttggggttacaggcttgagtcaccactcctggctgattgccctgattcttttttttttttttttttttttgagatggagtctcactctgtcacccaggctggagtgcaatggtgcgatgtcagctcactgcaacctctgcctcccgggttcaagcgattctcctgcctcagcctcctgagtagctgggattataggtgcccgccaccacgcccggctaatttttgtatttttagtagagacgggattttaccatgttggtcaggctggtcttgaactcctgacctagtgatctgcccgccttgggctctcaaagtgctgggattacaggtgtgagccaccacacccgacccgattttcctgattcttaagttcattatattcattggtctcttatatttcttgggtcatgatgataattaaattgctgtctgtggactatcatccatggaagccagggttaaatattaatagagataggaaatgaatgtatatattcactaaaatcctcacacacataaatatggagaataattttgtctagaagggtaatttttaaatacctgaattttgagagctttccygatggaaggagatattttgatttgattggaagttttcttggctttttttcccccacaccagagtgtggtggggatctcagggctctgctggaacatctacttctcccaactacccgaacctaaatcctcatggccggatctacgagtggagaatcaccgccccagaaggaaggcagatcaccctaacgtttagcaacctgaggctggccacgcatctgtcctgcaacagtgagcatgtgatagtaagcgttccctgtggcctgagatgttatattccatcatttaaggagtttactgacccataaatcatagtcagaaaactaggtcaggaaaattgctgtctatgcaactataactcagacaaattctaagtattgttgagagaacaaaacacggtaaactgtcaaaataattgtaaacattgttttaagagactatcagctatcactccatgcatgagggtcatagatagaatacattttaagagtgaatgataatgacaaatggcaaaaccggggaggctgtgggaagctaagcctacaggagcacatagatgaatgggaccagagtcacagcacaagccaccaccgaaagttctgagcagatgggttgtcctgcataatgactgctctttccaggggtgcagagggactcctggtgggagagcactactacctgacctccatgtcgccaacctccagtggtttcagatgtgccctcagcactctcagcttcctgcagtgaaagaaagcaaatgagatccctgagtgtgaataacaaatagattgttaactgtgaagtgctatacatacatatgtgtgtgtagataggtagactggattaatattagtacatttctccacccaacttgccccttctgcagtatatgctatctcagtaaataattccaaacttctggttgctaaggtcaaaaatcttgatgtctattttggaatacttcctctcacaccctatatggcatctacaagcaagtcctctcacaccctatatggcatctataagcaagtatctttaaaaatattcacaaactacttgttatatctactactgccacccccaccgttcacttggattattttataagttccctctggtgcccctg

SEQ ID NO: 39190 - DNA, 1723 bp, Homo sapiens
ccttggcctcccaaagtgttggggttacaggcttgagtcaccactcctggctgattgccctgattcttttttttttttttttttttttgagatggagtctcactctgtcacccaggctggagtgcaatggtgcgatgtcagctcactgcaacctctgcctcccgggttcaagcgattctcctgcctcagcctcctgagtagctgggattataggtgcccgccaccacgcccggctaatttttgtatttttagtagagacgggattttaccatgttggtcaggctggtcttgaactcctgacctagtgatctgcccgccttgggctctcaaagtgctgggattacaggtgtgagccaccacacccgacccgattttcctgattcttaagttcattatattcattggtctcttatatttcttgggtcatgatgataattaaattgctgtctgtggactatcatccatggaagccagggttaaatattaatagagataggaaatgaatgtatatattcactaaaatcctcacacacataaatatggagaataattttgtctagaagggtaatttttaaatacctgaattttgagagctttcccgatggaaggagatattttgatttgattggaagttttcttggctttttttcccccacaccagagtgtggtggggatctcagggctctgctggaacatctacttctcccaactaccygaacctaaatcctcatggccggatctacgagtggagaatcaccgccccagaaggaaggcagatcaccctaacgtttagcaacctgaggctggccacgcatctgtcctgcaacagtgagcatgtgatagtaagcgttccctgtggcctgagatgttatattccatcatttaaggagtttactgacccataaatcatagtcagaaaactaggtcaggaaaattgctgtctatgcaactataactcagacaaattctaagtattgttgagagaacaaaacacggtaaactgtcaaaataattgtaaacattgttttaagagactatcagctatcactccatgcatgagggtcatagatagaatacattttaagagtgaatgataatgacaaatggcaaaaccggggaggctgtgggaagctaagcctacaggagcacatagatgaatgggaccagagtcacagcacaagccaccaccgaaagttctgagcagatgggttgtcctgcataatgactgctctttccaggggtgcagagggactcctggtgggagagcactactacctgacctccatgtcgccaacctccagtggtttcagatgtgccctcagcactctcagcttcctgcagtgaaagaaagcaaatgagatccctgagtgtgaataacaaatagattgttaactgtgaagtgctatacatacatatgtgtgtgtagataggtagactggattaatattagtacatttctccacccaacttgccccttctgcagtatatgctatctcagtaaataattccaaacttctggttgctaaggtcaaaaatcttgatgtctattttggaatacttcctctcacaccctatatggcatctacaagcaagtcctctcacaccctatatggcatctataagcaagtatctttaaaaatattcacaaactacttgttatatctactactgccacccccaccgttcacttggattattttataagttccctctggtgcccctg

SEQ ID NO: 39191 - DNA, 564 bp, Homo sapiens
actgcttgtggggaggcctcagggagcttttactcgtggtggaaggcaatgcaggagcatgtgtattacatggcaggagaagragagcacgaggggtcttgcaataactcactcactatcataaggacagtaccaagaggggatggtgctaaaccattcatgagagctccgcccgcagatctaatcacctcccaccaggccccacctccaacaatggggattacaattccacatgagatttggtggggacacagatccagaccatatcaatggagtctgatggagcctttagacccagaaccatggggttctcttcccagcttggccactaacctcaggggtgaccaggacccagtcccttagcccctttgaaaaggcttggcttcctctgtataaaatgaaagcactaaaacctgctttccctacctcacaaatgttaagaggatcaagtgctgcaaagcaatacacgaagacaggttatcattattattatttaccgctccccggttctgcaacctcagttgaaccaaaactcctctcttcacctttgcataaagaaagaca

SEQ ID NO: 39192 - DNA, 564 bp, Homo sapiens
actgcttgtggggaggcctcagggagcttttactcgtggtggaaggcaatgcaggagcatgtgtattacatggcaggagaaggagagcacgaggggtcttgcaataactcactcactatcataaggacagtaccaagaggggatggtgctaaaccattcatgagagctccgcccgcaratctaatcacctcccaccaggccccacctccaacaatggggattacaattccacatgagatttggtggggacacagatccagaccatatcaatggagtctgatggagcctttagacccagaaccatggggttctcttcccagcttggccactaacctcaggggtgaccaggacccagtcccttagcccctttgaaaaggcttggcttcctctgtataaaatgaaagcactaaaacctgctttccctacctcacaaatgttaagaggatcaagtgctgcaaagcaatacacgaagacaggttatcattattattatttaccgctccccggttctgcaacctcagttgaaccaaaactcctctcttcacctttgcataaagaaagaca

SEQ ID NO: 39193 - DNA, 566 bp, Homo sapiens
ctgtgacacttgcagcctgccacatgcaggggcartgtgggctccagaggccagagaaagcccattgggtgcaggcgctgggagttgcaaatccagctggtgtgctcttaacaggaaggctgagggcacggggcagggcacagacatgtctacccgaggttgtcaccctgacagttagtgggattctcccacagatcctggagccaggaaatttggaaatgctccctttgccaccctgccacgatgcagggacactcagaatccatcctcaaagcccccatgcccatcggagcctcgcatatgcccaagctgcccctgccagccctcatctgaacagggccgacctatatcacctcctgggcttcccctgccccagctcgcccctaggttctaagggagagacccagcagaccagggaagaaactccaaggtcagccaggacacagcttatcctgggttaaagtgtgaactaaaaattggaactcttttaagatgtcccctttggtgcctcctctcctccccttttgagtgtctctcctgaggtccaaggccaggggctctgctct

SEQ ID NO: 39194 - DNA, 590 bp, Homo sapiens
tggcactgcagtttacatacagtatttaatcttcacaacaaccctatgaggtggatattattaatatcccctttcaacagatgaaactcrgagaggttacatccttgcttaggtcacacagctaattatagtgatagggctgcaatttggaactcagtctgtctgtcctcaaagcttgtggttttaaaacttctgctacccagcctcttgcttgcttaagggcaaacaagaacaaacctccccagtcttaatcacttcctgatttgcaaagatcatggcgctaacctctcaactctcatgagtggaacggtgggcactgaagagccagctttttttttgggttggaatattaggtttgaagggggggtgctgttatatgtttcacaactggttgggggtttaggggacaggggtaaaagtcctgctttcttgtgtttcccaaccttcgtggtgtgaatatccccactgtggctgactttaagctagcaaatgtgaggtcactgaacacagagataagaagaaatgtggccgggcacagtggctcatgcctgtaatcccagcactttgggaggctgaggggggcggatcac

SEQ ID NO: 39195 - DNA, 576 bp, Homo sapiens
ttacatgacttagcaaaacaatatgatacaatggcagaatccacatcagaagaaaaatcacttcagatctaagaaaggttttggctcactagatgtttgtgttggcagaagtagaaacggacaatttctttcctgttcctagagcagaagcacacaggggactgacactgcatctcctggatagtcaagcttggtcagtgatatccagtaggcaagaccttggtggagagaacaccttaccaagtcaacattcgtgatactccaggaaaagaagtcagcttcagattaaaaggagacacttgtttttgtttgtttgttttttgggacacagtctcactctgtggcccaggctggagtgcaatagcgtgatcttggctcaatgcaacttccacctcctgggttcaagcaattatcctgcctcagggtcctgagtagctrggattacaggtgtgcaccaccacacccagcaaatgtgtgtgtgtgtgtttttagtagcgatggccatgttggccaggctggtctcgaactcctgacctcaggtgatctgcccatcttgacctcccaaagtgctgggat

SEQ ID NO: 39196 - DNA, 1038 bp, Homo sapiens
ataactccctagaatttataagcaatgcttttgcatatgcttcctggggataggacttgtagttttgatcagattctctacgtgaacactgatatcctccagccccagtacactgctctgatctctcctcctcccatctaccatccacacagctgttgcttaactatctaaaacacagacctgttaattgccatcactccttcagttttaaaacttgaactgtctccccactccctagtggacagtgtacaatcttctcagcctagcatataaagcttctcacacttcagcttcagcttacctttcaagctttatttctcattctccccgttctctgaatacagcatgcctctctagacttccttgcctttgtacttgcaatcccttctgcccaggaggccttcccttcctgtctctatatagtgaattcctactcatcctttaggacccagtccagaaggcagctcctacagcagttcttcctacccagccggccacacttccactgtgctgtcacatgctctgtcttgcctccactgacacacatcacctggatgacaggtacttgtttgtatgagtgtgtgggaggcatgtcataagtgtgtatcctctggtgggtgaggcagggactctgcctcagaaaactctgggatctcagagctgaatgaaagaataaattccttctcctcttcaggccaaaaagagccccatcatctctcctatcattcttcaagacagaaakaaatgattgaacagaatttattggctgtctttgagtgtctttggtatggctttggcagggctgtctgggttcctccgctttgcttgtttttgggctgctgctgcagcctttaaggctcttcttcgcttcttcagcttttgagtctcctggaaaacctggggatgaaaaggggcagaaaaagaccttgtaatcctgtgcaaaacctcagacttggaacaagtgggatgggaactatttcccccagatggtaaccccagcctttctccatggggttggtggcctgtgacctccctgga

SEQ ID NO: 39197 - DNA, 1236 bp, Homo sapiens
aaaatacgccagtatagtggctgagattgtcatgaggattaggagcactgatgtttttatataatgaaggtttattactcttatcacaagaaactttttttttttttgagacggagtcttgctctgttgcccaggctggagtgcagtggcgcaatctcggctcactgcaagctccacctcccgggttcacaccgttctcctgcctcagcctcccgagtagctgggactacaggcgcccgccaccattcctggctaattttttgtatttttagtaaagacrcggtttcactgtgttagccaggatggtctcaatctcctgacctcgtgatccacccgcctcggcctcccaacgtgctgggattacaggcatgagccaccgtgcccggcccacaagaaactttttaaacaaattttcagttaaactgaatgagtagaggtttgacctaaaactaagatttactatagagttttttttttttagtttgagtgctgtgtcaattctagagactacatattatgtcctgttcatatctttctaggaggatttgcttcattcatagacgatttataggtttctgaactttatgtaccaaaaataaatggtcagaattgatgcttctgtaggagaccctcaagtcccataatggcatttatttctattataatcttttggggaatgccacgtgagtggcatttagattgaaaacatgagtacaattagatttatgtaattctctgtgactgtgagaaggatttttgtgaggaggattttgtacaatgaaatgataataatcagcccttgcattctgcaggatttaggaatgccaccctttaccaaagttaagtagaaaatattaagtgtagggctagtgagtctgaggagcacataagcacctgaagagaatttcatttatgctaagaagtttactcctttgcatttagctgtaaattgtataataaagttgcctaactaaggttttactatctcaactcccctaaacacatgttgtgttttacctggtaacagatatcctaaatgtaggtagaaattaattcacctccatgtactactttaggttatagaaatgcttattgggttctttcattgcaagcaactgaagttggatgacaaagtaaaatgggcatttattgaaggatgttatggtggcacatagaattgaaagaacagaatattcagatcaattcaaaagaaaaaagtaggtcaactttggtgct

SEQ ID NO: 39198 - DNA, 1236 bp, Homo sapiens
aaaatacgccagtatagtggctgagattgtcatgaggattaggagcactgatgtttttatataatgaaggtttattactcttatcacaagaaactttttttttttttgagacggagtcttgctctgttgcccaggctggagtgcagtggcgcaatctcggctcactgcaagctccacctcccgggttcacaccgttctcctgcctcagcctcccgagtagctgggactacaggcgcccgccaccattcctggctaattttttgtatttttagtaaagacacggtttcactgtgttagccaggatggtctcaatctcctgacctcgtgatccacccgcctcggcctcccaacgtgctgggattacaggcatgagccaccgtgcccggcccacaagaaactttttaaacaaattttcagttaaactgaatgagtagaggtttgacctaaaactaagatttactatagagttttttttttttagtttgagtgctgtgtcaattctagagactacatattatgtcctgttcatatctttctaggaggatttgcttcattcatagacgatttataggtttctgaactttatgtaccaaaaataaatggtcagaattgatgcttctgtaggagaccctcaagtcccataatggcatttatttctattataatcttttggggaatgccacgtgagtggcatttagattgaaaacatgagtacaattagatttatgtaattctctgtgactgtgagaaggatttttgtgaggaggattttgtacaatgaaatgataataatcagcccttgcattctgcaggatttaggaatgccaccctttaccaaagttaagtagaaaatattaagtgtagggctagtgagtctgaggagcacataagcacctgaagagaatttcatttatgctaagaagtttactcctttgcatttagctgtaaattgtataataaagttgcctaactaaggttttactatctcaactcccctaaacacatgttgtgttttacctggtaacagatatcctaaatgtaggtagaaattaattcacctccatgtactactttaggttatagaaatgcttattgggttctttcattgcaagcaactgaagttggatgacaaagtaaaatgggcatttattgaaggatgttatggtggcacatagaattgaaagaacagaatattcagatcaattcaaaaraaaaaagtaggtcaactttggtgct

SEQ ID NO: 39199 - DNA, 505 bp, Homo sapiens
tatccaactatgattcctggtttgggaatctcccctttttcaactgaaaagttgaatagtgctaaacatttagaagcagattctccccctttccscccagattttgtgtttgttgtcattaacacaagatccaacaagaagattgctggaagattcatatactctttcacggtgatacactatgggagtaataaagtaggctttggaaggaaaaaaggaggataattgaaatttcttaagttatttgcagaactgtcaatttttcaatgatcttattctcactgatgatgtttatattaataattattagggtgaccaaatgttctagtttgcccaggagtagtcctggtttatgcctgtggttccagcatgataattaattgcatctactttctctctcaaaagtgttctggtttggctgctaaataatatggtcactccatcaatcatagaagacagtattctgccatcacagtggcagcagagtcatatattaaataatgag

SEQ ID NO: 39200 - DNA, 505 bp, Homo sapiens
tatccaactatgattcctggtttgggaatctcccctttttcaactgaaaagttgaatagtgctaaacatttagaagcagattctccccctttccccccagattttgtgtttgttgtcattaacacaagatccaacaagaagattgctggaagattcatatactctttcacggtgatacactatgggagtaataaagtaggctttggaaggaaaaaaggaggataattgaaatttcttaagttatttgcagaactgtcaatttttcaatgatcttattctcactgatgatgtttatattaataattattagggtgaccaaatgttcyagtttgcccaggagtagtcctggtttatgcctgtggttccagcatgataattaattgcatctactttctctctcaaaagtgttctggtttggctgctaaataatatggtcactccatcaatcatagaagacagtattctgccatcacagtggcagcagagtcatatattaaataatgag

SEQ ID NO: 39201 - DNA, 549 bp, Homo sapiens
gaacactatgagagactaaagtagctctggagtttccaaagtgcaggtgtttggttttgacagatgggtaaactagagacaagacaggagatatgctgctcggaaaactaaggaggctgacttgaaggattattgcccaagaagttaatctttccacttcatgtcagcwgtagtaccctcaggcagagtaaagaattttctcaagagcagttttgacaagctcaaattttccaagagctgcttagttggtgacgcagagccctgcaccatagaacttggaaaattggactctaatttggagattctgcgagcaagatcaagacttccatcataaaatcagcttaataaggtccttccaggtttttacatttgagcaacattacctcccaaaatgagcctgctaatgtgagatgtctgaagaatttagtcctagacaaataaattaagagatctaataaatgaaatgatttactataattgatctgaatcagtacaacaaactttttttgtaaagtgtcaaatatgtataatgttagactttgaagccca

SEQ ID NO: 39202 - DNA, 549 bp, Homo sapiens
gaacactatgagagactaaagtagctctggagtttccaaagtgcaggtgtttggttttgacagatgggtaaactagagacaagacaggagatatgctgctcggaaaactaaggaggctgacttgaaggattattgcccaagaagttaatctttccacttcatgtcagcagtagtaccctcaggcagagtaaagaattttctcaagagcagttttgacaagctcaaattttccaagagctrcttagttggtgacgcagagccctgcaccatagaacttggaaaattggactctaatttggagattctgcgagcaagatcaagacttccatcataaaatcagcttaataaggtccttccaggtttttacatttgagcaacattacctcccaaaatgagcctgctaatgtgagatgtctgaagaatttagtcctagacaaataaattaagagatctaataaatgaaatgatttactataattgatctgaatcagtacaacaaactttttttgtaaagtgtcaaatatgtataatgttagactttgaagccca

SEQ ID NO: 39203 - DNA, 840 bp, Homo sapiens
agcaccagggggctcaggtatgcccatgccccactctcaacccgccgggaggctccctatcaggcacaaagggggagggcagtagagggcatgtacatccccagagccttgcctcccactgagccaccacatccaacagcttttgggatgccccttgccctcaagggcaagagatgtgcccatctctccctggcaccccacaggccccacacagggcaacattcccgttcctcatgcccctttggcccagcccttacccccatgtgcccgttgcagagctggggctcatccagagcaaggcagagccttcggtcactgagcacagggccaggaccaccagggacaggagcatctttgctgccactggcaccagcagatttggggctggggacactgcagggggatagcagcaggggtcagcttttggaccttcacctccctattcccacccacagcacttgccctgccttgggcacctgggccgggaatcaagggtctggacactgagcaggggcacaaaggggcaggcgcagaaggggcaggttgtgttgaggttagagtcatcaggtgcccagccagccatgatttcctcatcatacaccagcgaatcacaggcacggcacagggagcagctggacagcagaatctgtgggcagggagagtcgggaagtaggtgctgtctggccgccagcactctgkagcccatgccccttccccagcccctcccacctcctccccatctcctgccttggacagggtgagtgtgtgctatgtgtgttcaagcacatctgtgtgggaggggttatcctcacttccagggaaggtgactggaaggatcca

SEQ ID NO: 39204 - DNA, 840 bp, Homo sapiens
agcaccagggggctcaggtatgcccatgccccactctcaacccgccgggaggctccctatcaggcacaaagggggagggcagtagagggcatgtacatccccagagccttgcctcccactgagccaccacatccaacagcttttgggatgccccttgccctcaagggcaagagatgtgcccatctctccctggcaccccacaggccccacacagggcaacattcccgttcctcatgcccctttggcccagcccttacccccatgtgcccgttgcagagctggggctcatccagagcaaggcagagccttcggtcactgagcacagggccaggaccaccagggacaggagcatctttgctgccactggcaccagcagatttggggctggggacactgcagggggatagcagcaggggtcagcttttggaccttcacctccctattcccacccacagcacttgccctgccttgggcacctgggccgggaatcaagggtctggacactgagcaggggcacaaaggggcaggcgcagaaggggcaggttgtgttgaggttagagtcatcaggtgcccagccagccatgatttcctcatcatacaccagcgaatcacaggcacggcacagggagcagctggacagcagaatctgtgggcagggagagtcgggaagtaggtgctgtctggccgccagcactctggagcccatgccccttcyccagcccctcccacctcctccccatctcctgccttggacagggtgagtgtgtgctatgtgtgttcaagcacatctgtgtgggaggggttatcctcacttccagggaaggtgactggaaggatcca

SEQ ID NO: 39205 - DNA, 592 bp, Homo sapiens
catgttctgcatttatggtcattatgcttcccatgttaagtgaaaccgttcgtttcctaaggctgctgaaaaaaaaaaaagcaccacaaactgggtggctttcaacagaaatttattctctcacagctctggaggctagaagtctgaaatagagatgtcagcaggatcatgctgtctctgaaggttctaggggagaatctgttccatgtgttttgttgtcttctgatgttagctgcaatccttgctgatacttggtttgtagacccatcactctgatctctcttgttatcacttggcattctcctttgtgtgtgtgttttccttctctcataagaacagtcattggattaggactcaccctaatccagtgaggtctcattttaacttgattacattttcaaagaccctatttccaactatattcaattcatgggtgccaggagttaggatttcaacatacttttctgggggacataattcaacccacagcaccatctgaataagtagaacaacatttgaagaaawgctttgtttaatgtgatttcattaattaaaaaaagaggcacagatagttgatgccaaatttaaagat

SEQ ID NO: 39206 - DNA, 831 bp, Homo sapiens
gggattctcagtttttaaagatgtgacccttggttgcaagtactcagattaaatcacaatagattatatttattgtatattttattatagatataatctataatagattttattgatttatcactgtaaatcagcttttcacattgccatcctacaaaacatgactcccataaaatgctatttgtataaagaggccatgggcaaatatatgttcaactatatatgtatgtgtacatattatatatatgacttccttggagacttatagactgtgtgtgtgtgtgtgtgcataaaacttgcttggatattcagactacacacacacatacacacacatgtatctggatacacttatataaatgctataaacatcacttatttggagagccttagtttataattaaggttcactatagtcctgcagtcaagactctatttaactttatttaacctacttttctgccgtcttttttaaaaattttattttggattcaggggtagatgtgcaggtttgttatatacgtaaacttgtgtcatggaggttggttgcacagagtatttcgttgcccaggtactaaacctagtaccaaatagttactttttctgatcctcttcctcctcctaccctcccccctcaagtaggccccagtgtctgtcrttcccctctttgtgtccatgaattattaaatgctgatttaatatttctttctctatttactataccaaaaaaatctatataatgaaggaaaggctaaaataagtgggcaaaaattggaaatgtataaatcaaaagttcttcaggcagatgctaatacatgacagtggagacag

SEQ ID NO: 39207 - DNA, 662 bp, Homo sapiens
atgtattgaaatatttggccaggcaccatggctcacgcctgtaatcccagctctctgggaggctgaggtggacggatcccctgagctcaagaatttgagatcagcctgagtaacatggcgaaacctcgcctctaccaaaaatacaacaaattagccgggcattgtggtagacacctgtggtcccagctacttgggaggctgaagtgggagaatcgcttgagcctgtgaggcagatgttgcagtgggccaagatggcaccactgtgctccatcctgrgttttgtatttcttcccaacactcccatgcttaaaatggatcctaacccttgaattcaagaaatatgctagatcccaatcacatttctcagttttgcttaaaccagatttgtctattccaattctccaccatattctctgtctcatgcagacttgcatgtgtaaaataaccttaactgtaatatctagagaaattgagaggaaaagacatagaggtgaggagatgtcagctcctgaaagatttttaaccatcataagccatttgaacttcaatatgagggcaataggggtagggcatagaactatattaagcaccaaagttacttaatgagactggtttattttaaattctctacttcttttctcttaaagtggtcgttaataaca

SEQ ID NO: 39208 - DNA, 1014 bp, Homo sapiens
tgcatcagtgccaatgataaacagtgctttcctcgaaccacatgatgtgaaagccaactaccaaattttcattaaatataaataaaaagtgtgtgtatatatatgtttattaaatgtgtgtctaatcttttatgtcaaaggtttttaagttggacactgtaattcattgatacacttcagagctgtgagcatactgaaattgtaggttaaattgtatatatttctctgagggaaaaggaccatgctttcctcagaatcttaaagggatcctggacatagaaagaactatggctctgaggccttagcagcagttcaaaacctgcgcaagactaaaactggagtcctccaacttttacaaaatattataacatgctgaagctccctgtggcaagtgggttaaagctacagggagggtagagtaygagtcagaaagagtcttttagttcttgatacttttctgttccgttctcagcatcaggtatacattcagcctaccaatgactcacagcctgcttccaatactcctcacctcagagggaaagccaaaagcatggtaacaatgacttaagacagaacaaaatcatccttaccattgcctaaaaacaactgttggatgaagtgaccttaagccaaagttttcagagctgcggtgcttaccagaggaaagtctctgtgctgcaggtgcaggcgccatgacactaggcttctccgactggtatgtggttgctgctaatgtggtgctctctgcatcactgttagtctgacctgtgactccaaagctggagctggggtagcaggcctggtactgattctgaccaagaatagtataggtgggataatcctgcaggccaaaggaaataagaaaacaagactcttatagcatacattaatctcaacacaagaggctttcttctccctctttcttattcataattatttttctaaaacattaatttgacttctcatttacctacctaaaagtctccaatctaaatcaatgattttcaaaatgca

SEQ ID NO: 39209 - DNA, 567 bp, Homo sapiens
gaaataacatgactgaagagtaattagggtttgcgacagtggattacatttatgtattgtcccaattcgtttcctgtaatcacaaagggggaaagggcgtagaaatatcaacagttccttgcctatcctagctggtagagtgaaacagggtcagcagacatactctactatttttataccactacctgctcttaacacttagtgagcacttactatgtgccaggcactatttaaagcacttyacttgtgttaactcatactcatacttgggaggcctggggaaaaaaaatgagaatggtaaaggataaagaagaagacttgccatcttctcgtatgttctcattacttggcttaagaattctggctgttgatgactatagtatggcatatcatacattttaagctcagtcagcttttaaatatcaccagtcctgtctgcattgttccattatgagacacatagctgtggtttgagaactcaggctttgaagctagcctgcctgggctcgaataccaggttggtgacttactatgtgtatagcattggggaagttactctctgtgcct

SEQ ID NO: 39210 - DNA, 495 bp, Homo sapiens
tcccatctcagcctcccaagtagctgggaccacaggaaggtgccaccatgcmaggctaattttttatttttagtagagatggtggtctcactatgttgccgaggctggtgcttgaactcctgggctcaagcagttcttccatctcaggctcccaaagtgctggggttacaggctgtgctcggcctgttttattaatctctaagtgccctgcatctgctctaaggagtgtggcatagtccttgatactggataactgagtaacgcaggtagtttgtatgagaagtgcagtaaccacatggtgaatggaagatgatgctgtacacttgcccggagttcacagctgggacactgcggttaccaggacgcagcttccagaatggctgactaaaactagaaaatgcagactccactgggtctttgtgtttctgttttttaaacgggaaaattaattctgccatttaccttcaaagagttagtgggagtgacataaaattg

SEQ ID NO: 39211 - DNA, 1447 bp, Homo sapiens
tgcatctgatcagaggccattttccgttagcaattcaccttgcacaactctcaatgtctcattttcttttcccttttctttaggttttattcatatttttctttaaaatgttttggcaccttagtaaccccataattgttctcaaacagcatatatttatttatctcttattaatatgactcgtgtcttcagcactgtgttagtttctgtgatgaacagaaacgaagtagatgaaacggctcttgccttcaagtagttaatatttatctgttatattttgaagagcgtgatagaagaacttaataactgccatttcagtgatttatagttaagtgctttcttgtacattttttttttccttctaacagtcttatggggagctcttgatggaaccaagtttcaaatgcagttgtttggattctaaatcctttaatctttttagtataccacagataaattgggaaaaaatcatgcaatttccagactcaggtttcactctgggtttagcacttattgttgatcatgggtacacaaattctgtttctttgtttgaaaaatgaaaagaataaatccagtcctaacatttttttttgcttttttcttttattgtgaagacccaataaaagagcatttataaaaccattctgacagtcacaatataaacaggaaacatcattatataccatggttttcttattttatatagagggaacaccgaatgtttgtttacataccaagaaataaaatggaaacttggcagatactctccccaagagacttctgcatcatttccttgttttttgcttctggaatagaagggcacaacattttcttctccaagacctcatacttataccagaaataggagacttgcttggtggcaggtatggttgcttcctgctaatatgccattagggcaaaagacattgcataacacatacgtgcacatcccwgacatacagtgtcaaggaatattcaggaagaaaatacatgtaagtgctgcattctcattattgagtgaagaatagagttttagctcaattcttagtttttttgagtgacaggtttgtaagtcacacgcttaccaaattgaaaggaaagggagttatttttaaactacagtagtaagatattctgaagccactgttgggctctataattcttgcaaaatatttcatttaaaacattttcttttcaaaaggccgattttctgaaaatacaattacccataagtacaggaatgcatcagtttattgtgctttgcttttctgtactttgcagaggttgcatttattacaaattgaaggtttgtggcaacccagtgtcaagcaagtctattggcaccatattttcaacagcatgtgctcacatcttgtctctgtgtcacattttggtaattctcaagatatttcaagctttttcattattattatgcctcttatggtca

SEQ ID NO: 39212 - DNA, 654 bp, Homo sapiens
aatttcctaggagccaaatgtctctttaccacaattgttcttagaagaaaagcttttcggtaatgcaaaaaggatctaatatgtcagcagattctcttttacaagttcctttgaaatayaagaagtttgtctaagggttttctctctttgcaagttgttttcagccaaatgttagagcagggtaaaaaagtagttaactttaaaagcttagcaggtgtttttacttatttattgaactttgtagagagagggaaaatgttggtaatagttgcaattaatttttcagatgagggcaagagaaattttgaggtgcttgaaatttattaaatgtgctgtgttttctcagtcacttcacttaattattttggctttttttgttaatgttaaaaactagagcgtctctaatgaaaagggctagtttttaaaagatcattgtaaaagtactcagactatttttattctagaaaatgatatattattaaaggcatcaataataataataataatagtgttcagaagattataccagagtgtgccaatggctatagacattaaaaataaattttcaaatatattttcgggtgtgtaaatttttggagtgttaacatttctatctaaaaatatgtagtacatgaagtttaagaatagttgtat

SEQ ID NO: 39213 - DNA, 616 bp, Homo sapiens
agaactttttcccatgttaagtcaacttctttataggaagattcatttgtgcaaatgtttaacgagaacctattatatgttatatactgggaaatcaaagataaacttcaaagatttcatrgtctggctgggtacgagacaggtacataactgtaatagagcataattaattgtttatagaatatgtattatgtgtagagagggggcaattaattctgtatgctgtgggattgagaagattgactatgaccgaagtaaaatttgagctgggtaaaaagtaaaaattgagatggataagatttcaccaaaagcagggaagggcattctgaacagagggaatgagacagacaaaagcactgtgataagacaatgtttagggaatcttcaaataatcatatgtggatggactacaaaatggagctttttaattaggaccatgacatgattaaatctgtgtcatagaatgttaactctagtgtcatttagaaatttgtactggaatgaggcagagactgaaagcaggaagacctgttaaaaggctgttgaacttttccatgtgaaatacaaaaaaagcttaaccttcatcagtgggaatggagagtatggattccaggca

SEQ ID NO: 39214 - DNA, 591 bp, Homo sapiens
catgggcattgagactgaggagggtccagtgggagccgggggaagaagggaccgtattagcgctcggggtcgaaggactgctcacctgaactaaccagtgcagcgtttcgccgaagaagggccaccccatggagcccttgggcagaggcagggtggaggcccggtcccggctcagcatccagcggagggtccagaggtgctgggccaggctgagcagcaggcccgcgcacaggagagcagtgcccgccgcccccagcactgacaggcagctcagcccccaagggaacatgatgagcccgcgggggccaggccgctcagagcgcagggagagcaggggacgcaagaaccggggcgcgagcagtgcgcagtgctcacctgttccgtccgcaaaaggcctggggtttgggggcaaagcccgagatttataagctcaggccagaactctgttcyaaaaacagacggacggtgaaagactgcagtgaccgtgcgcccttagggaacgtgccttcctcgaggccggcacgctcaggactttttcctggctcctgggcccaaatgccagtccctctcgaaggtgcctgctgcctcggg

SEQ ID NO: 39215 - DNA, 524 bp, Homo sapiens
cacgcttttgcaattcataartgctcttctttcaccagcaaattcaatcatttcatgttaaaagggaaaaaaaaaaagagtacgagtaaaaatctagctatttttgggagtctttttcccccctcagagaaatgagggcaaaaaaatacatcagctatttcgaagacaaaatctgagtgcagtttggaggattataaagaagaaaaatgtaatttcttatcaaataacagtgatagattggttttgttttgtttaaacttcagtggttaagaagtcccaatataaaccaaatggaatgctttttcagggatcttgcagtttatttttgtcaaaatttggtcaaaaatatcaaagaaattaaatcagtcctttgtaagctcacttatagaaaaacagatattaggcggttccagagatagcagtgggccgaattcctctttataactgcccttggtaatataagttggagaaatccattggctttcatggtgaaatctaggacactatgggctacagggctattt

SEQ ID NO: 39216 - DNA, 537 bp, Homo sapiens
tataaccttctcttgttataaatatgtctttatttctttttatctatatttcccaccaggaataaatctgaaggttgtgatgtgtacctttttattagcatgtaattatgttaaacattgaatggcattttgttggcatatattgctaatttatataataaaaataagatgaataataaccagtattatggatcacttactatctcccaggcatttaccaagtgcctttcatacattgaatcatgtaattctaacaacaatcctgtaagataggcactggcattttcctagcttcatgaatgaggaaaataaggcacagagaggtatataaatgacacggggctatagatgtcattctgcttattacctttttcacccagcaccttgacttttaggtctaaccacagtggggcctgtgcacagactttgttgcttatggcrtgttattctcttaggcacatcctctacatggacccttagatgacctccaaatttctgccatcaaaaataaaggtgcattaagtatccttatccata

SEQ ID NO: 39217 - DNA, 821 bp, Homo sapiens
tgggggcaatttcccccatgctgttctcatgatagtgcatgagttctcagagatctgacggttttgtaagtgtttgacagttcctccttcacatgctcttctctctcctgcctccatgtaaagaaggtccttgccttccctttgcttttccatcatgattgtaagtttcctgaagccttcccaggcctgcagagcagtgagtcaactaaaccttttttttttataaattacccagtctcaggcagtatctttatagcagtgtgagaacagactactacaggatattacccagacaaagttacatttccttttctatgcaggcttacataaaaagatatttaaaaatgtattctgaacccacaattttggaaatgcaagcagcatagtctaaaatggaatttttgatctggtcagtatgtttttttcacaacaatgtaataaacagttttatagaatcttcattccaaaattctaagggagtctaacaaaataaataacttctcccgtgttctacatccatcartaatagcctaatttttccagtatgctatgaaatgagagagtgttaagtctttttcaaagcatttgactgccaagtaaggaagaatattgtcaaatgctcgactattaatctcaaacttcagctacatagtatttctaaatgtgacattaaataatttctgaggaaaatacattttatactcattggctttgaatagataccttttaacttctcattatattaaaacccatccccaggatattatatccagaaaaaaacgcactattgaaaacaatttcacaacattcagatatataaa

SEQ ID NO: 39218 - DNA, 519 bp, Homo sapiens
taacagtgaataatacatctaataggactagattccaacacagaaaaaagtgtggaggtagtagttttgtatatggtgtactaggtggaattgaaaattataagaatctcttaagtgacatcaggctagccatttagtgctcaatataagtgtgatcatrgtcaaattccatcagctctcagagaacattcttcctatatgattccattatatctttgaggcacctcagctgacttccaggggcattattttgattatgtaacataatgatgctttatttatctgacttttagacagtctataacaatggcttatcatgatgactggttcaaatccaaacatacgaatactagccttaaatgtaaataggctaaatatcccaattaaaagacacagagtggaaagctggataaagaaccaagacccatcagtatgctgtcttcaaaagacccatctcacatgcagtgacacaagagatgcacaaagaacagctggtaccattcctacttaaactattcc

SEQ ID NO: 39219 - DNA, 519 bp, Homo sapiens
taacagtgaataatacatctaataggactagattccaacacagaaaaaagtgtggaggtagtagttttgtatatggtgtactaggtggaattgaaaattataagaatctcttaagtgacatcaggctagccatttagtgctcaatataagtgtgatcatagtcaaattccatcagctctcagagaacattcttcctatatgattccattatatctttgaggcayctcagctgacttccaggggcattattttgattatgtaacataatgatgctttatttatctgacttttagacagtctataacaatggcttatcatgatgactggttcaaatccaaacatacgaatactagccttaaatgtaaataggctaaatatcccaattaaaagacacagagtggaaagctggataaagaaccaagacccatcagtatgctgtcttcaaaagacccatctcacatgcagtgacacaagagatgcacaaagaacagctggtaccattcctacttaaactattcc

SEQ ID NO: 39220 - DNA, 522 bp, Homo sapiens
tgaataaaattctaataaattaaatttgacagcacattaaagtgagcatactcatggccaggtaggatttatacctgaaatgcaagaatgattctkttgcaggacaggtgagccccaaaattggggctgagcccaggagggttcttggctttgcctaggaaaaaattcaagggtgagccggtggtgttacacagtaatctataattgaatgatactgccccttttggagcagggcttactcataggcagtgtgcccagggtgggcaatgtataggctcttggcaactgcatactcaagtaaacccacttccaattacatgcaaattaaggtatggatcaatgcaaactgagaagtgggttatttagcactttctaggaaagaagagataaacttcaagctgtttctatagaaaggggtggtgacttctgggtctagtggaagtaacttatgctaatgagcaacaacagcagctagggatccccttcattgtccaatgctggttcctgctggtttcttcactt

SEQ ID NO: 39221 - DNA, 522 bp, Homo sapiens
tgaataaaattctaataaattaaatttgacagcacattaaagtgagcatactcatggccaggtaggatttatacctgaaatgcaagaatgattcttttgcaggacaggtgagccccaaaattggggctgagcccaggagggttcttggctttgcctaggaaaaaattcaagggtgagccggtggtgttacacagtaatctataattgaatgatactgccccttttggagcagggcttmctcataggcagtgtgcccagggtgggcaatgtataggctcttggcaactgcatactcaagtaaacccacttccaattacatgcaaattaaggtatggatcaatgcaaactgagaagtgggttatttagcactttctaggaaagaagagataaacttcaagctgtttctatagaaaggggtggtgacttctgggtctagtggaagtaacttatgctaatgagcaacaacagcagctagggatccccttcattgtccaatgctggttcctgctggtttcttcactt

SEQ ID NO: 39222 - DNA, 543 bp, Homo sapiens
taatatattatacacatttcccagaaaaagcactaaaaaaactaaaatttgagccaagttattctaaatctaaatatgatgctcttttctggaaaactaatctccctcccatttctatatggttacactgtggctggagagctggtgaatttgttgtctttcactttaaacatgcttcttctatagtcctggactacagtacaagcttggttggtggaaccattctctatcaagttgcttgagacagggacctaggactcaaacttgactatttactttttctttcccacctctgctcaaacccgttgaytttagcttttaagtacatctcaaaaatttctcttccctccagctcaccctcattttttcagtttaatctttaccaccttttaactgaattactaaatcatttccctcttagattttcttctttcaaaattacttaagtccaacccggaaccagagtgtagagctttaagcaggagatcaaactggttagattcccatggaaatccctggcctagagccctttgacagtacccc

SEQ ID NO: 39223 - DNA, 605 bp, Homo sapiens
gactcaccctgaattcattcttttgcaagatccaagaaccctctcttggggtctggatcgggatccctttcctgtaacaggcaggtagatctcttgaatccaggagtttcagaccagcctgggcaacatacagaaatcccatctctatgaaaatacaaaaattagctgggygttgtgatgtgcgcctggggccccaggtgttcgggagactgaggtggaaggatcatctgagcatgggaggtcaaggctgcagtgagccaaaatcaggccactgcactttagcctgggtaacacagtgagatcctgtctcaaaaaagaaattgagacccacgccaggcctcttgtatcaacatccaacgtcagcatcttcacaaaatccccagaagattcttgtgtgtgatcaagtgtgagtagctctcagctgtaagcaacactgggaggaggatgcagcttgtcctggggagcaacagcactgtccttttttcctcccctccttgacctctctccctcagtcttcatcaggtttgtaggttagtctcttactaactattctcactcaaaatcttctcttgtgagtgaatctggtccctatatccttgggttaa

SEQ ID NO: 39224 - DNA, 1419 bp, Homo sapiens
tgagggggtgattaaaggtgggaagcaggtacttacaatgttgggagatgattttccacaggatgtcttataagaatctggggtccatattaaaaggaagtcacaggcattatgttcagggttagatattgaatataattttacaaacaatgtatgaccaattagagaagggtctgttatggcctgtaagatcctaggagacatctgtttcaatttgtgtgtatctcacataagataaagcaaatgtgacaatgttattaccttccatcctctatccatctgctgatactagggaatgagccaactgatgaccccaccgtcctgatgtcatagcatatgacaatgtgggtcagtcttgagccagctttgcatgcatgcgtggaaaaaggtgaccccagttactggcttggatggctttacagttatatttttctcatacaataagcaaaaattttacaaattttgtttgaagaccacaaccaatattcttgaactctctccctgaataaagacctttgcaagagggtccgagacatttgcatcatcattcagtgagacctgtaaacacagcatctgcctttgaccacatccatctggaagaacctgagagataatccattttatgaaattttccctaccctgaaatgggagaatggtaggtaaagtagtggcaatcccttcttccttttccttccgtgtgtgtgtgtgtgtgtgtgtgtgtgtgtgtgtgtgtgtgtgatgtaaagaatgcacacttcaggtaaaatatgtgagcagctagggaaggtttggattattcagctcataaaacattccacatcatcctccaaggtgtacacttcctccatatctaaactttcactatccccaacattcactccagctaagccagtctcctccttgtccctggaacacatgacaactctctaccacaccacctccatgcctttgctcatgctgtgtctacaccagggatcatatcccagccctccctcccctctgcctctccaaatcccatatatccttcctccaggaaaacttcttgtattattccagtcctcatatatctcactatttcgaaaaagtccctctgtgttcagagctactcctttattgtgccaacacagcatcattccatattaactgattcattcattaaccaatatttagtggttgccagccatttccaaataattctgctaaattctcagtttttactgtgctcaagcagataagtacacaaataagtatgacatagactagaaagtgaacatacatgaaaaaggtgtggccattcagaaaagaaggcaatgaactctaactrgaaggatcaggaaacactttgtggaggtgacttttgtggtgggaattaaaggataggaatgtttggaggtaaagagtagggaattccaaactcag

SEQ ID NO: 39225 - DNA, 530 bp, Homo sapiens
ttaacataataacatctatttctttgtttaacttgttaattatgtttgttccctattagatcataagcaccatgaggtcagggactttgttttgctcacagtyatttcttagaagagtgtctagcatatagaaggtacttaaaaaatatttgttgaacatgtagtgaagtggactacattggtttaaaagtgaaaactgaattgacaacctataccctgtttcataccagccatcatcagccaaatttgctcaatgctttcaacaaattaccccaaagcttttgatcaaatgcaaatgagccagggcaaaagagggaaaaacacttaagcaatccaaaggacttgtcccaaatttacaaagatcacaggaaaggaaaacaaaatctgaaaatacatttccacttccaaaggcagcacttggacacagtggccctatttgtgctcagtgacagccagatcccaggtccaggcagggctcagggcactgcagcatgaggaatctcatgcattcagtctggcattgctgggga

SEQ ID NO: 39226 - DNA, 530 bp, Homo sapiens
ttaacataataacatctatttctttgtttaacttgttaattatgtttgttccctattagatcataagcaccatgaggtcagggactttgttttgctcacagttatttcttagaagagtgtctagcatatagaaggtacttaaaaaatatttgttgaacatgtagtgaagtggactacattggtttaaaagtgaaaactgaattgacaacctataccctgtttcataccagccatcatcagccaaatttgctcaatgctttcaacaaattaccccaaagcttttgatcaaatgcaaatgagccagggcaaaagagggaaaaacacttwagcaatccaaaggacttgtcccaaatttacaaagatcacaggaaaggaaaacaaaatctgaaaatacatttccacttccaaaggcagcacttggacacagtggccctatttgtgctcagtgacagccagatcccaggtccaggcagggctcagggcactgcagcatgaggaatctcatgcattcagtctggcattgctgggga

SEQ ID NO: 39227 - DNA, 530 bp, Homo sapiens
ttaacataataacatctatttctttgtttaacttgttaattatgtttgttccctattagatcataagcaccatgaggtcagggactttgttttgctcacagttatttcttagaagagtgtctagcatatagaaggtacttaaaaaatatttgttgaacatgtagtgaagtggactacattggtttaaaagtgaaaactgaattgacaacctataccctgtttcataccagccatcatcagccaaatttgctcaatgctttcaacaaattaccccaaagcttttgatcaaatgcaaatgagccagggcaaaagagggaaaaacacttaagcaatccaaaggacttgtcccaaatttacaaagatcacaggaaaggaaaacaaaatctgaaaatacatttccacttccaaaggcagcacttggacacagtggccctatttgtrctcagtgacagccagatcccaggtccaggcagggctcagggcactgcagcatgaggaatctcatgcattcagtctggcattgctgggga

SEQ ID NO: 39228 - DNA, 1705 bp, Homo sapiens
  misc_feature (1)...(1705): n = A,T,C or G
gcgttggcagcaggcatggaacctgggctctttcctatagagggatgttgcagactggaggcctggaggctgaaggtggccaatagacatgtttcatgtggccatcacagtgtacaagtgttttcttgaatgtgaatttttttatgtggggctgcatttnnnnnnnnnnnnnnnnnnnnnnnnnnnnnnnnnnnnnnnnnnnnnnnnnnnnnnnnnnnnnnnnnnnnnnnnnnnnnnnnnnnnnnnnnnnnnnnnnnnntgcccactgatgtcttcatatatatttgctgcttcaacacaacttcttccttagcattagtttctgttgcttgtaacccaagtgattgtaaaaagcctgatgaaatacagagagggaagctgaggcttatagagggaaagtgatatatcccaaatcacacacgcagtaagtgctacgtgtgaaccccattccctccttatctcctctcctcactccacacatcttcagcaacttctcctgtctctagtcactgcttcagtccctccaacacatggtcatctcctcaaaagcatccctcatgtggcaggggctgtaaaaacactaattgctagatccctgacatgaacttatttaagctaaccagaggattcagcaggagatttatttttggtggaaaaacacgggtcagtgacttccagcttaagatgacctcctgaccctgtgtgtttatctcccctcccttctcagattccatggagtcatagtagagaatataaatgcataagctcagtgcaaataaagagaatggtaggggaactacagggactagagatttctacctgattctggaagaaagagagtggaggtgggaaccaaggaaagaagcaagggtaggaatttcctgtcctgcagaatgggcaggaatttgcaacttggaaatgccagacaggaaagacatagcagtgaagcatgtgagagtgggaacgggctgaggaggggtggtgcccgtggtctctatctgaagaattgtggctttccatgctcacaggtagagagaggggtaagaacactggctgcctctacaggtatgtttcttaggaagaaagaagttgaattctytctctaaaagtggtgctggtatagaaaaaggaggagggaagcatgtgaagaacagacaaggagcctcacctgcacccccttgtcccttctccagaccaggaatcacacttgggactagctcatattcccgaggtagaatagttgatgcctccaactttcctgttatcactttccacaactcctggtttctgcatgggcatcggacgtggcccaggactgacttcccttccagcaccgagggcagagcatgtgatttaggctcagccagtcggagcatccatctccttggccataatgattggttctgggtgaacatgcgatctcagtagagtgagtcctggagagtgaatcctacgctttttgcttggaagcttgatgtgaagttnnnnnnnnnnnnnnnnnnnnnnnnnnnnnnnnnnnnnnnnnnnnnnnnnnnnnnnnnnnnnnnnnnnnnnnnnnnnnnnnnnnnnnnnnnnnnnnnnnnnaaagaagccagcttgaagctgacccaccaaggattgtggagctcagagaaacaaagctggtgccctggggacgaagtgaacctctgaatcaaaccatgcctagagtttgaacccactccca

SEQ ID NO: 39229 - DNA, 849 bp, Homo sapiens
  misc_feature (1)...(849): n = A,T,C or G
catttgggggctacagatggctgtcttttgttgcataaaatagaatccatcacgattggtttcactttccttcccacaaataatccaaaccttcggatcaagaccyaagacacatgctgtcagccaagtgtgttgagcatacacagaacaaagtgaaggccaagctttaggtactcagctcacaaggagctggtaccccacgtggagagcagcaagaaataaacaaaaaggtgccaactcttcactagccggctacactgtcttaatcttaatgacagtgatttgaatggaaaaggaatgcaggagcaggccatttatcactcttaaataataagttaaagttacagagattgaattgggccaagactggcttttaataccgagaggggggataaatcaattatggaactcgcacgcctcctagtggcatatctggattactgctggggaggcttcctctcccacttggaaccatcggccctgccccaaggttcaccgggacatgatcagtccatatcaactgagagcttcctttagaccaggctctgggctatgtgccattgcataattagtatcattaatgctcacactaggtgactctcattagacccattttatagacaatgaaagaaaagctcaaaaagcttccatcacttgcccagacttacggtggaaaggattccaaccaagatttgtggaattccctgttcagagctccctccccacatcacactgagtacagagtgttnnnnnnnnnnnnnnnnnnnnnnnnnnnnnnnnnnnnnnnnnnnnnnnnnnnnnnnnnnnnnnnnnnnnnnnnnnnnnnnnnnnnnnnnnnnnnnnnnnnna

SEQ ID NO: 39230 - DNA, 778 bp, Homo sapiens
agtctggagaatgtaactgaataacccaaagtcaggacatggtagaggagggactcaaaattgtatcttccagctccaaatcaaatactttttccactattggtatcacaaatgccttacataaaatctaaacaactcaaatccgaggatacttagaagttagtaaataaaagaaatttaaatcaagaaattagaattcaatatagcaaaagatgatgggagaaaaatgagaaatcttcaacacgttctaaaaggaaatactgatcatgagaagaatgactggttttatcaagcaaaatttttaaggctcatttattagcaaattctttctcagatcagaaagatagcagagaactttcaagtttttaaatacaggtggtcatttgtctcttacagaaacatccattatcagcttcctgaagagactcaggcatgtcttggaaagccacagacctttggggataggtcagaatcagaaaacatctctaaacccagcagcacttttcaagacaacctattgtttgaaacccaaggtttaaatataacaagtgagacagtgtgagaatctccttgctttagtttactgcactgattcatcatggataactctgtaaaagtagagaattgttcagttaacaagctagctatcctctagrggtctgaaactaggatgtcgggcaggatctgtgctctcactaagcctctagagaaggatccttccttgcctctcccagcttctggtggttcccaataattcttggcattccttgggttggat

SEQ ID NO: 39231 - DNA, 613 bp, Homo sapiens
gtttactatagacaaatacttgaaacgatatgaaaaagccattggccacctcagcaaatgtggtaagtgtggggattagtatgtttatctctacttcagatcttctttggaactaggcaaggtataaattaaactgttagtttagacagtgactgatttcacttcccactcctgaaaactctaacaattatgtatgctcacgttattttgtcctgtgttctgaaaagctgaaggtaatcacttttaatgaactggaggagctccctaggtaagaacgtcaagtagatccttttttggttaagaatgagcacctgtgaagttaacttcagtgtctcagaatcaaaattggttgwcagttcttccttctcatgctgtttgcagacatgtcagggaaactctgcttgtctggagagagtgatgaggccacctccccgtgccctgcaagacgcagttttaattgacagtgatggggtgccagttgttcttcccatgctggaacagttgtgattctttactgaggactgatgggggaaaggaagaatcacctggggtgcatgttaagccttcagctgctggcatccttggagaatctgattcaggtggtctgggatag

SEQ ID NO: 39232 - DNA, 581 bp, Homo sapiens
gtgtgttggtgaagggcaggaccaagcatgaatggggagagctctgccagacattcccacctacccccattcacccagagcagctgaccacttccgtgtctaacaaaatgagtttcctcatttccagaaaaaagttcaggaaactactgatttacattagtaattactgtatttaatattatctcattcattttgagatcaactttgcaatcattttcatccatcctttgatatgcaccagttgactctagttagttcatttaccgccctgaaagtaaacccacacattagcaggcagtgttttcatcggcttctggttcttcttttctagatgatgaggtacyccacgggcaagagtcagacctcttctctgaaactagcagtgtcgtgagtggcagtgagatgagtggcaaatactcccatagtaactccaggatatcagcgtacgtatcacattgattcagcacattgactatatcctgggcatatagggaaagtggaagcaaatagattggttttctactgggacggtgtagtgggagtggggagaatattcttcagcgctgtgtggaagttgttca

SEQ ID NO: 39233 - DNA, 1223 bp, Homo sapiens
cctgagggaaaagggtagaatggacacacacagctctcagtgtaactacctggcacacaccacacttctctgagaaggtttgattcatacttccccataccctagtggcaacaaaaggaaaaaaaccttgctcaggtcaggcgtggtagctcacgcctgtaatcccagcactttgggaggccgaggcgagaggatcacctgaggtcaggagttcaagaccagcctggccaacatggtgaaaccccgtctatactaaaaatacaaaaaggagccaggcatggtggtgcacgcctgtaatctcagctactcgggaggctaaagcaggagaatcacttgaaggcagcagaatcacttgaacccaggaggcagaggctgcagtgagccaagattgcgccattgcactccagcctgggcagcagagtgagaatccatctcaaaaaacaaaaaacctygcccaaacatgagacactctcctagaaatttagaattgtgtttacgagatgtcagtctgtctacaactattccttgaactatgtcctcccagtaaattcaaccacccaacaaatattaactgggcaccttctgtgttccaggtgaaatgttttccaccccttccaatcacagagccttggtgaagccagtacaagaaacacattggactaacatctgcacttaacctgcttgtacaatgttttctttaatgccctccatcttttcttttcttttctttttttgagacagaggctcacactgtcgcccgggctggagtgcagtggcacaatcttggctcactataacctctgcctcccaggttcaagtgattctccagcctcagcctcccgagtagctgggattacaggtgcgcgccaccacgcccagctaattttcgtattttagtagagacagggtttcaccatgttggccaggcttgtctcaaactcctaacctcaagttatccgcccaccttggcctcctgaagtgctgggattacaagcgtgagccaccacacccagccagtgcccccaaccttttaaccaagttttgcacttgttgggcacgctattggcctctctagacctgtttcctcatctactgaaggagtggcctagacaagcactgaccctaaaatcaagcccatcaatgttgacaactgacagccacagaaataatggtttactacccaggcgccggggctcacgcttgtaatcccagcactttgggga

SEQ ID NO: 39234 - DNA, 1223 bp, Homo sapiens
cctgagggaaaagggtagaatggacacacacagctctcagtgtaactacctggcacacaccacacttctctgagaaggtttgattcatacttccccataccctagtggcaacaaaaggaaaaaaaccttgctcaggtcaggcgtggtagctcacgcctgtaatcccagcactttgggaggccgaggcgagaggatcacctgaggtcaggagttcaagaccagcctggccaacatggtgaaaccccgtctatactaaaaatacaaaaaggagccaggcatggtggtgcacgcctgtaatctcagctactcgggaggctaaagcaggagaatcacttgaaggcagcagaatcacttgaacccaggaggcagaggctgcagtgagccaagattgcgccattgcactccagcctgggcagcagagtgagaatccatctcaaaaaacaaaaaacctcgcccaaacatgagacactctcctagaaatttagaattgtgtttacgagatgtcagtctgtctrcaactattccttgaactatgtcctcccagtaaattcaaccacccaacaaatattaactgggcaccttctgtgttccaggtgaaatgttttccaccccttccaatcacagagccttggtgaagccagtacaagaaacacattggactaacatctgcacttaacctgcttgtacaatgttttctttaatgccctccatcttttcttttcttttctttttttgagacagaggctcacactgtcgcccgggctggagtgcagtggcacaatcttggctcactataacctctgcctcccaggttcaagtgattctccagcctcagcctcccgagtagctgggattacaggtgcgcgccaccacgcccagctaattttcgtattttagtagagacagggtttcaccatgttggccaggcttgtctcaaactcctaacctcaagttatccgcccaccttggcctcctgaagtgctgggattacaagcgtgagccaccacacccagccagtgcccccaaccttttaaccaagttttgcacttgttgggcacgctattggcctctctagacctgtttcctcatctactgaaggagtggcctagacaagcactgaccctaaaatcaagcccatcaatgttgacaactgacagccacagaaataatggtttactacccaggcgccggggctcacgcttgtaatcccagcactttgggga

SEQ ID NO: 39235 - DNA, 191 bp, Homo sapiens
gctaaaaagtttgcaaagattgctcatctggctcaggtaaggggcaaactttcccgttttattgagagagcactttttccagacttccaactcctggatactrtctgggtatatcctttccaatagatttctgaaacttgaagtgggcattgagtaattctgcaccttactacaacacaggtgcactaggc

SEQ ID NO: 39236 - DNA, 576 bp, Homo sapiens
gaacaagatgtattcatctaactgtatgccagtccccatgccaagccctaaacatgaaccatcytattggatccttgcagggtcctataagccgttggacatcatcctcattttacagggacctgaggctcttggttaagatccctgacagcaataccagcccctgaatcctcagcaggatccttcacttgggtgcccattatgcaggcttcctcagcacagggaaggtcactcatcacccacaggcacttgattgttatccaccctttgatgatgtgagattccagaacacgctgcactggtctcttccttgatagggagagaggggaggtgttatgagaaaatctctcatcgatctgacctagctccctaataagaagtaactttttaaatgtcagatggaaatatttaaaaagtgttacatacctgtgtagttttagtattttacttaaagggaatgtggctgtctttactggctacaaccagtttaattcaagaagggctgctagtcatcaggggaacaagcaagggttggtgctgcccagagtctccagctaatacacaatatggacatcc

SEQ ID NO: 39237 - DNA, 1394 bp, Homo sapiens
  misc_feature (1)...(1394): n = A,T,C or G
tgcaacatcagctgggttggccaggttgcaggggaccctgacatgcctgtaccatcagcaaaccatctatcacttttaccattctttgctcctgctccctcaccctctattctatcatcatgtatttcccatacattaattacctgacctggagctcaaaacagggtgctgacagggaaacataggattttgcctgttcactaggcaggtgaggatagacctcatattttaaaatataggagtgggatgggcattctctttagtgccctcttcacctccctatttcccatcatcttaacttagacacacatcctcaggaggaattcacaaatgcactctcgccagatctaaaccctgcagtagctagcttcctagcttggcaccttctctatagcatctagcccaggagatccctctgactttattgggatggttgtgtgatacccgtatcaggacagagccaccaacaggataatgcatggatattctagtgtyccctcactcttacttcctcacaggctcacagtgcatacccactggtgtttactgtaacaaagaaaggctctgctgtggtctgaagagaaagctcaccatccttcctcacctgagcagctggtccaggtggccttcgaggaaagagacggagtgcatagacagattctggaaatagtccagcttgaggaactgagaggtgaatcgggcaatgaactgccccttgttgtctgggggaatgcaggcagatgcacggatgttgaagagaacaagtttgcggagattcctcatctggcccaggtaaggggcaaacttcacaagagtggacagctcccaggggcagcacacttccacctcctggatacagtcaagctccaccatgttcaggactgtatnnnnnnnnnnnnnnnnnnnnnnnnnnnnnnnnnnnnnnnnnnnnnnnnnnnnnnnnnnnnnnnnnnnnnnnnnnnnnnnnnnnnnnnnnnnnnnnnnnnnccctcgagctctagagaaaaaccggatgggcattccaaaaacctgcattctccttgcaacacacatgcagtaagccttttctctgcttgccccactctaagaggtgggtgaggcattcatctagtgtcctgttcttgagacaaaggtctatgaacaccatgaatggctgctgcctgcctgtccctggacagttatctgctgtttgcttctgactcagagcctccgggaaggatgcagtagctccagaaaatatgtcgcagaagttctcatccacattcctcaagtccagcacttgaagttttgactgcctgtgggtaaaggagaagagaggctccaaactaaggcaaggacctgagcttttatttacatcccagacatcagctgttctcctctctgccacttttccc

SEQ ID NO: 39238 - DNA, 776 bp, Homo sapiens
cgatctcaaatcactgcaacctttacctcccgggttcaagcaattctcatgcctcagtctccatcctcagaagctggtgtcacagacatctgaaaccatgcctggctaatttttgtatttttagtagaggtggggtttcaccatgctggccaggttggtctcgaacacctgacctcaagtgatccacctgccttggccttccaaagtgctgggattacagctgtgagtcactggtgcttggcctctacttttttttttttaaattagccgagcatggtgacatgcatctgtagtcccagctatttgggtgtctggtgtgggagaatcacttgagaccagaagattgaggctgcagtgagccatgctcataccactcctgtactccagcctgggcaaargagagacaccctgtccaaaaaacaaaaacaaaatcaatcaaaaaggatctttgaccttaattttaaaccaatcacatcctcttccacccaaatggagacatggctgcagggggtgcatgcctgtagtcccagctatgtggaaggctgaagcatgagaattgcttgaatcttggaggccgaggcaacagtgagccgaaatgacaccactgcactctagcctggccgatgaagtgagattcagctccctcaacaccaaaaagacttatgccacctaggggatccttggatatatgaagattcctattggggttttcttagggactgtcatctctgtctctgaaaactgttttaacccctgaatattttgataaacttggc

SEQ ID NO: 39239 - DNA, 776 bp, Homo sapiens
cgatctcaaatcactgcaacctttacctcccgggttcaagcaattctcatgcctcagtctccatcctcagaagctggtgtcacagacatctgaaaccatgcctggctaatttttgtatttttagtagaggtggggtttcaccatgctggccaggttggtctcgaacacctgacctcaagtgatccacctgccttggccttccaaagtgctgggattacagctgtgagtcactggtgcttggcctctacttttttttttttaaattagccgagcatggtgacatgcatctgtagtcccagctatttgggtgtctggtgtgggagaatcacttgagaccagaagattgaggctgcagtgagccatgctcataccactcctgtactccagcctgggcaaaagagagacaccctgtccaaaaaacaaaaacaaaatcaatcaaaaaggatctttgaccttaattttaaaccaatcacatcctcttccacccaaatggagacatggctgcrgggggtgcatgcctgtagtcccagctatgtggaaggctgaagcatgagaattgcttgaatcttggaggccgaggcaacagtgagccgaaatgacaccactgcactctagcctggccgatgaagtgagattcagctccctcaacaccaaaaagacttatgccacctaggggatccttggatatatgaagattcctattggggttttcttagggactgtcatctctgtctctgaaaactgttttaacccctgaatattttgataaacttggc

SEQ ID NO: 39240 - DNA, 282 bp, Homo sapiens
ccccctagttaatttttgtgtctttaatagagaaagggtttcatcatattggccagagtcrtctcaaactcctgactgaagtgatccacccaccttagtctctgaaagtgctgggattacagatgtgagccactgtgccttgtcaattgctggactttcatgatacacatggagtatccacagtatcacaagggccattttttccataatccaatttatttatattattggtagtgagctaatgttgatgtcgccaaggtagcaatttagtgactataccca

SEQ ID NO: 39241 - DNA, 282 bp, Homo sapiens
ccccctagttaatttttgtgtctttaatagagaaagggtttcatcatattggccagagtcatctcraactcctgactgaagtgatccacccaccttagtctctgaaagtgctgggattacagatgtgagccactgtgccttgtcaattgctggactttcatgatacacatggagtatccacagtatcacaagggccattttttccataatccaatttatttatattattggtagtgagctaatgttgatgtcgccaaggtagcaatttagtgactataccca

SEQ ID NO: 39242 - DNA, 1097 bp, Homo sapiens
aagtgggtaattgtgagtatgtggaagtgatgtctataggaaccttcatcttagagttacagtgctctagaatagcatggtagcacttttacagtttctggttgattttttttttgagatggagtttccctattgttgcccaggctggagtgccatggtgtggtttggctcactgaaatttctgcctcctagttacatgtgattctcctgcttcagcctcctgagtagcttggattacaggcactcaccaccatgcccagctaatttttgtatttttagtagacacagggttttgccatgttggccatgctggcctcaaactcctgacctcaggagatctgcccccctcagactcccaaagtgctgggattacaggagtaagccagcatgcccagctacagttagcatttctatacataccttccaaatgctgtggaataccatcacaccacttttacagttccagtgaattattttgtttttttctgcgatgtactctgagtgcgtcacccagactggagtgcagggccctgagctgggctccctggaaactctgtctctgggcttcaagtgattctccttcctctgcctccagagtagctaggattacagtcatgcatgaccacacctggctaatatttaaattaattaatttatcaatttgtttatttttgagtcagagtccaacgctgtcacccaggctggagtgcagtggtgtgatgtcggctcactgaaacctctgccttctggagtcaaatgattcttaacttttgtatatttagtagagacatggtttcattatgtaggcccaggctgttctcgaactcctgacctcaagtgatctgcctgccttggtgtccagcagtgttgggattacagacatragccacagcacctggtccatttctggtagaaaattttcaaaataaaaaataatggcatcgattttagggagtccctttagtgttcccccagcatgttcatggtgtgaactgagaatggaggctgtctgggcccacgggacactctcattctcaatgctttagggtggtaagtgacaagaaatttttcctcaaagaggtagagcttggctttca

SEQ ID NO: 39243 - DNA, 571 bp, Homo sapiens
tcagtcyctgattttgtgggttttgagagattgacctgggagagcatcacagttgcatgtttgtacacacacgctgactctaactagtggtttttctgtatgtgtgtgtcagatcatctactttgacagtcattacatgtgattctcaggctgcccgaaagactgaacataggcagtgagaaagttataaacgtgaacattttgtggggaaaaatacaatgtggagtctaatttacctattgccacttcattgctggatgaaggcacaagtcttaatttcttgtagtcttaaaaaggaacagttgaataatattaaactggaaggaaaagggggatctgatgaaatttcagcgttggtctttcactagattttcattgatatttttaagaaagttgtcagggcacaactttaagaagttgtcacatctgaacataaagtcctgagctccagagcaggaaagaaattagtttgagacaatagggctgtgaagactgaccaaagtatatagttgggacataagcttaaattggattcttgaagaagatgatgtcccaaatctttcttgatctg

SEQ ID NO: 39244 - DNA, 571 bp, Homo sapiens
tcagtccctgattttgtgggttttgagagattgacctgggagagcatcacagttgcatgtttgtacacacacgctgactctaactagtggtttttctgtatgtgtgtgtcagatcatctactttgacagtcattacatgtgattctcaggctgcccgaaagactgaacataggcagtgagaaagttataaacgtgaacattttgtggggaaaaatacaatgtggagtctaatttacctattgccacttcattgctggatgaaggcacaagtcttaatttcttgtagtcttaaaaaggaacagttgaataatattaaactggaaggaaaagggggatctgatgaaatttcagcgttggtctttcactagattttcattgatatttttaagaaagttgtcagggcacaactttaagaarttgtcacatctgaacataaagtcctgagctccagagcaggaaagaaattagtttgagacaatagggctgtgaagactgaccaaagtatatagttgggacataagcttaaattggattcttgaagaagatgatgtcccaaatctttcttgatctg

SEQ ID NO: 39245 - DNA, 548 bp, Homo sapiens
gtcaatgatgaaaaataaaatatgaatgataaaggcatgaaatatgacaagggtgtcatcaataaaggtcamctaaaatcccataattgtagtgttgccttggtgaaataattatattctgtggtatggttggtccccagcattgcaggttcagacacttcattctgccaacatatcaagatatggttcagttctgtggagatcttgagagataataatataaacctagatgacagtatagtaacttatgaaaaatataactagcaaaatcatcagccctttatgccctatggactaaactttctaattttgatttatagtcagaagtttccttaatgagtatatgcagtaaaatctgcaagctgcctgcctagaatctattccccatatagcccccatcatatccttcctagtaaagctccaattttgttcatatgcagcttgtgtgattaggggaagctgattccatacccaaattaggagataggctctatctggtctaagcctatgacactaattctgtccccttgtcaagtaattaactcagg

SEQ ID NO: 39246 - DNA, 548 bp, Homo sapiens
gtcaatgatgaaaaataaaatatgaatgataaaggcatgaaatatgacaagggtgtcatcaataaaggtcaactaaaatcccataattgtagtgttgccttggtgaaataattwtattctgtggtatggttggtccccagcattgcaggttcagacacttcattctgccaacatatcaagatatggttcagttctgtggagatcttgagagataataatataaacctagatgacagtatagtaacttatgaaaaatataactagcaaaatcatcagccctttatgccctatggactaaactttctaattttgatttatagtcagaagtttccttaatgagtatatgcagtaaaatctgcaagctgcctgcctagaatctattccccatatagcccccatcatatccttcctagtaaagctccaattttgttcatatgcagcttgtgtgattaggggaagctgattccatacccaaattaggagataggctctatctggtctaagcctatgacactaattctgtccccttgtcaagtaattaactcagg

SEQ ID NO: 39247 - DNA, 790 bp, Homo sapiens
tcctgccttgtcctcccaaagtactgtggttacagacttgarccacctcacctggccacaataatcttaattctgtgaagtgagtagtgttattcctaatttacatttgagggattttcagctcagacttggcaaaggtctaccacttactataaccctggctggtgttcaaacttaagtcattcagatatcaaacccatgctcttttttaactacgctagttataggtagaacattaaatgagatgtagattatttagcacactgctggaactgcaatttgatacatatattttgttgaaagtgggtgaatagcactagctttatatgtgagtaatcatactctatggttgggctgtgtaaaactttttattaggtgactgtacaatgtttatttcagatagtggcttaaaagccacttttgtatttatccacctgaattatgcgcctgtcagtatactgttaacagatgtcagaatatggtttttttatgtgattgcagagggagacttcaattcagaattttatccttcataacattatagtgattttaaaagttatatgcagcaaatgtgtagtatttttctcatttcaactttcacagcagtaggcaggtggttgtatccctttttttatagattagaaaagtgggactcaggaaaagttagttcacttgttggaaattctgcagcatattaggacttaaattcaggttttctgactaagaatctgatgttcttttttatttacatcatgtatattgcatgctctttatgtcagggcatggtaat

SEQ ID NO: 39248 - DNA, 790 bp, Homo sapiens
tcctgccttgtcctcccaaagtactgtggttacagacttgagccacctcacctggccacaataatcttaattctgtgaagtgagtagtgttattcctaatttacatttgagggattttcagctcagacttggcaraggtctaccacttactataaccctggctggtgttcaaacttaagtcattcagatatcaaacccatgctcttttttaactacgctagttataggtagaacattaaatgagatgtagattatttagcacactgctggaactgcaatttgatacatatattttgttgaaagtgggtgaatagcactagctttatatgtgagtaatcatactctatggttgggctgtgtaaaactttttattaggtgactgtacaatgtttatttcagatagtggcttaaaagccacttttgtatttatccacctgaattatgcgcctgtcagtatactgttaacagatgtcagaatatggtttttttatgtgattgcagagggagacttcaattcagaattttatccttcataacattatagtgattttaaaagttatatgcagcaaatgtgtagtatttttctcatttcaactttcacagcagtaggcaggtggttgtatccctttttttatagattagaaaagtgggactcaggaaaagttagttcacttgttggaaattctgcagcatattaggacttaaattcaggttttctgactaagaatctgatgttcttttttatttacatcatgtatattgcatgctctttatgtcagggcatggtaat

SEQ ID NO: 39249 - DNA, 738 bp, Homo sapiens
aaaaattaaaaaattagccaggcatggtggtgcgagcccatggtctcaggtaggatgattgcttgagcccaggtgatagaacaaaaccctatctcaaaaaaaaaaaaaaaaatttttttttttgtatgtatgtaactctttacttatctactacctaataatccacaaaaatacccacaaatccttaattacgtggaggaggaggagatgataatagagatcattttaactttgaaagataatggattccgggccagatgtggtaactcacccctgtaattcccaacactctgggaggctgaggtgggacgatagcttgagtccaggaattcaagaccagcctgggcaacatggcaatacctcatctctattaaaaaaaaaattattaagaaagaaaggggccaggtgcggtggctcacgcctgttaccccagcactttgggaggctgaggcgggyggatcacaaggtcgagggattgagaccatcctggccaaccaacatggtgaaaccctgtctttactaaaaatacaaaaataagctgggtgtagtgttgcatgccttttagtcccagctacttgggaggctgaggtaggagaatcgcttgaacccggcaggcagagattgcagtgagccgggattgtgccactgcactccagcccgggcgacagagcgagactccgtctcaaaaaaaaaaaaaaagaaagataatggatttggttctgccattagatctgggtt

SEQ ID NO: 39250 - DNA, 965 bp, Homo sapiens
aattattatatatcaaaaaagcatggagtttcaaagaccttctttttaaaaagtttttaaaaatgtaataataataataatctacaatatacaggagagccctgtgacaaagagttacccaaaatgttaataataccaagtttgagaaacctgctgtatagccaagcaggctctttgggaataggggcattaatggcagagggatggagcaggcgctcttggtgtaataactgatcgtcgttttctctcttccactcttttctcccacttgtcctcacacaggagccaatgcctcggccccagaccaactgagcttagctttagcctggaacagagtcgacatcgctcgcagccagatctttatttacgggcaacagtggccggtagagtatatatcgtctcccatgaaaagcccactttggttggscaagggtatttgtttaaggagcctctgaggtcagctcagaaaacgattgctttttctttaagatggaatgtgttccttggtagcaaagtctgtatcctgagctccctttctcatatttaggaaagcaccgccatctagtggaaatttcaactgaacacaactccaaatatttccatctctatgagttgtctttaatagcaattttcagctgcaaatgatgccatttatttgaatacatctgaaaaaatataagacaaatctgtattaactaaaattaaggaaggggtagaattattaatttgcttctgattgtctttgatggggcaaagggaagggtcacacctcaggatgcagaattagcaggcttccctctgcaggcgccatctggtcctggtgactgagcacaggtcctccctatttgcaaagaacaacatgaggaaaccaatgctttatataactgttcttggtttgcttccctcaattgactctaccaaaaataaaaatttgagagattggccatcaggtgggatatgtatgc

SEQ ID NO: 39251 - DNA, 965 bp, Homo sapiens
aattattatatatcaaaaaagcatggagtttcaaagaccttctttttaaaaagtttttaaaaatgtaataataataataatctacaatatacaggagagccctgtgacaaagagttacccaaaatgttaataataccaagtttgagaaacctgctgtatagccaagcaggctctttgggaataggggcattaatggcagagggatggagcaggcgctcttggtgtaataactgatcgtcgttttctctcttccactcttttctcccacttgtcctcacacaggagccaatgcctcggccccagaccaactgagcttagctttagcctggaacagagtcgacatcgctcgcagccagatctttatttacgggcaacagtggccggtagagtatatatcgtctcccatgaaaagcccactttggttggccaagggtatttgtttaaggagcctctgaggtcagctcagaaaacgattgctttttctttaagatggaatgtgttccttggtagcaaagtctgtakcctgagctccctttctcatatttaggaaagcaccgccatctagtggaaatttcaactgaacacaactccaaatatttccatctctatgagttgtctttaatagcaattttcagctgcaaatgatgccatttatttgaatacatctgaaaaaatataagacaaatctgtattaactaaaattaaggaaggggtagaattattaatttgcttctgattgtctttgatggggcaaagggaagggtcacacctcaggatgcagaattagcaggcttccctctgcaggcgccatctggtcctggtgactgagcacaggtcctccctatttgcaaagaacaacatgaggaaaccaatgctttatataactgttcttggtttgcttccctcaattgactctaccaaaaataaaaatttgagagattggccatcaggtgggatatgtatgc

SEQ ID NO: 39252 - DNA, 965 bp, Homo sapiens
aattattatatatcaaaaaagcatggagtttcaaagaccttctttttaaaaagtttttaaaaatgtaataataataataatctacaatatacaggagagccctgtgacaaagagttacccaaaatgttaataataccaagtttgagaaacctgctgtatagccaagcaggctctttgggaataggggcattaatggcagagggatggagcaggcgctcttggtgtaataactgatcgtcgttttctctcttccactcttttctcccacttgtcctcacacaggagccaatgcctcggccccagaccaactgagcttagctttagcctggaacagagtcgacatcgctcgcagccagatctttatttacgggcaacagtggccggtagagtatatatcgtctcccatgaaaagcccactttggttggccaagggtatttgtttaaggagcctctgaggtcagctcagaaaacgattgctttttctttaagatggaatgtgttccttggtagcaaagtctgtatcctgagctccctttctcatatttaggaaagcaccgccatctagtggaaatttcaactgaacacaactccaaatatttccatctctatgagttgtctttaatagcaattttcagctgcaaatgatgccatttatttgaatacatctgaaaaaatataagacaaatctgtattaactaaaattaaggaaggggtagaattattaatttgcttctgattgtctttgatggggcaaagggaagggtcacacctcaggatgcagaattagcaggcttccctctgcaggcgccatctggtcctggtgactgagcacaggtcctccctatttgcaaagaacaacaygaggaaaccaatgctttatataactgttcttggtttgcttccctcaattgactctaccaaaaataaaaatttgagagattggccatcaggtgggatatgtatgc

SEQ ID NO: 39253 - DNA, 598 bp, Homo sapiens
ttaaaacastattagttcacagtgtgccagtctccaatataagtagtttacaggcacactttttacacgagacaactacttgtgaggtagacaacattattgttcctgtgtttgaggttataaaattgtgcccaaggtcacacagcaagtaggtaatggggcaggattctggctacagagcacatgttcagctgaaatattccataaagattcagtattactattgccaattttcttctaatgatcaaactattatattctattcagaggacaaaactatggtgagattgttagggaagacagtcgtctgttacagagctgagccgactcctccacagatttttatacaaatcctcaaactgaaacaaaagttggcctttcattcagtaagtcagggattatgtctgcaaatagatctttaggagaagcctactggaagcaaatattgtttacctgcaggagaaacaattcacactgctgtcctactaggataataatgcaaaggccttttgtcacctgagcaaaattaatttgtgatttcaccccttatagcttctgggtcactacagcaatggtcattggtgggggtggtgaggga

SEQ ID NO: 39254 - DNA, 598 bp, Homo sapiens
ttaaaacagtattagttcacagtgtgccagtctccaatataagtagtttacaggcacactttttacacgagacaactacttgtgaggtagacaacattattgttcctgtgtttgaggttataaaattgtgcccaaggtcacacagcaagtaggtaatggggcaggattctggctacagagcacatgttcagctgaaatattccawaaagattcagtattactattgccaattttcttctaatgatcaaactattatattctattcagaggacaaaactatggtgagattgttagggaagacagtcgtctgttacagagctgagccgactcctccacagatttttatacaaatcctcaaactgaaacaaaagttggcctttcattcagtaagtcagggattatgtctgcaaatagatctttaggagaagcctactggaagcaaatattgtttacctgcaggagaaacaattcacactgctgtcctactaggataataatgcaaaggccttttgtcacctgagcaaaattaatttgtgatttcaccccttatagcttctgggtcactacagcaatggtcattggtgggggtggtgaggga

SEQ ID NO: 39255 - DNA, 719 bp, Homo sapiens
cacaagtgggagttgaacaatgagaacacatggacacagggaggggaatatcacacaccggggcctgtgggggatagggggctaggagagggataacattaggagaaatacctaatgtaggctatgggttgatgggtacagcaaaccaccatggcacatgtatacctatgtatcaaaactccaagttctgcacatgtaacccagaactttaaagtataataataataaaagaagatgatgaattgattattaaggtaaatagatatgccctttgtttagagggtttattctgtcaaatttttagatcaatttcaaaattggacatttgaaaggagatagtaaggctaaagrtagctcctggaagcaaagtttcttattggcttgggaagccagctcatacctgacaggtagatagagtcccagagtctgcaggagatctgttcagggctctgtgcatgagaatgttcagaacccactggctacatggagtttccttctctagcaactttgtctcagagaagtcaccatcaagatccataagaatgtctcattagcacatgtacttacaaagtgcaagactaagatggatgagagggacctaggttatcaatcaaattgtatgtaggatcagggaatagcctagatctagggcttggctattctatagcttgctcagtgttcattctgtttggacatagcattggtatgttgcagaggtc

SEQ ID NO: 39256 - DNA, 561 bp, Homo sapiens
ctgggcttaagaggacccagtcccccatgctttagctatagagtaccctaaagagtaaagccaaagactggagcttgtgaccaatgtaagaaaagcctaggatcaaaagagatggctgctgcttcaagatgagcccacagtgtcatggtccccaaaggggagtcccaggggtagtagtggggacaatagaggtccactgacttcaacccacagggcatcctggaacaatctggtctggtccctcccaaagactaacactagtcaagaatctgaggaagggcaacacagtgaatcaggacaataagggcatcttataaataagtgaatttgcccccacataacaatgaacatgcttagacaacaaatgcaacaaaatagggatgtgtttcccaaaagtgtggtccatgggccccaratcatctgaaatatttgtcaagaatgtagatagactgagaccctctaggggcagggactgaaaatccgccttttaaaacatgctcccctggttatgtttatgtatattcaagcttgagaaccactgccctggatctaaaaagaaca

SEQ ID NO: 39257 - DNA, 575 bp, Homo sapiens
tggtaaaagacacagcgcatacaaggggaatgtaaaaaacgaatttcagaagcaaactgtggaattcactgcagaaaagaaataattcaagtgatcataggaaagctccctaaacagaagcaggagtactaacagaatgcagtgaaacatgcataccaggttcaagcagcatgatacgctacatgtatcaccttgtcaactccaaaacaaacctttgagggaggtgctattatattcatacttttcaaataaagaatctgtacaaagtaacttgttccatattaygcagcaatcttctagactccacagactaggtaaatctagactctggtccaaaaataattccatgctctgttgtccatcaaggaagactcaagtttgcagacagaaaggcctaagtgtcagacaacattaatgaagagagccactaagacccctagaccagcagagcataaggccacaggaacaggaacaggaagcaaaaattatgctaatggatgactaggggtaatggcaactggtgccactcccatttccaccccttgattcttgaatcttggctatggtagaaacag

SEQ ID NO: 39258 - DNA, 529 bp, Homo sapiens
aggattgcttgagctcaggagtttgaggtttcggtgagctatgattatgctactgcactccaagtagactctgattcttaaagaaacaaaacagctstgtgcggtggctcatgcttataatcccagcactttgggaggccgaggtgggtggatcacctgaggtcaggagttcgagaccagcctgaccaacatggagaaaacccatctctactaaaaatacaaaattagccaggtgtggtggcacatgcctgtaatcccagctactcaggaggctgaggcaggaaaatcgcttgaacccaggaggcaaagggtgcggtgagctgagactatgccactgcactccagcctgggcgacagcgagactccatctcaaaaggagaaaaaaaaaaaggtttcttgaaataggaaagaaaacaatgtacaataaatacagtggtggttaggcctgggtttgaatcccagatctctctcctatttgcagtgtgaaagtgagaaaattacttatctcttttagcctttctgtaaacaa

SEQ ID NO: 39259 - DNA, 529 bp, Homo sapiens
aggattgcttgagctcaggagtttgaggtttcggtgagctatgattatgctactgcactccaagtagactctgattcttaaagaaacaaaacagctckgtgcggtggctcatgcttataatcccagcactttgggaggccgaggtgggtggatcacctgaggtcaggagttcgagaccagcctgaccaacatggagaaaacccatctctactaaaaatacaaaattagccaggtgtggtggcacatgcctgtaatcccagctactcaggaggctgaggcaggaaaatcgcttgaacccaggaggcaaagggtgcggtgagctgagactatgccactgcactccagcctgggcgacagcgagactccatctcaaaaggagaaaaaaaaaaaggtttcttgaaataggaaagaaaacaatgtacaataaatacagtggtggttaggcctgggtttgaatcccagatctctctcctatttgcagtgtgaaagtgagaaaattacttatctcttttagcctttctgtaaacaa

SEQ ID NO: 39260 - DNA, 529 bp, Homo sapiens
aggattgcttgagctcaggagtttgaggtttcggtgagctatgattatgctactgcactccaagtagactctgattcttaaagaaacaaaacagctctgtgcggtggctcatgcttataatcccagcactttgggaggccgaggtgggtggatcacctgaggtcaggagttcgagaccagcctgaccaacatggagaaaacccatctctactaaaaatacaaaattagccaggtgtggtggcacatgcctgtaatcccagctactcaggaggctgaggcaggaaaatcgcttgaacccaggaggcaaagggtgcggtgagctragactatgccactgcactccagcctgggcgacagcgagactccatctcaaaaggagaaaaaaaaaaaggtttcttgaaataggaaagaaaacaatgtacaataaatacagtggtggttaggcctgggtttgaatcccagatctctctcctatttgcagtgtgaaagtgagaaaattacttatctcttttagcctttctgtaaacaa

SEQ ID NO: 39261 - DNA, 529 bp, Homo sapiens
aggattgcttgagctcaggagtttgaggtttcggtgagctatgattatgctactgcactccaagtagactctgattcttaaagaaacaaaacagctctgtgcggtggctcatgcttataatcccagcactttgggaggccgaggtgggtggatcacctgaggtcaggagttcgagaccagcctgaccaacatggagaaaacccatctctactaaaaatacaaaattagccaggtgtggtggcacatgcctgtaatcccagctactcaggaggctgaggcaggaaaatcgcttgaacccaggaggcaaagggtgcggtgagctgagactatgccactgcactccagcctgggcgacagcgagactccatctcaaaaggagaaaaaaaaaaaggtttcttgaaataggaaagaaaacaatgtacaataaatacagtggtggttaggcctgggtttgaatcccagatctctctcctatttgcagtgtgaawgtgagaaaattacttatctcttttagcctttctgtaaacaa

SEQ ID NO: 39262 - DNA, 529 bp, Homo sapiens
tgggctactcaactctgctaaaatcccccaccatccgtcacggtggacgagtcgggttttttttctctttcacttttactccaagaagagtttgtgggcaggcaggcaggtctcacggggactctgccaaagcaaccgaaagctctgcggggcagctcctctgccactcagcgatccgaggccccgggaaggtctaggagttcgcttgtcggagtccagggtgtgatatgtaaaacagccacattcttgggagaggagtggggagatggaccgttcgacttgtttttggagtttttgtttgcctccagaaactgtaggaaaatagtttatctcaaagaggatctgtcaattctcttagatttgtgaataatttggtcttttcagagtttgtctgtggtgacccttgtgaatatggggagatgctttttttgtctccccgtgttcgcgtctgttcaatgctggctgcactgacatccaccttaarggtttacgtgtgcgaggagtcgagcgtaccagggtagagtaggcg

SEQ ID NO: 39263 - DNA, 817 bp, Homo sapiens
tcctaatcccagcattgccgtgaccttgctgtgtgacccagggtaggtgccttcccctctctgagtctctgtgtaacagcggagttgagtgaaaatatgaaaatatttttttaagtctttcagctcaggatagtggagagacctcaggtctgagccaagtgccttgttttgcccctccatgcagaaaaggcctgcccccctcccccctctgtggggagaagacrgaggggacaggggcctgcgctatttttatcccagattaggagcctcttgccagtcgctaggcccgctgaccccacacttgctcctctgaagggcgcgcgaactgcttaatcagaccgctctcggcacaactgattaatagaggttcctgcttttaaaaaaagaaagaaagaaaggaaatgcttctgtaaatcagctgtttatttaactttccctggcatttaatgattgcgaagcttgggagagaaggagagatggaaaattaatttgagtctcgccagaaaagccagtcagggaaataatgaacttcccaagtcttatggggaacagagacagaggagatgccaggaggagacagagcccctgagcctccatgctgtgggctggagctgggctctgctgagtggcagacaggcagcccatcctccctgagctgctgtcagatagggagggtgagagtcaggcagggttttcagcttctttcaatatgcaaagcctcgtcaatttccccccaatcttgttaaaatggaggaaagcagaagcacagcaaggaagagccaagaaattgcagataataacaattgctggatgtttt

SEQ ID NO: 39264 - DNA, 1210 bp, Homo sapiens
tctaaaatgaggtaatgagactaactgactctagagttttttgggtgttttgttttgttttgttttgttttgttttgttttgttttgttttgtctgagatggaatcttgctctgtcatccaggctgaagtgcagtggcgctatctcggctcactgcaatctccacctcccgggttcaagcaattctcctgcctcagcctcccaagtagctgggattacaggtgcccaccaccatgcccagctaatttttgtatttttagtagagacggggtttcaccatgttggccaggctgtctccaattcctgacctcaagtgatctgcccacctcagcctcccaaagtgctgagattacaggcgtgagccactgtgcctggcctagcgttattttagccctaactaacattattctctgggtcagtgaaatttaagtggaatatattgggcagtgacctaatggagcatgaagcaggatttgaatcacttccaaagctgtacaccaaccacttaggcaaagtagtgatttcagtaacttagtatttcagtaactggtgctcacaggcaaatgcgtaatggattaaccccatattatttaaatgcttccaaaaagctataggaaaatggccattaaaaacaaactgacaaatttagccaacaggccactatttgacaattctgcaagcttatttttaaaattcagcttatcaaaactgccattccagaagccagggacctgagtttccatagaggatggagtagaatggaggggcctctgtataaatctacctcctcgggaactgggacagttcagcattcaccagagtaacrtatgaagaaacaggagattcctacatgctcctggggatccagaagagagaccactcacatgactggaagatttccagctcaggtaaccacaaaggccatatatttggtgaatacaggcaatgttagttagaataaaaccaaatttctctgaataatataaagtcattactaataaaacttttatagatttttctctgaagaaatttccaggaaggtgttaagagaaagccctacaattaaggtatggaggctggctgcaggccctgaaagctgctctgatgagcaatgacttaatgctgatagtgggaagtctcttgcccactgcaggatacagagaattcttcctcaacccgaggcttctgctcattcactcccttctcagcag

SEQ ID NO: 39265 - DNA, 1210 bp, Homo sapiens
tctaaaatgaggtaatgagactaactgactctagagttttttgggtgttttgttttgttttgttttgttttgttttgttttgttttgttttgtctgagatggaatcttgctctgtcatccaggctgaagtgcagtggcgctatctcggctcactgcaatctccacctcccgggttcaagcaattctcctgcctcagcctcccaagtagctgggattacaggtgcccaccaccatgcccagctaatttttgtatttttagtagagacggggtttcaccatgttggccaggctgtctccaattcctgacctcaagtgatctgcccacctcagcctcccaaagtgctgagattacaggcgtgagccactgtgcctggcctagcgttattttagccctaactaacattattctctgggtcagtgaaatttaagtggaatatattgggcagtgacctaatggagcatgaagcaggatttgaatcacttccaaagctgtacaccaaccacttaggcaaagtagtgatttcagtaacttagtatttcagtaactggtgctcacaggcaaatgcgtaatggattaaccccatattatttaaatgcttccaaaaagctataggaaaatggccattaaaaacaaactgacaaatttagccaacaggccactatttgacaattctgcaagcttatttttaaaattcagcttatcaaaactgccattccagaagccagggacctgagtttccatagaggatggagtagaatggaggggcctctgtataaatctacctcctcgggaactgggacagttcagcattcaccagagtaacgtatgaagaaacaggagattcctacatgctcctggggatccagaagagagaccactcacatgactggaagatttccagctcaggtaaccacaaaggccatatatttggtgaatacakgcaatgttagttagaataaaaccaaatttctctgaataatataaagtcattactaataaaacttttatagatttttctctgaagaaatttccaggaaggtgttaagagaaagccctacaattaaggtatggaggctggctgcaggccctgaaagctgctctgatgagcaatgacttaatgctgatagtgggaagtctcttgcccactgcaggatacagagaattcttcctcaacccgaggcttctgctcattcactcccttctcagcag

SEQ ID NO: 39266 - DNA, 1210 bp, Homo sapiens
tctaaaatgaggtaatgagactaactgactctagagttttttgggtgttttgttttgttttgttttgttttgttttgttttgttttgttttgtctgagatggaatcttgctctgtcatccaggctgaagtgcagtggcgctatctcggctcactgcaatctccacctcccgggttcaagcaattctcctgcctcagcctcccaagtagctgggattacaggtgcccaccaccatgcccagctaatttttgtatttttagtagagacggggtttcaccatgttggccaggctgtctccaattcctgacctcaagtgatctgcccacctcagcctcccaaagtgctgagattacaggcgtgagccactgtgcctggcctagcgttattttagccctaactaacattattctctgggtcagtgaaatttaagtggaatatattgggcagtgacctaatggagcatgaagcaggatttgaatcacttccaaagctgtacaccaaccacttaggcaaagtagtgatttcagtaacttagtatttcagtaactggtgctcacaggcaaatgcgtaatggattaaccccatattatttaaatgcttccaaaaagctataggaaaatggccattaaaaacaaactgacaaatttagccaacaggccactatttgacaattctgcaagcttatttttaaaattcagcttatcaaaactgccattccagaagccagggacctgagtttccatagaggatggagtagaatggaggggcctctgtataaatctacctcctcgggaactgggacagttcagcattcaccagagtaacgtatgaagaaacaggagattcctacatgctcctggggatccagaagagagaccactcacatgactggaagatttccagctcaggtaaccacaaaggccatatatttggtgaatacaggcaatgttagttagaataaaaccaaatttctctgaataatataaagtcattactaataaaacttttatagatttttctctgaagaaatttccargaaggtgttaagagaaagccctacaattaaggtatggaggctggctgcaggccctgaaagctgctctgatgagcaatgacttaatgctgatagtgggaagtctcttgcccactgcaggatacagagaattcttcctcaacccgaggcttctgctcattcactcccttctcagcag

SEQ ID NO: 39267 - DNA, 1210 bp, Homo sapiens
tctaaaatgaggtaatgagactaactgactctagagttttttgggtgttttgttttgttttgttttgttttgttttgttttgttttgttttgtctgagatggaatcttgctctgtcatccaggctgaagtgcagtggcgctatctcggctcactgcaatctccacctcccgggttcaagcaattctcctgcctcagcctcccaagtagctgggattacaggtgcccaccaccatgcccagctaatttttgtatttttagtagagacggggtttcaccatgttggccaggctgtctccaattcctgacctcaagtgatctgcccacctcagcctcccaaagtgctgagattacaggcgtgagccactgtgcctggcctagcgttattttagccctaactaacattattctctgggtcagtgaaatttaagtggaatatattgggcagtgacctaatggagcatgaagcaggatttgaatcacttccaaagctgtacaccaaccacttaggcaaagtagtgatttcagtaacttagtatttcagtaactggtgctcacaggcaaatgcgtaatggattaaccccatattatttaaatgcttccaaaaagctataggaaaatggccattaaaaacaaactgacaaatttagccaacaggccactatttgacaattctgcaagcttatttttaaaattcagcttatcaaaactgccattccagaagccagggacctgagtttccatagaggatggagtagaatggaggggcctctgtataaatctacctcctcgggaactgggacagttcagcattcaccagagtaacgtatgaagaaacaggagattcctacatgctcctggggatccagaagagagaccactcacatgactggaagatttccagctcaggtaaccacaaaggccatatatttggtgaatacaggcaatgttagttagaataaaaccaaatttctctgaataatataaagtcattactaataaaacttttatagatttttctctgaagaaatttccaggaaggtgttaagagaaagccctacaattaaggtatggaggctggctgcaggccctgaaagctgctctgaygagcaatgacttaatgctgatagtgggaagtctcttgcccactgcaggatacagagaattcttcctcaacccgaggcttctgctcattcactcccttctcagcag

SEQ ID NO: 39268 - DNA, 755 bp, Homo sapiens
ttcaccagattacatcttcgacagcccctgaaaatttggagttacctgagagtcgaagacacctgtcctacttgattcttcttacttgtacagtcatctgagaacaaaattcaaaaaggccagtcatgctttaagcaggtctcatttcccagactgcaaacaaacatggaggtctatctgggascagagacttgactacctgatgcttgccttgattccaggatactctgaattttctcagatcttgggttgagtctttagagagcttgtctggcaggctttcctgagcccaccatgaaggtcatcatctccacttgctttgccctgagtcacagcaaaaagctaaaaatgtctttattcccacatatcatggaacacatatccactccagccaaagcctccaagtcctggcacaaggccagcacccaaacccatggctgtgtgttccaccatagctttcatgcagaacttcctcccttctccaaggagatgatagacatccgtgtcccacctaccatcaggagacagcacagtgaactcaagccttctgctactatgggcccttgggttctcaagggggaatttcatgtaaaatgctcctgaaacagctaattatctcaccaccgtgtactagtacacacagtgcctgaaccatgccaaagtcagcatgattctttatcatttttttgaagtgcgccgattaatgttacttatttaatccctagaacaatcatgcaacattcaagggctggaat

SEQ ID NO: 39269 - DNA, 755 bp, Homo sapiens
ttcaccagattacatcttcgacagcccctgaaaatttggagttacctgagagtcgaagacacctgtcctacttgattcttcttacttgtacagtcatctgagaacaaaattcaaaaaggccagtcatgctttaagcaggtctcatttcccagactgcaaacaaacatggaggtctatctgggaccagagacttgactacctgatgcttgccttgattccaggatactctgaattttctcagatcttgggttgagtctttagagagcttgyctggcaggctttcctgagcccaccatgaaggtcatcatctccacttgctttgccctgagtcacagcaaaaagctaaaaatgtctttattcccacatatcatggaacacatatccactccagccaaagcctccaagtcctggcacaaggccagcacccaaacccatggctgtgtgttccaccatagctttcatgcagaacttcctcccttctccaaggagatgatagacatccgtgtcccacctaccatcaggagacagcacagtgaactcaagccttctgctactatgggcccttgggttctcaagggggaatttcatgtaaaatgctcctgaaacagctaattatctcaccaccgtgtactagtacacacagtgcctgaaccatgccaaagtcagcatgattctttatcatttttttgaagtgcgccgattaatgttacttatttaatccctagaacaatcatgcaacattcaagggctggaat

SEQ ID NO: 39270 - DNA, 636 bp, Homo sapiens
acaggaaagggacctggagtttgcacaggctgcagcccttcacccagagccaccctagcacctagtaggtgcccaataaatgctcggtgaaggaaggcattccaccgcagggttttaggagaaccatgaattcctgggtgaacattaagcrtttagtcctactaggaagtctggaatatagagacttgaactgtttctcaaaggcagctgttcttgtatccccagagccggtttagaatccagcaaaggcccctgcccggtgtatcccacctctggagacccgaggatagtgcggtggggggcaccgcgggttctggtctttcccacgctcacgtccactggcccaggcccaaaggaaatggctgtgagagcaagatgtgaagatagttacaaataccagctagggccagtgacagttgcagaaatgaggacttgtaatagttaggagtatttcttcattattttgagatgaatacatttggttatatattaaccaatacttttcttgagaattctcatcttccatcatcctcgctatcatattcattaatagttaacttttagaaatctcaatatttaggttacaggatagcaaatatggaatgtgatctagctaaaaaaggagtgaacatcatt

SEQ ID NO: 39271 - DNA, 616 bp, Homo sapiens
caaagttcccaatgacctagtgcaggtgtgyttttgatggtcctggctgtatcatgctggcaattcagtggtaagccttgttctctagtcacaaataagggttgcagccattgtaaggaacagtaaaaaccagttatgaccacaccactgcattagtggaagctaccaacatggcggtttgaaaggtgacattttaccctttgggatattttctgctcaatggtgagacatagggcatgtcctgggccctaggtatgtgcaatgtggggtctcctttttgcctgacaggagtcagtggtaaaccctgctaaaggactcagtcagtgcacggattgaaaacaaaccaaaagacagctcagtttctccccaaaaagatgccacacactgccattttggattggaatcaaggttctgcattcacaacacaaagtgccaatcactataccaccgtggcatgccataaacttgctggcagatgctgagttttctttaacactttcgatgtaaacatattcacaatattttgttcttgcatcacttgctttctgacaggttgagtggtaagaagcacaaattcctatattctgttctttccaaaaatgtttagtttgatcag

SEQ ID NO: 39272 - DNA, 542 bp, Homo sapiens
cgctcctcattctctctcctgggccagagaaagcccaccccagccaccctgccacagaaactggttctggacagcagctgagtgtagtggctaaggaagtgggcctgagagtcacagaaatctgagttcaactcytggccttctcacttctagctgcgtggccttgggcaagttacttaccctctctgaaccttggatgtcttgcctatgagacggaaataattcctctccccatagggttgttgtgaggctgtatgccaagcccttggcacagtgcctggcacacagtaggtgcttggggagtagcagtgcctccctctaatcccagtaccctctaccatcttctcttgtgctgccttttcttcccttggtcagagagtgtcctgacttttgcttgtttttctggtacatacccagtggttatctcaggtcaatatgtggtgctgaatcctaatgtaggggtcctggcagaggtactttgaacatggcgcagaggtgactttgaacttggctcagaggtgaggagcagggaagctggacac

SEQ ID NO: 39273 - DNA, 451 bp, Homo sapiens
atatcttgttctactgcagcctatttaatagtaattaataaaaagtaaattgagttaataagattgcataaatataacatcgcaaaaccaagaattgttaagttttctcayactgattataagattcatccatgttgttacatgtagctgtggctcatttattttcatagcaataaagtatcccattgtctgaatgcaccacagcttatttatccattcttctgccatcagacatttgggttgccaccaggtttttgctattttgaacagtgtttgtatgaatattcttataagtagcccctgttgtacatctataagaatttctcttatatctgggaaagaaattgctgggtgatacagcatgcaaatgctcaattttaaaagatattaccatttctccccctaaagtgcctgttcccgtttacacttccaccaccagttcgtgagagtt

SEQ ID NO: 39274 - DNA, 531 bp, Homo sapiens
tcagtcttggttactttgggaaagtgtgtgtggccatttggcttgtttgaagatttcttggaccttagtttccacttctccagacacattaatgtaggtgtagtaggttttcttgatgacagcactgactcctccttgttcagctagsgggtaatccagagcttgtctattattaaacccattcctgctagtgagtgtaaagacttttctagtgctgatagacttgtgccagtttttgctaaggctatttcaagggaggtggtaagttcccatattgacatttcatggtaagtaaaggggtgagagttgcaatagttcccacaattctggccacacttaagtcctcgggccctttttcttctagaatggaattctgaatcggaagttatgttcaagacactgatttgggtatgagctattgttcctagagtacaatcaccataatgaagagaattattaagatgggatagggccgaagtttgaaaagggcttaaataattattagcagtgctgcaaagcagtgagagccca

SEQ ID NO: 39275 - DNA, 531 bp, Homo sapiens
tcagtcttggttactttgggaaagtgtgtgtggccatttggcttgtttgaagatttcttggaccttagtttccacttctccagacacattaatgtaggtgtagtaggttttcttgatgacagcactgactcctccttgttcagctagcgggtaatcyagagcttgtctattattaaacccattcctgctagtgagtgtaaagacttttctagtgctgatagacttgtgccagtttttgctaaggctatttcaagggaggtggtaagttcccatattgacatttcatggtaagtaaaggggtgagagttgcaatagttcccacaattctggccacacttaagtcctcgggccctttttcttctagaatggaattctgaatcggaagttatgttcaagacactgatttgggtatgagctattgttcctagagtacaatcaccataatgaagagaattattaagatgggatagggccgaagtttgaaaagggcttaaataattattagcagtgctgcaaagcagtgagagccca

SEQ ID NO: 39276 - DNA, 603 bp, Homo sapiens
  misc_feature (1)...(603): n = A,T,C or G
atcccagggctgccaaagaacccagccaggactgctcagtgggcaggagagaagcctccaagggtgggtgacaggttccctacagattcccctgactgctgggttctcccattttacaaatcagagaaagggataagttctgtcctggagcagtgctctgttctcttaagttctctaacttaggccatgtcagccactcagccatccagccagccatcaaatattgattgagtgtgaactattggctaggcacttttttaggccttggggatacaacagtgaacaagacagacatggtggcccccctcctggagctgacctccagtggggagggatgggagatggggaaggtgtcaagtgcccaggctgcwgtgggaagatagctatttttgaaaggtggtcacagaagacatggccattaacatgacatttgagcaaagaactacacaggaactatgcacacagcaggggaaagatgtctcaggcaggtagatcagcaaatacaaagtncagaaggcaagagcgctcccactctgttggagcagnagcaaggaagcagaagctggnctggctggagtnaagnaggagaggagaacggagaag

SEQ ID NO: 39277 - DNA, 575 bp, Homo sapiens
aatgttaacaacacaaagtcagggactgtgtctagcacttttttgcatactcctcagtgtgtttattctgtaacagtggtccctaacccccatgcctcagactagtaccagtctgtgacctgttaggcccacagcaggagttgaacaagcattaccacctgagctccacctcctgcagcgacattagtttctcacaggatcgcaaactctattgtgaactgtgcatgtaagggatctatgtggtgtgctccttatgagaatctaactaacgtctgatgatctgaagtagaacagtttcatgccaaaactgtgcccccactggtctrtgggaaaactgtcttccaaggaaccagtcactggtgccaaaaaggttggggaccactgttctataggatatctcaaatcttcttgtagaagaagcaaaagagcgtttgaaatggcaagttatctcttttattcattttaatgtaaaaagatgtacctcatagaacttatgagagctattaataagcttcagtaacttgtcttctgtttgtccaatataaggtattagtaacacaaaggttgaagcacag

SEQ ID NO: 39278 - DNA, 632 bp, Homo sapiens
tacagtacacctttcttgtataatcccccttctgagttcattcacctgctcatcctcaaagaactaggcattaggagcacataactcactggagaaataataattaacatataaatggattggggagcttgggaggtgtttttaggtccattatttcatttttcaaccaatcaataaaaatacatagatttattgaatgcctattaggggtaaggtgccawacttgactatgggaaaatggcaataaataagatacctgctcctcctcaggaagacaagaaacaagtggttctgttaaaggatgatcagtattgaagaactgtcagtctatgtgttatgaaataagagtgaaggaaatataaaaaaggaggatttaattcagtcaactctcttactgagaaaatgaccaagatacagaattctgaaggatacaagtcaactacagaaaacgctggtggaacattaaggaataaaacacgttcagagtagtgttagcaacataaataaatatggtgagacattttatatagttataaattatgaattatttagcaaatgtataagcaaaatattaatttaaaatatagttgtggtagtcttgaaagctattgagctataattcttaaacagaa

SEQ ID NO: 39279 - DNA, 632 bp, Homo sapiens
tacagtacacctttcttgtataatcccccttctgagttcattcacctgctcatcctcaaagaactaggcattaggagcacataactcactggagaaataataattaacatataaatggattggggagcttgggaggtgtttttaggtccattatttcatttttcaaccaatcaataaaaatacatagatttattgaatgcctattaggggtaaggtgccaaacttgactatgggaaaatggcaataaataagatacctgctcctcctcaggaagacaagaaacaagtggttctgttaaaggatgatcagtattgaagaactgtcagtctatgtgttatgaaataagagtgaaggaaatataaaaaaggaggatttaattcagtcaactctcttactgagaaaatgaccaagatacagaattctgaaggatacaagtcaactacagaaaacgctggtggaacattaaggaataaaacacgttcagagtagtgttarcaacataaataaatatggtgagacattttatatagttataaattatgaattatttagcaaatgtataagcaaaatattaatttaaaatatagttgtggtagtcttgaaagctattgagctataattcttaaacagaa

SEQ ID NO: 39280 - DNA, 1582 bp, Homo sapiens
aatttgtctacatctttatttagaatcattgtactcacctatatataaatgtatctatatataaataaatggtttaaaaaagaggtgaatgatacagcctattgttatgtccggataagagcatattaggaatagtctgctttctattttataaccaagtgcctgaaagtttctgtctctccaagggctgtagacacttacatgagtccctgtacatccaaacataaaacaattaaaagagattccagtctttgccaaaggagcagagatactgtaccactcatgaacatgagtttttcttccttaccctttctatcaagacctaaaactccacccagttaccaggactcaatgacactcttgttgtccctttcttcaagatgtcccaattctgacactgacttccctgctaggtttttaagaatttacttgctttccttatataatagtgcccccatccacagttttgccttcccacagtttcagttacccaagattaactttgacccaataatattaaaaggaaaattctagaaaaaaacaatttataagttttaagttatatgccattctaagtagcataaaatctcactccatcccaccctgtcccacccaggacatgaattatccttttgtccagtatattcacactatatatgcttcccatccattagtcacttagtagctgtctcagttatcacattggctcttgaagtattgcagtgcttgtgttcaagtggcccttattttacttagtggcccaaagtgcaagagtagcaatgctgccaatttggatatgccaaaaagaaggcatcaagtgcctccttgaagtgaaaagatgaaagttctcaagttaataaggaaagaaaaatatcttagctgaggttgccaagatctatagtaagaccgaatactctatccatgaaattgtgaagaagaaaaaagaaattagtgcatagtatatatagggtttggtactatcggcaattataggcatcagctggggatgttggaaagtattccccgtggataagggggatactactgtacctaytgaccccttgctactctaccaaacttttcacggctatatatgctacttgtttcactaaacagtttttccaactgtttttccaacagctgttgagttctacctgttttatgaagcttcacttggcatgccttatttcttctcctgattcataagtaaaagtaagacagaataatttaatcagaagtttagatgaaagttgaattaaaaaatatataagtatccatcccctcaatcatttatcctttgtgttacacataatccaattatactcttagttatttttaaatgtacaattgagttattattgactatagtcactctgttgtgctatgaaatagtaggtcttattcattctattttattttgtacccattaaccatcccaatctccccgtcaccactcccccactacccttcccagcctctggttaccatccttctactctctatgtccattagttcaattgctttgatttttagaccccatgcaatgtttgccttcctgtgtctgacttatttcacttaacgt

SEQ ID NO: 39281 - DNA, 1871 bp, Homo sapiens
  misc_feature (1)...(1871): n = A,T,C or G
tctttagcatttgtgggatccaacatctggaacgaataggaaagaagctgaatctctttgactccctttatttctgcattgtgacgttttctactgtgggcttcggggatgtcactcctgaaacatggtcctccaagctttttgtagttgctatgatttgtgttgctcttgtggttctacccatacaggtaaacaaaaccatcttatattgcatagaaatgtacagagacatgaaattgaatcctccacatttaataagaaatggaaagtggcttrtttatctaacactaatttactaacacatactatcattacatttaatcaattacataaattactgcagaaatgtcattttacattttattagaaacaccgagttgcttttttttccttccagtcatgactgacagcactcatcttatttcaatcattcaagattttttttagtatagggtacttaattatattaaatatagaataacatagtttttaattataggatgatagatcaaagaaataaatttgtgaagggttgatttctcttggttcttcaaaataaaccacaaagtcatacactgcaatgaagaaaaatctattacttatgtttgtcaaataaaatctgggccaggtgcagggctcatgcctataataccagtattttgggaggctgaggcaggtggatggcttgagccaaggagttgaagatgagcttgggctataaggtaaaaccccatctctacaaaaaaaaaaaaaaaagtctgaacatggtatgtaaatattatgtggcactttggggagtgagtagggaggttgcaaagggatggatatataaatggaattaaagataagtagatgcaatctctaactctttcctataataagccctggctgcccatgtgtgggcagatcagaagcaggctatagggaaatgcaaatcaaacttgcatattccattgcaaaactttggccgcaatgtatctgaatagaatacctgcaaaaatggccttcctgctccgataaattcatgcatgtctttcttcctgacataccctcccttgcacctttcactttcctccgttaatggctactgtacagctagaatgtggccttgtgtgttatggtaagagtaactcctattgcatgagatatggttagaatttgacagagaatgtgggaaaatagcaatgaggcttttctctttcactcagctctactggacataaagcagaggtacaaacctcttagtggcctgttattatgtgatagcaaaatcatgttaatatgtttccttagagacccgaagcccctgggagacatttgcagcctctgtagaaattatatgaaaagtctgtcgttgaaggggaatactgacaattagaatctcaatgagttccatctaggaaattgaaaatacctaataaacaatagatgtattgcattgatttatttatttccttactgtgtttttcattcacatgtggaaaatatattacagtttgaacagctggcttatttgtggatggagagacaaaagtcaggaggaaactatagtcgacatagagctcaaactgaaaagcatgtcgtcctgtgtgtcagctcactgaagattgatttacttatggattttttaaatgaattctatgctcatcctaggctccaggtacatttggcttatattatgtgctatactggatcatacctactaacatattgtcaaagtcaattaactgatggtgcagcctgctttgtgtgagatttttattattcacccaattcgaaggagtaaatgaagaccccaaattacccgggacatagaaaaaaatgctggaggatactcagtttttaaggttcctctgntctaccctgaaaga

SEQ ID NO: 39282 - DNA, 1871 bp, Homo sapiens
  misc_feature (1)...(1871): n = A,T,C or G
tctttagcatttgtgggatccaacatctggaacgaataggaaagaagctgaatctctttgactccctttatttctgcattgtgacgttttctactgtgggcttcggggatgtcactcctgaaacatggtcctccaagctttttgtagttgctatgatttgtgttgctcttgtggttctacccatacaggtaaacaaaaccatcttatattgcatagaaatgtacagagacatgaaattgaatcctccacatttaataagaaatggaaagtggcttatttatctaacactaatttactaacacatactatcattacatttaatcaattacataaattactgcagaaatgtcattttacattttattagaaacaccgagttgcttttttttccttccagtcatgactgacagcactcatcttatttcaatcattcaagattttttttagtatagggtacttaattatattaaatatagaataacatagtttttaattataggatgatagatcaaagaaataaatttgtgaagggttgatttctcttggttcttcaaaataaaccacaaagtcatacactgcaatgaagaaaaatctattacttatgtttgtcaaataaaatctgggccaggtgcagggctcatgcctataataccagtattttgggaggctgaggcaggtggatggcttgagccaaggagttgaagatgagcttgggctataaggtaaaaccccatctctacaaaaaaaaaaaaaaaagtctgaacatggtatgtaaatattatgtggcactttggggagtgagtagggaggttgcaaagggatggatatataaatggaattaaagataagtagatgcaatctctaactctttcctataataagccctggctgcccatgtgtgggcagatcagaagcaggctatagggaaatgcaaatcaaacttgcatattccattgcaaaactttggccgcaatgtatctgaatagaatacctgcaaaaatggccttcytgctccgataaattcatgcatgtctttcttcctgacataccctcccttgcacctttcactttcctccgttaatggctactgtacagctagaatgtggccttgtgtgttatggtaagagtaactcctattgcatgagatatggttagaatttgacagagaatgtgggaaaatagcaatgaggcttttctctttcactcagctctactggacataaagcagaggtacaaacctcttagtggcctgttattatgtgatagcaaaatcatgttaatatgtttccttagagacccgaagcccctgggagacatttgcagcctctgtagaaattatatgaaaagtctgtcgttgaaggggaatactgacaattagaatctcaatgagttccatctaggaaattgaaaatacctaataaacaatagatgtattgcattgatttatttatttccttactgtgtttttcattcacatgtggaaaatatattacagtttgaacagctggcttatttgtggatggagagacaaaagtcaggaggaaactatagtcgacatagagctcaaactgaaaagcatgtcgtcctgtgtgtcagctcactgaagattgatttacttatggattttttaaatgaattctatgctcatcctaggctccaggtacatttggcttatattatgtgctatactggatcatacctactaacatattgtcaaagtcaattaactgatggtgcagcctgctttgtgtgagatttttattattcacccaattcgaaggagtaaatgaagaccccaaattacccgggacatagaaaaaaatgctggaggatactcagtttttaaggttcctctgntctaccctgaaaga

SEQ ID NO: 39283 - DNA, 1871 bp, Homo sapiens
  misc_feature (1)...(1871): n = A,T,C or G
tctttagcatttgtgggatccaacatctggaacgaataggaaagaagctgaatctctttgactccctttatttctgcattgtgacgttttctactgtgggcttcggggatgtcactcctgaaacatggtcctccaagctttttgtagttgctatgatttgtgttgctcttgtggttctacccatacaggtaaacaaaaccatcttatattgcatagaaatgtacagagacatgaaattgaatcctccacatttaataagaaatggaaagtggcttatttatctaacactaatttactaacacatactatcattacatttaatcaattacataaattactgcagaaatgtcattttacattttattagaaacaccgagttgcttttttttccttccagtcatgactgacagcactcatcttatttcaatcattcaagattttttttagtatagggtacttaattatattaaatatagaataacatagtttttaattataggatgatagatcaaagaaataaatttgtgaagggttgatttctcttggttcttcaaaataaaccacaaagtcatacactgcaatgaagaaaaatctattacttatgtttgtcaaataaaatctgggccaggtgcagggctcatgcctataataccagtattttgggaggctgaggcaggtggatggcttgagccaaggagttgaagatgagcttgggctataaggtaaaaccccatctctacaaaaaaaaaaaaaaaagtctgaacatggtatgtaaatattatgtggcactttggggagtgagtagggaggttgcaaagggatggatatataaatggaattaaagataagtagatgcaatctctaactctttcctataataagccctggctgcccatgtgtgggcagatcagaagcaggctatagggaaatgcaaatcaaacttgcatattccattgcaaaactttggccgcaatgtatctgaatagaatacctgcaaaaatggccttcctgctccgataaattcatgcatgtctttcttcctgacataccctcccttgcacctttcactttcctcygttaatggctactgtacagctagaatgtggccttgtgtgttatggtaagagtaactcctattgcatgagatatggttagaatttgacagagaatgtgggaaaatagcaatgaggcttttctctttcactcagctctactggacataaagcagaggtacaaacctcttagtggcctgttattatgtgatagcaaaatcatgttaatatgtttccttagagacccgaagcccctgggagacatttgcagcctctgtagaaattatatgaaaagtctgtcgttgaaggggaatactgacaattagaatctcaatgagttccatctaggaaattgaaaatacctaataaacaatagatgtattgcattgatttatttatttccttactgtgtttttcattcacatgtggaaaatatattacagtttgaacagctggcttatttgtggatggagagacaaaagtcaggaggaaactatagtcgacatagagctcaaactgaaaagcatgtcgtcctgtgtgtcagctcactgaagattgatttacttatggattttttaaatgaattctatgctcatcctaggctccaggtacatttggcttatattatgtgctatactggatcatacctactaacatattgtcaaagtcaattaactgatggtgcagcctgctttgtgtgagatttttattattcacccaattcgaaggagtaaatgaagaccccaaattacccgggacatagaaaaaaatgctggaggatactcagtttttaaggttcctctgntctaccctgaaaga

SEQ ID NO: 39284 - DNA, 1871 bp, Homo sapiens
  misc_feature (1)...(1871): n = A,T,C or G
tctttagcatttgtgggatccaacatctggaacgaataggaaagaagctgaatctctttgactccctttatttctgcattgtgacgttttctactgtgggcttcggggatgtcactcctgaaacatggtcctccaagctttttgtagttgctatgatttgtgttgctcttgtggttctacccatacaggtaaacaaaaccatcttatattgcatagaaatgtacagagacatgaaattgaatcctccacatttaataagaaatggaaagtggcttatttatctaacactaatttactaacacatactatcattacatttaatcaattacataaattactgcagaaatgtcattttacattttattagaaacaccgagttgcttttttttccttccagtcatgactgacagcactcatcttatttcaatcattcaagattttttttagtatagggtacttaattatattaaatatagaataacatagtttttaattataggatgatagatcaaagaaataaatttgtgaagggttgatttctcttggttcttcaaaataaaccacaaagtcatacactgcaatgaagaaaaatctattacttatgtttgtcaaataaaatctgggccaggtgcagggctcatgcctataataccagtattttgggaggctgaggcaggtggatggcttgagccaaggagttgaagatgagcttgggctataaggtaaaaccccatctctacaaaaaaaaaaaaaaaagtctgaacatggtatgtaaatattatgtggcactttggggagtgagtagggaggttgcaaagggatggatatataaatggaattaaagataagtagatgcaatctctaactctttcctataataagccctggctgcccatgtgtgggcagatcagaagcaggctatagggaaatgcaaatcaaacttgcatattccattgcaaaactttggccgcaatgtatctgaatagaatacctgcaaaaatggccttcctgctccgataaattcatgcatgtctttcttcctgacataccctcccttgcacctttcactttcctccgttaatggctactgtacagctagaatgtggccttgtgtgttatrgtaagagtaactcctattgcatgagatatggttagaatttgacagagaatgtgggaaaatagcaatgaggcttttctctttcactcagctctactggacataaagcagaggtacaaacctcttagtggcctgttattatgtgatagcaaaatcatgttaatatgtttccttagagacccgaagcccctgggagacatttgcagcctctgtagaaattatatgaaaagtctgtcgttgaaggggaatactgacaattagaatctcaatgagttccatctaggaaattgaaaatacctaataaacaatagatgtattgcattgatttatttatttccttactgtgtttttcattcacatgtggaaaatatattacagtttgaacagctggcttatttgtggatggagagacaaaagtcaggaggaaactatagtcgacatagagctcaaactgaaaagcatgtcgtcctgtgtgtcagctcactgaagattgatttacttatggattttttaaatgaattctatgctcatcctaggctccaggtacatttggcttatattatgtgctatactggatcatacctactaacatattgtcaaagtcaattaactgatggtgcagcctgctttgtgtgagatttttattattcacccaattcgaaggagtaaatgaagaccccaaattacccgggacatagaaaaaaatgctggaggatactcagtttttaaggttcctctgntctaccctgaaaga

SEQ ID NO: 39285 - DNA, 598 bp, Homo sapiens
ggtattggttcttcaagtgtcataggtgtctgtatatttttaataagttaattaattaagtaatgaagtaataaatgaatgaaataaattaaagtctatccatatgacaatgatgagagtgtgccacaaactaagaattgcaactaaactaaatctgaacttctggagattaatagcaattgtaaatgtatttattaaaaatgggcaggaggactccataggactatcttgagaagaaatgtccatgttctgccaataagtaaattaatcaaatgtttagcgctagtaggaatttgacagggaaccatatagaatatgattggcaaggttggatgagaagacacatggaagatattttcttatttaagcaacagsaagaataaagagaaaaatatgtaaatatatgtatatatagtacactcagggaagtaaaaggaattaaaatggctagaacaaagggagcaagtcagataaatgcaagatatgaatgtaggaagttaaaaagaagcccatgtaagttaaaagaacttgaatagagctaagaaatatattaataaatagtgacaataacttatcaagaggaactatttactaataa

SEQ ID NO: 39286 - DNA, 586 bp, Homo sapiens
tgtttttgatgacaaagttaactaatttcatttttattgagcatattttgttacctttatgttaagataaggttgtttaaagaccactatgagaaagagttctcaattaattgctagatctctttagttgcttcaaatatatcatactgaagatcaaatatcataatgtagaaatttgggaaataattaatgtgaagtcaggtcttgatcactctgtaaattctctatctgtgagtattgtttcgttgtatgcaaagtaaataggtaacttcaagcatcttttcatttatatattcttctgtcctttctttaatcacttattgtttacctcctcttactaaaacataaattgaaatgcagccttctgcattataccctacacttgaaaacactaagcttaatataatatgaattgtgacctggtgtctgtacaagtaacagggtggtggaggcaaatcatgagaaacatgctattttcaacattgttctttgtgtcattaytggtttaatgtatgcttccaaaataatacccctgttgtaaaaatcctgaaaacctagtttgtgctgaagtatgctattttaatga

SEQ ID NO: 39287 - DNA, 559 bp, Homo sapiens
acccctgccctgggatcctgcagctcctggctgctgtgggtggggtgaggggcctaagaacatagctgctgggggacctccactggtcagacgtcaggttcaggtagctgctaaccgtgtacttgtgtttctctgtttggagggtgtggcaktcttcatgcccagggtgatggtggtgccctctgccttccaggccaccatcacggcatcagggtagaagtcactaatgagaggcatcttgttggcttggagttcctcagagtgtccaaaggggcggccttgggcagacctgtgtggacagaggagggggcaagagaggcagagggagtactggggtgttgtagagccccctctctgtctaaagtctctgtgaggttcacggcatggctgtccagtccacccggggctgcctcttccctcctcattcccctccttttcactcaagacctctgcagagcagccagccccgcaccttcctaggagctcttcccaagtcaccttttctaggagccctggcccagccctcctctgcagcctctgtttccctgtgtgtacccag

SEQ ID NO: 39288 - DNA, 553 bp, Homo sapiens
cacttaaacatgtggggttggtaaggccctgaggggcatgtgggagcccaaggctgtgccatgggacagaccacattcagactaggaggaggggcccaggtgtggccatctgcatggggaactgccggaggagcgtgagaggaagctgagacctgcccccaggtggcgcccgggtccggcaccctaacaagggcactgtggaggctgggcacggaaggagctcttgctgataggaagcagagaagccaggcggccaggacctcaagaggggctggggcagggcgagaaggggctctccagaggtgcgaggagagcgtacagaccccttggaggcatctggccaggacgagccaaggggcccgagtcccatggggcagagcagtggctcccacggatggaagcggtttggctgaggagcatgaggtggcctcggagtcccccgggttggagcaggagatgtggtcactgggtgggggagggcaygcctgggacatttgtaccttcaggtgctgggcagccataaggggctgattggacaggtagggctccctgt

SEQ ID NO: 39289 - DNA, 652 bp, Homo sapiens
tcacatatttgggattttgagaaagcaattgactctcttgggttagaccccagttagctgaaattttgattgcttttgaaaaataaagcctttctgataacagatgtctaattgtgtctgaaaccattcattttggttgtcaattactgttatgcaaaatactatccccaatcttagtgattcattgttctgtgggttggttgggctcagctagtcagttctcacttggggtcattcatgcagttgtaatgagatgattgttgttgctggaattatttgaaggcttgattgggttggatgtctaagatggcttcttcatttacttatctggcatctcacctgggagtgttgggatactgtgggctgacttccaggtttttctgtctctagtatggcattcttaagatagttgggcctgttacacagtagctggcttccctcagcgtaaacatcccragactcaggtggaagctgatggcttcttatgacctagcctcagcagtcatgcagaatctttctgctatattctattggtcaaatatgagtcacagggccagcctaggtccaaaatgagggaacataaaggcgtgactatttggaagcgtggttaattagaaagccacctttagagaataactaccatttgacaaat

SEQ ID NO: 39290 - DNA, 631 bp, Homo sapiens
ttgaaataaaaatatcattttactataatgattttgctacaataagctgggataagaagctctgcttatttcaacaaaactggaatgtgggaagagaaagaattgttaaaagcaaaggtgtgataactcccttaattttctatgggagttaacataggattgtatgtctgaaattattatcttcacgtataattcttttcacatgtaatttgtttgtttgtttgttttgcragaggatctggctctgttgcctaggctggagtgcagtggcacgaccatggctcacagccttgacctcccaggctcagaagatcttcccatcttagccttctgagtagctgggactacaggcatgcaccaccatgcctggctaattttttttctttctttctttctttctttttttttttttttgtagagatgacgtcttgctatgttgcccaacctggccttgaaatcctggactcaagtgatcctcctgcgtaggcctcccaaagtgctgggactatcggcatggggcaccacacccagcctacatataaatttttaaactgtcattttaaaatttattatttttacctacaaattttattctttaatattttaaccaattatttttttctgtccagag

SEQ ID NO: 39291 - DNA, 578 bp, Homo sapiens
gtctaaccttgaaattggcctgtaacttcaaggcttaactttcgagtgtgagagtttcagacacatcaacayattttcaaggccataaacactgggtaatttttcatgctcaagtgtctggagtttcgttttcctaatatcaataagcaatatcacaactagcaaggcagaaggaataaaagcacctcagcctctcacaatgaactgaaaaaccctatattctttccttttttttccttcacatcccatttcttttaccttgcccagctggtggaaaaaaatctagcttccttctgaactaaacacacataattaaatacacacaatcttaatttaccacactgatgtcttcatcatcagctaccctagcaccatttcaaagcagcagaaagaaatataataatttataagccagctcctgaggttatatatttattttaaaacatgccagtttcaacaatataaaatgctttcccatgtttaaaaaacaagactatttgttaccttgtgatgggacaattaaacaagcttttaagcgtgataaaaaaaaaaatacataggttaataaagtagtcttg

SEQ ID NO: 39292 - DNA, 1292 bp, Homo sapiens
atgctgaatgtctagaatgacaaccagaataaaaactgcaactcctttggcttcgacaataaattggcttcacaagaaaatacctacattcatgacagaagaaactggctcttgccttaacctatatagttaatgcagatttatatataaataacattatatactttttagaacatatatttttataaatgtatatttatatacaaaataactaaattattttctgaaacagccttgaacattgtgtgtaatctcattttctgtaagtcattttccttctactttctctataaaattggagcactgtcctctacccctccgaaaagacatttgttaaaatcacagtgaaggttcagcataccttagaaaatcagacattttaaattctatgaagttcagacaaaatattaatacaatatgatattcctatttaaataaactcctatttaagtgattaatgaatcatttatgtattattgtactatacttagtacagataacatatttttgttgagatagcgttcttaaagatcacagagattctgaaaatgcttctaggttgaggaacttaggtagaggaagctaacaatcgatgaatacaataaaggaaactcatgagtgatagagatttgaggaaagtgctagataatcatccagactttaaatagtttgggcaatgattcagggacataaatggccagcagttagaaatagagttggaactcaggagggggctctgacacagagacaaaaatttactcattcacaattaagtaatagttgaatctatttagaaaaacaatgtgaaaaagaaagtaagaaagagaaacaaggaccatctttgagagatgccaacatttaaagatccatggaggtgaaacaaacaaggtgacagaggtatcttcaaagtcataaaagaggagtttcattaaggaaacagtcaacaatatatgcctcagaggagtcaaacaggacacagaaagagaacaaaatactgtattcaacatttaggatgtaactagttacgtgagtgaattcacttcagtacggtagtagaggcagcagctagcctacaatgggttaatgagttagcagggaaacaacgcatccaagaatttgtcttatattctaagatcaagaaycctcaacgaacaaaggtaagtgattcaggcttacatcataacccttcctaagttaaaaggacaagagcatttgttcaataaggccagaacctgaaattactggcttgtaatgaaaacgtttttaaccctaaacaagaataaatttcttga

SEQ ID NO: 39293 - DNA, 351 bp, Homo sapiens
agctgtgccatggctgccccgtgtgctctccagggccgactcaaggaccagagggagggtccccgagccctgttctgggagccacaagatttcaygtcctctggaatccacaaagcaggcctgggcagtcccaggtcccggtccctgcttcccttggcatgagacttgccagcacccacaaggacagagagaggccaccactccccagcttggtggccctccggctgcccaagttgcatctgaccagggcctccctgggctctggatgctcctggaaatcagggatcggtggaagaaacactggcaacaggaacactcagggaggtggtgtccaaggtcgcagccatgtgc

SEQ ID NO: 39294 - DNA, 496 bp, Homo sapiens
tagggtgtagagggtgaaatagctcaatatgacaatggtcccagtgtctaagctgtgagtggattcagtgtagctgcagaaccctggtctggagtgtgagcacttgcagaacagccatggtctagcatcaaagcacacatgggatgagagaggcagtgactcctttcccaaagcagctcaacagtggccacttcttgggcaggaaagggatgtgcaaccatcatctcccttttgggggttcccagtaggaatagctcttggttacctgagtggcaagacatccttgtgttcttagtggagtaggctgatggggaccatggtggttcccaccytgtagctaatagtgataatctgcttttctattctttgctcctagctgtttcctggtatctcaggtatgccagtctcatttttattctttgctcctagctgtttcctggtatctcaggtatgccagtctcatttttattctttgctcctagctgtttcctggtat

SEQ ID NO: 39295 - DNA, 1876 bp, Homo sapiens
ttgtggatatttgtttctttattgtaacctgaaattgtataaaacacactcagtttttcttaattatgaagaactatgaaaaattctaatttccaaaaataatcagtgaattatagctcaatgtttacgtccctgtggtatttcctctgaatattaattgctaatactgatttctaatggtcatgctaatcataatcctaatgctaattcctcatcatcttaaaattgaaaataaataaaattctacaacactgaatgcctcttgtattgagaataatttttatgtctaaatttgcaagagtagtttccgttgagtttctgttgccctttttatttcatcccttataatttgtctgggacatggataaactaacaccaagtatactctcatgatgtagacagtgacttgtgacccaaatggtagataacccgtacttgtagctaaatggaagacatgagctactcacagccagcaccaaagatgttttgaaagtagtggtgatgccaaccatacaaagacacattaaataataatacaaatttaaatgcatctaaggtaatacacacacrcatacaccggaccatggtatgcgtaactgctgtgtagcatggtatgcaaccttaggcattgttatgcacatcatcgtaatacagtatcatctgctgacctcatcttctccaatgtatttaagcaattattgattaataatgaccaattttatttaaaaaccttctggaatagagtaaatgctagatatcagtctcaatgtggcaagaatactattttttaaatgttttcttcccacttttaaaagtttgctgcctaacaattaattcacatgttgttattttactgccctgggaatgctatcatcttatttggaagatattaccttatatcggcacaactgtaggatcaatggaagagtacaacacatcctctacagacttcactttcatggggctgttcaacagaaaggaaacctcaggtcttatttttgccatcatctctatcatcttcttcaccgcactgatggccaatggggttatgatcttcctgatccaaacagatttgcgccttcatacacccatgtacttcctcctcagccacctttccttaattgacatgatgtatatttccactattgtgcctaagatgctggttaattacctgctggatcaaaggaccatttcctttgtggggtgcacagctcaacacttcctctaccttacccttgtgggagctgaattcttcctgctgggcctcatggcctatgaccgctatgtggccatttgcaaccctctgagataccctgtcctcatgagccgccgggtctgttggatgattatagcaggttcctggtttgggggctctttggatggcttcctcctaacccccatcaccatgagctttcccttctgcaattcccgggagattaaccacttcttctgtgaggcaccagcagtcctgaagttggcatgtgcagacacagccctctacgagacagtgatgtatgtgtgctgtgttttgatgctgctgattcctttctctgtagtccttgcttcctatgcccgaatcctgactacagttcagtgcatgagctcagtggagggcaggaagaaggcatttgccacttgctcatcccacatgactgtggtgtccttgttctacggggctgccatgtacacctacatgctgccacattcttaccacaagccagcccaggacaaagtcctctctgtgttttacaccattctcacacccatgctgaaccccctcatctacagccttagaaacaaggatgtgactggagctctgaagagggccttggggaggttcaagggtcctcaaagggtgtcaggaggtgtcttttga

SEQ ID NO: 39296 - DNA, 1631 bp, Homo sapiens
tgcatcgcataaatgaaaaacatgtttaattcccacgtggaccgtgagtggaaagttagaatataaccatcaaaaacaaatagcaaaagaaaacaaaaataccaaaatagtggattctgagagggtcttaaagaaaatagaagctccaggaaagagacaatgccaagtacaggaaagatgaataagaaggaaaaaaaaaaaaaaaaaggaaaacaaggcaaagaattaagcaataaacactcatctcaattccctaatgtgaagaaactgacgatgtaattttctcattttcattctgaatttaaacccctttgctttggccttagaatggtgaaagcagcttcactgagctggcgtggcttagatttattgtctgatggaacagaaaagatggagcaaaaggtttgtgctctatgtgccgtgttcgtctctttgttgaaaggtgtcttgatgacctgtctcttcagtgctttataaaggggataagtaaggaacaaagatacctgactcttgttgctagctcttcataattctgactttaggtttcctgaagtcccagggtttttttttgttttggctcttgttttgtgtgtgtgstttgtttttgttttgtttttttgtttttttgccctaagaacagtgcgttgtatttcgctttgcatttccacatgcctcagtcactattagttttttcctcagcattatttctctaacctgcagtacagcaaccctgaggatgaccaaacctcagtcatggagctcctgactcttcattagtctagaagttagtgggctttttaactttgagacaattgtatcaagcatgattaaaacaatgcaactggaaaattaaaactgaaatattcagacaaagcagtcactgagcaaagctatgaatttatgggaggggatggtgattagtttgttatgcaaaggagatgcaggacaagaggatccctaggcttggttgcagggctgcggttttatgaaagattcaacacaactgcctcatgtgctttaacttcatttttcaatcactatgaacggaattttggacattttaggcatgatttttgggggataaatggtatcagcaaaatgaaaataaatattttgtttatatttcaactaaatacttgatatttagggcatctgcagcatttattgctgtgatttcttgtaaaaatatttctctgcctgacagttaataaattaaatgccttagatttcactggggactgggagagggctcactgtgcctactgctgctctcctgctcggcactagttctgcaccccaagctactctcctcaggcaggcgggactctccctctgctcctctgccccagtcagcactacttatggaatgcaaccttgtgaggaatagcagaataaattgaaaagttttcgtgaggaaagtggacttaaatggagatatataatggtagaagaaatttaaggagatttccagttttcagattatttcatggtattagttatgatatttgtaccattaacaatattaatattaaccttatcagccgtgatttccatcactgagtcctggatgagctactgtatccaaaaagtagtgaaaatttcaacccaacactaacactgtgttacagacc

SEQ ID NO: 39297 - DNA, 1631 bp, Homo sapiens
tgcatcgcataaatgaaaaacatgtttaattcccacgtggaccgtgagtggaaagttagaatataaccatcaaaaacaaatagcaaaagaaaacaaaaataccaaaatagtggattctgagagggtcttaaagaaaatagaagctccaggaaagagacaatgccaagtacaggaaagatgaataagaaggaaaaaaaaaaaaaaaaaggaaaacaaggcaaagaattaagcaataaacactcatctcaattccctaatgtgaagaaactgacgatgtaattttctcattttcattctgaatttaaacccctttgctttggccttagaatggtgaaagcagcttcactgagctggcgtggcttagatttattgtctgatggaacagaaaagatggagcaaaaggtttgtgctctatgtgccgtgttcgtctctttgttgaaaggtgtcttgatgacctgtctcttcagtgctttataaaggggataagtaaggaacaaagatacctgactcttgttgctagctcttcataattctgactttaggtttcctgaagtcccagggtttttttttgttttggctcttgttttgtgtgtgtgctttgtttttgttttgtttttttgtttttttgccctaagaacagtgcgttgtatttcgctttgcatttccacatgcctcagtcactattagttttttcctcagcattatttctctaacctgcagtacagcaaccctgaggatgaccaaacctcagtcatggagctcctgactcttcattagtctagaagttagtgggctttttaactttgagacaattgtatcaagcatgattaaaacaatgcaactggaaaattaaaactgaaatattcagacaaagcagtcactgagcaaagctatgaatttatgggaggggatggtgattagtttgttatgcaaaggagatgcaggacaagaggatccctaggcttggttgcagggctgcggttttatgaaagattcaacacaactgcctcatgtgctttaacttcatttttcaatcactatgmacggaattttggacattttaggcatgatttttgggggataaatggtatcagcaaaatgaaaataaatattttgtttatatttcaactaaatacttgatatttagggcatctgcagcatttattgctgtgatttcttgtaaaaatatttctctgcctgacagttaataaattaaatgccttagatttcactggggactgggagagggctcactgtgcctactgctgctctcctgctcggcactagttctgcaccccaagctactctcctcaggcaggcgggactctccctctgctcctctgccccagtcagcactacttatggaatgcaaccttgtgaggaatagcagaataaattgaaaagttttcgtgaggaaagtggacttaaatggagatatataatggtagaagaaatttaaggagatttccagttttcagattatttcatggtattagttatgatatttgtaccattaacaatattaatattaaccttatcagccgtgatttccatcactgagtcctggatgagctactgtatccaaaaagtagtgaaaatttcaacccaacactaacactgtgttacagacc

SEQ ID NO: 39298 - DNA, 1631 bp, Homo sapiens
tgcatcgcataaatgaaaaacatgtttaattcccacgtggaccgtgagtggaaagttagaatataaccatcaaaaacaaatagcaaaagaaaacaaaaataccaaaatagtggattctgagagggtcttaaagaaaatagaagctccaggaaagagacaatgccaagtacaggaaagatgaataagaaggaaaaaaaaaaaaaaaaaggaaaacaaggcaaagaattaagcaataaacactcatctcaattccctaatgtgaagaaactgacgatgtaattttctcattttcattctgaatttaaacccctttgctttggccttagaatggtgaaagcagcttcactgagctggcgtggcttagatttattgtctgatggaacagaaaagatggagcaaaaggtttgtgctctatgtgccgtgttcgtctctttgttgaaaggtgtcttgatgacctgtctcttcagtgctttataaaggggataagtaaggaacaaagatacctgactcttgttgctagctcttcataattctgactttaggtttcctgaagtcccagggtttttttttgttttggctcttgttttgtgtgtgtgctttgtttttgttttgtttttttgtttttttgccctaagaacagtgcgttgtatttcgctttgcatttccacatgcctcagtcactattagttttttcctcagcattatttctctaacctgcagtacagcaaccctgaggatgaccaaacctcagtcatggagctcctgactcttcattagtctagaagttagtgggctttttaactttgagacaattgtatcaagcatgattaaaacaatgcaactggaaaattaaaactgaaatattcagacaaagcagtcactgagcaaagctatgaatttatgggaggggatggtgattagtttgttatgcaaaggagatgcaggacaagaggatccctaggcttggttgcagggctgcggttttatgaaagattcaacacaactgcctcatgtgctttaacttcatttttcaatcactatgaacggaattttggacattttaggcatgatttttgggggataaatggtatcagcaaaatgaaaataaatattttgtttatatttcaactaaatacttgatatttagggcatctgcagcatttattgctgtgatttcttgtaaaaatatttctctgcctgacagttaataaattaaatgccttagatttcactggggactgggagagggctcactgtgcctactgctgctctcctgctcggcactagttctgcaccccaagctactctcctcaggcaggcgggactctccctctgctcctctgccccagtcagcactacttatggaatgcaaccttgtgaggaatagcagaataaattgaaaagttttcgtgaggaaagtggacttaaatggagatatataatggtagaagaaatttaaggagatttccagttttcagattatttcatggtattagttatgatatttgtaccattaacaatattaatattaaccttatcagcygtgatttccatcactgagtcctggatgagctactgtatccaaaaagtagtgaaaatttcaacccaacactaacactgtgttacagacc

SEQ ID NO: 39299 - DNA, 699 bp, Homo sapiens
tttaactgcactgcagtatctgacctatgaaagaccttatagagtgccttttatctkatctcccatcccaggttcattgagcattttagtatgagacttggtcttaaacactttacccctcgaagagactcattgtaaagacttagaatcctagcagagccctagaggaggagtattggctgctccctccctttgcaatacattgtaaacctcggttcacattggcagccactggggtcagtgtttctgctattgtatctcagtaagtacaaagaaacgcattttctccaaaggctgaagtgaactttgtagtgtaaacaccagtagttttagcattggccattggaaccacctaaaccaaaaatgaatccatttcaaaattcaaagaataggttcatctatttcatagtatgtaaataaaagtagttccagatttagtttctttaggatttagtctattccagacaatggtctactatgtttacaataaatatcataacagtcgcgtgcgataatggagacttaggaaagcttaaccccctcagcatgtttcttctgaaactgggaaaaccagcaaaatggttataaacttgtcactaacctttagtttgccagatgtatatcatgctacaaaggtaacttctgtaaatctatgagcatcagatcactatcattttcattaacaaaataattcatggg

SEQ ID NO: 39300 - DNA, 699 bp, Homo sapiens
tttaactgcactgcagtatctgacctatgaaagaccttatagagtgccttttatcttatctcccatcccaggttcattgagcattttagtatgagacttggtcttaaacactttayccctcgaagagactcattgtaaagacttagaatcctagcagagccctagaggaggagtattggctgctccctccctttgcaatacattgtaaacctcggttcacattggcagccactggggtcagtgtttctgctattgtatctcagtaagtacaaagaaacgcattttctccaaaggctgaagtgaactttgtagtgtaaacaccagtagttttagcattggccattggaaccacctaaaccaaaaatgaatccatttcaaaattcaaagaataggttcatctatttcatagtatgtaaataaaagtagttccagatttagtttctttaggatttagtctattccagacaatggtctactatgtttacaataaatatcataacagtcgcgtgcgataatggagacttaggaaagcttaaccccctcagcatgtttcttctgaaactgggaaaaccagcaaaatggttataaacttgtcactaacctttagtttgccagatgtatatcatgctacaaaggtaacttctgtaaatctatgagcatcagatcactatcattttcattaacaaaataattcatggg

SEQ ID NO: 39301 - DNA, 699 bp, Homo sapiens
tttaactgcactgcagtatctgacctatgaaagaccttatagagtgccttttatcttatctcccatcccaggttcattgagcattttagtatgagacttggtcttaaacactttacccctcgaagagactcattgtaaagacttagaatcctagcagagccctagaggaggagtattggctgctccctccctttgcaatacattgtaaacctcggttcacattggcagccactggggtcagtgtttctgctattgtatctcagtaagtacaaagaaaygcattttctccaaaggctgaagtgaactttgtagtgtaaacaccagtagttttagcattggccattggaaccacctaaaccaaaaatgaatccatttcaaaattcaaagaataggttcatctatttcatagtatgtaaataaaagtagttccagatttagtttctttaggatttagtctattccagacaatggtctactatgtttacaataaatatcataacagtcgcgtgcgataatggagacttaggaaagcttaaccccctcagcatgtttcttctgaaactgggaaaaccagcaaaatggttataaacttgtcactaacctttagtttgccagatgtatatcatgctacaaaggtaacttctgtaaatctatgagcatcagatcactatcattttcattaacaaaataattcatggg

SEQ ID NO: 39302 - DNA, 699 bp, Homo sapiens
tttaactgcactgcagtatctgacctatgaaagaccttatagagtgccttttatcttatctcccatcccaggttcattgagcattttagtatgagacttggtcttaaacactttacccctcgaagagactcattgtaaagacttagaatcctagcagagccctagaggaggagtattggctgctccctccctttgcaatacattgtaaacctcggttcacattggcagccactggggtcagtgtttctgctattgtatctcagtaagtacaaagaaacgcattttctccaaargctgaagtgaactttgtagtgtaaacaccagtagttttagcattggccattggaaccacctaaaccaaaaatgaatccatttcaaaattcaaagaataggttcatctatttcatagtatgtaaataaaagtagttccagatttagtttctttaggatttagtctattccagacaatggtctactatgtttacaataaatatcataacagtcgcgtgcgataatggagacttaggaaagcttaaccccctcagcatgtttcttctgaaactgggaaaaccagcaaaatggttataaacttgtcactaacctttagtttgccagatgtatatcatgctacaaaggtaacttctgtaaatctatgagcatcagatcactatcattttcattaacaaaataattcatggg

SEQ ID NO: 39303 - DNA, 699 bp, Homo sapiens
tttaactgcactgcagtatctgacctatgaaagaccttatagagtgccttttatcttatctcccatcccaggttcattgagcattttagtatgagacttggtcttaaacactttacccctcgaagagactcattgtaaagacttagaatcctagcagagccctagaggaggagtattggctgctccctccctttgcaatacattgtaaacctcggttcacattggcagccactggggtcagtgtttctgctattgtatctcagtaagtacaaagaaacgcattttctccaaaggctgaagtgaactttgtagtgtaaacaccagtagttttagcattggccattggaaccacctaaaccaaaaatgaatccatttcaaaattcaaagaataggttcatctatttcatagtatgtaaataaaagtagttccagatttagtttctttaggatttagtctattccagacaatggtctactatgtttacamtaaatatcataacagtcgcgtgcgataatggagacttaggaaagcttaaccccctcagcatgtttcttctgaaactgggaaaaccagcaaaatggttataaacttgtcactaacctttagtttgccagatgtatatcatgctacaaaggtaacttctgtaaatctatgagcatcagatcactatcattttcattaacaaaataattcatggg

SEQ ID NO: 39304 - DNA, 644 bp, Homo sapiens
aatacctaatgcatgcgggagttaaaacctagatgatgggttgatgggtgcagcaaaccaccatggcacacttttgcctatgcaacaaacccacacatcctgcacatatatcccaggacttaaaatacaataaaatttaataaartagaaaaaattattaatatatacacatgaaatataaatatatatgcacatacacatgtggaaatagaaaaaatgcgcacaggatttgacagatatttcacaaagcaacagttaaacacatcaaaagtcatgtaaacattagtaatcaaaaaggcacattgaacaatgatgcacctatcaaattgactaagacggaaaagtgcatagaattcagtcctggtacatgtaaagtttattgctgtgatgctgtaacacaagttgaaaacatttttggacagggaatttagtttatggatattaagaaatttgaaaactttgtatcttcttgcaaatcactttaggaaaaaacacacttagagaatgctatctgggaaaggtggcgggggagagtatacggaaatgttggtcaaagagttaaaagttgcagttgtgtaggataaataagtctagagatctaatgtatagcttgatgactatagctaataatattgtattgtaca

SEQ ID NO: 39305 - DNA, 644 bp, Homo sapiens
aatacctaatgcatgcgggagttaaaacctagatgatgggttgatgggtgcagcaaaccaccatggcacacttttgcctatgcaacaaacccacacatcctgcacatatatcccaggacttaaaatacaataaaatttaataaagtagaaaaaattattaatatatacacatgaaatataaatatatatgcacatacacatgtggaaatagaaaaaatgcgcacaggatttgacagatatttcacaaagcaacagttaaacacatcaaaagtcatgtdaacattagtaatcaaaaaggcacattgaacaatgatgcacctatcaaattgactaagacggaaaagtgcatagaattcagtcctggtacatgtaaagtttattgctgtgatgctgtaacacaagttgaaaacatttttggacagggaatttagtttatggatattaagaaatttgaaaactttgtatcttcttgcaaatcactttaggaaaaaacacacttagagaatgctatctgggaaaggtggcgggggagagtatacggaaatgttggtcaaagagttaaaagttgcagttgtgtaggataaataagtctagagatctaatgtatagcttgatgactatagctaataatattgtattgtaca

SEQ ID NO: 39306 - DNA, 644 bp, Homo sapiens
aatacctaatgcatgcgggagttaaaacctagatgatgggttgatgggtgcagcaaaccaccatggcacacttttgcctatgcaacaaacccacacatcctgcacatatatcccaggacttaaaatacaataaaatttaataaagtagaaaaaattattaatatatacacatgaaatataaatatatatgcacatacacatgtggaaatagaaaaaatgcgcacaggatttgacagatatttcacaaagcaacagttaaacacatcaaaagtcatgtaaacattagtaatcaaaaaggcacattgaacaatgatgcacctatcaaattgactaagacggaaaagtgcatagaattcagtcctggtacatgtaaagtttattgctgtgatgctgtaacacaagttgaaaacatttttggacagggaatttagttkatggatattaagaaatttgaaaactttgtatcttcttgcaaatcactttaggaaaaaacacacttagagaatgctatctgggaaaggtggcgggggagagtatacggaaatgttggtcaaagagttaaaagttgcagttgtgtaggataaataagtctagagatctaatgtatagcttgatgactatagctaataatattgtattgtaca

SEQ ID NO: 39307 - DNA, 644 bp, Homo sapiens
aatacctaatgcatgcgggagttaaaacctagatgatgggttgatgggtgcagcaaaccaccatggcacacttttgcctatgcaacaaacccacacatcctgcacatatatcccaggacttaaaatacaataaaatttaataaagtagaaaaaattattaatatatacacatgaaatataaatatatatgcacatacacatgtggaaatagaaaaaatgcgcacaggatttgacagatatttcacaaagcaacagttaaacacatcaaaagtcatgtaaacattagtaatcaaaaaggcacattgaacaatgatgcacctatcaaattgactaagacggaaaagtgcatagaattcagtcctggtacatgtaaagtttattgctgtgatgctgtaacacaagttgaaaacatttttggacagggaatttagtttatggatattaagaaatttgaaaactttgtatcttcttgcaaatcactttaggaaaaaacacacttagagaatgctatctgggaaaggtggcgggggagagtatacggaaatgttggtcaaagagttaaaagttgcagttgtgtaggataaataagtctagagatctaatgtatagcttgatgactatagctaataatattgtaytgtaca

SEQ ID NO: 39308 - DNA, 1264 bp, Homo sapiens
  misc_feature (1)...(1264): n = A,T,C or G
ttgtgctgtttggaaactcaagcaatgtgatcaagaaaaataaaagaaagaaaaagtccagttgtgctgcatgctgcagtcacagttttccctcactgatctggtgtcccaggtcagctgttcagcgtggcttaatgacagggacttccatttacaaaagtgcagcagagatttgcccagcatccacctcccatcccgcactgccctcttggtctccctccattcacttagcaaacagctgcccagtctccgcatctaattattattctccaaaacttgaaaatattaataagtctaattagaattattaaaagaattcaaaatgtatttgaaacttggaaattcttcctgaaatatgactgtatgataaccactgctaaagtcttccctgnnnnnnnnnnnnnnnnnnnnnnnnnnnnnnnnnnnnnnnnnnnnnnnnnnnnnnnnnnnnnnnnnnnnnnnnnnnnnnnnnnnnnnnnnnnnnnnnnnnnccagtccccccatccccccatcattcccccccccctccccacatccataagtcccatcaccatcattccaaccattccccatgcattcccaccttgccaattcttcctgaaatatccctgtatcataacccctgttaaagtcttccctgaaaaaggaccctatattttcttcctattgataaatactaaaatttaacaacatgtcagaaatcgaaaagttgcaaagttttaatcttcttaagagaaaatgtaggagttatcagtgattctcttcagaaaggttaaatgtattttgcttctattagccttgttaatgtagctcatagctattctaatctgaagttgtactttaaatcatgtttatatgttttttcctgaatagactgactgtgacctcctcaagcttaatcaaatataatttgtctttgattcctgcactagctaacacagagtcaggctgtgagtagcaagatagaggaaggaatttaattgaagtgagagacatcttagtgttttattttcttttctgcctcacagtttccrtgaaaaaattcactgtagcaggcaataaagcagatatttgcaaaaacaccaaaagccttacctggtaaatagcagggagtttctaaatcccagttatgcccccctgagatttaatgcgaatgacaggagctttaaggagttaagcttggagaagcatgcactagtcacaaagaaggtggattctgcataaatctctgctcaacatgaaaataagagacataccttacatt

SEQ ID NO: 39309 - DNA, 1264 bp, Homo sapiens
  misc_feature (1)...(1264): n = A,T,C or G
ttgtgctgtttggaaactcaagcaatgtgatcaagaaaaataaaagaaagaaaaagtccagttgtgctgcatgctgcagtcacagttttccctcactgatctggtgtcccaggtcagctgttcagcgtggcttaatgacagggacttccatttacaaaagtgcagcagagatttgcccagcatccacctcccatcccgcactgccctcttggtctccctccattcacttagcaaacagctgcccagtctccgcatctaattattattctccaaaacttgaaaatattaataagtctaattagaattattaaaagaattcaaaatgtatttgaaacttggaaattcttcctgaaatatgactgtatgataaccactgctaaagtcttccctgnnnnnnnnnnnnnnnnnnnnnnnnnnnnnnnnnnnnnnnnnnnnnnnnnnnnnnnnnnnnnnnnnnnnnnnnnnnnnnnnnnnnnnnnnnnnnnnnnnnnccagtccccccatccccccatcattcccccccccctccccacatccataagtcccatcaccatcattccaaccattccccatgcattcccaccttgccaattcttcctgaaatatccctgtatcataacccctgttaaagtcttccctgaaaaaggaccctatattttcttcctattgataaatactaaaatttaacaacatgtcagaaatcgaaaagttgcaaagttttaatcttcttaagagaaaatgtaggagttatcagtgattctcttcagaaaggttaaatgtattttgcttctattagccttgttaatgtagctcatagctattctaatctgaagttgtactttaaatcatgtttatatgttttttcctgaatagactgactgtgacctcctcaagcttaatcaaatataatttgtctttgattcctgcactagctaacacagagtcaggctgtgagtagcaagatagaggaaggaatttaattgaagtgagagacatcttagtgttttattttcttttctgcctcacagtttccgtgaaaaaattcactgtagcaggcaatwaagcagatatttgcaaaaacaccaaaagccttacctggtaaatagcagggagtttctaaatcccagttatgcccccctgagatttaatgcgaatgacaggagctttaaggagttaagcttggagaagcatgcactagtcacaaagaaggtggattctgcataaatctctgctcaacatgaaaataagagacataccttacatt

SEQ ID NO: 39310 - DNA, 816 bp, Homo sapiens
caaaagtttaaaaatgctagtgaattggagaagaagctgtaaagtgattacagaaactgctagttaatagggcatttctttctcaactaccttttgctgtgtcttccaatgtaacagttagttaccatattaaaaaactaacrttacagactccctcccccataaagatttagtcttggcatttctacaaaacacatgattcatttttttttagctccaaatgtagataaaggaggagtgttttcagtggttactcaaagaagagatatttggattttctaaatcttggtgtaagtctatgtagatttttcttttacagttttatgacagtttagtctctttcatatgtctttcaaaccttggcatccctaaatctttgacaagccaattgatggattgtttaaacaatatagtcaaaatcaccagttcttatggagccattgaaaatgggcagaatatgtaatattaactcaacattttggggcattcatatacacaaactgcaatcagagaagtgatatgagagaagacttggaatcagtagaaacaaaagaagaataaacatgagtggtgtttctagaactctggcattatttgtgtgtgactgttacagcaacttcccatttttgatgggggtactgttgatacaccatttagcacagctggtattgaaagttcctgtcagcatcatccgtggtatccatgatacgaccccatatatgcctgaacaggatgtggaggttttagaccatcagaattctttcctcatcacaccacatgtcccctaacatcttgccacaactctcttcaaggcac

SEQ ID NO: 39311 - DNA, 816 bp, Homo sapiens
caaaagtttaaaaatgctagtgaattggagaagaagctgtaaagtgattacagaaactgctagttaatagggcatttctttctcaactaccttttgctgtgtcttccaatgtaacagttagttaccatattaaaaaactaacattacagactccctcccccataaagatttagtcttggcatttctacaaaacacatgattcatttttttttagctccaaatgtagataaaggaggagtgttttcagtggttactcaaagaagagatatttggattttctaaatcttggtgtaagtctatgtagatttttcttttacagttttatgacagtttagtctctttcatatgtctttcaaaccttggcatccctaaatctttgayaagccaattgatggattgtttaaacaatatagtcaaaatcaccagttcttatggagccattgaaaatgggcagaatatgtaatattaactcaacattttggggcattcatatacacaaactgcaatcagagaagtgatatgagagaagacttggaatcagtagaaacaaaagaagaataaacatgagtggtgtttctagaactctggcattatttgtgtgtgactgttacagcaacttcccatttttgatgggggtactgttgatacaccatttagcacagctggtattgaaagttcctgtcagcatcatccgtggtatccatgatacgaccccatatatgcctgaacaggatgtggaggttttagaccatcagaattctttcctcatcacaccacatgtcccctaacatcttgccacaactctcttcaaggcac

SEQ ID NO: 39312 - DNA, 816 bp, Homo sapiens
caaaagtttaaaaatgctagtgaattggagaagaagctgtaaagtgattacagaaactgctagttaatagggcatttctttctcaactaccttttgctgtgtcttccaatgtaacagttagttaccatattaaaaaactaacattacagactccctcccccataaagatttagtcttggcatttctacaaaacacatgattcatttttttttagctccaaatgtagataaaggaggagtgttttcagtggttactcaaagaagagatatttggattttctaaatcttggtgtaagtctatgtagatttttcttttacagttttatgacagtttagtctctttcatatgtctttcaaaccttggcatccctaaatctttgacaagccaattgatggattgtttaaacaatatagtcaaaatcaccagttcttakggagccattgaaaatgggcagaatatgtaatattaactcaacattttggggcattcatatacacaaactgcaatcagagaagtgatatgagagaagacttggaatcagtagaaacaaaagaagaataaacatgagtggtgtttctagaactctggcattatttgtgtgtgactgttacagcaacttcccatttttgatgggggtactgttgatacaccatttagcacagctggtattgaaagttcctgtcagcatcatccgtggtatccatgatacgaccccatatatgcctgaacaggatgtggaggttttagaccatcagaattctttcctcatcacaccacatgtcccctaacatcttgccacaactctcttcaaggcac

SEQ ID NO: 39313 - DNA, 1192 bp, Homo sapiens
  misc_feature (1)...(1192): n = A,T,C or G
tgcattttaagaacgttgcacagttcttgttacaataagctacnnnttttacggtttaaaattgctgatacaaatgcgcacattgtatcaggatacatacaggatacaggatagtagaattgcatgagcaacnnncattcngnatctgacattttatattttcatttagggaratattgatcattcaaaaaaaaaaactggcatcattgatccccccatttttttgcaggtgtggggaaactgtcaacaccctcgcctctgcaggaggtatggccatgtaacgcattgggccaaatgactgggacaggcagcaaaaccagtgtgcacttttccgtgttctcttcatttgggtaaccagttcctgcctgtggaaatttaccttccaatactcaaaataaatgaatatcattttctgaaagttaaaactcctttatgacttcctttgttttcaaatgtacattaggatttcatttcacctgagtgctttatcctttaattgtgatgacccttgaagtcataatgtatattcaaatctttatttcaaatatatattttacattactcattattaactcttattgtcaaaatgaagacttgggttgctttttaaatattatcaattgttcatttgcttgtgagctcaagggtctctttccacagcagatgccaaaacagtcaggtaaggcatgcagggggatactttgggttatttccatattcacaaaagaactcataaacgtgatgtgttcagctctaagatgaaatagtcgcttaggctttgaggtgggtgctcccatcaccttttccaactggcatttttttggtcaacgcttaaaatcatgtttcagtgtgactggcttcttatcttgcattttatttttcaaggatatacagtacagagagccctgcttacgatctgaatttgaaagatactataaactagaagtaaacctttgttatattatcctactaagaatttgggattactgattattgcaatataagctaccagataacggctgttactattggccatcaaaataaatctttcagatacatgacaccatcacaaaacaagacaatactattaactcctcaaaggccttaatggatgtatggagaagaagttgataataaattggaatatagggtgtgagccacttaaaacagataataaaataaatgtatcccc

SEQ ID NO: 39314 - DNA, 1192 bp, Homo sapiens
  misc_feature (1)...(1192): n = A,T,C or G
tgcattttaagaacgttgcacagttcttgttacaataagctacnnnttttacggtttaaaattgctgatacaaatgcgcacattgtatcaggatacatacaggatacaggatagtagaattgcatgagcaacnnncattcngnatctgacattttatattttcatttagggagatattgatcattcaaaaaaaaaaactggcatcattgatccccccatttttttgcaggtgtggggmaactgtcaacaccctcgcctctgcaggaggtatggccatgtaacgcattgggccaaatgactgggacaggcagcaaaaccagtgtgcacttttccgtgttctcttcatttgggtaaccagttcctgcctgtggaaatttaccttccaatactcaaaataaatgaatatcattttctgaaagttaaaactcctttatgacttcctttgttttcaaatgtacattaggatttcatttcacctgagtgctttatcctttaattgtgatgacccttgaagtcataatgtatattcaaatctttatttcaaatatatattttacattactcattattaactcttattgtcaaaatgaagacttgggttgctttttaaatattatcaattgttcatttgcttgtgagctcaagggtctctttccacagcagatgccaaaacagtcaggtaaggcatgcagggggatactttgggttatttccatattcacaaaagaactcataaacgtgatgtgttcagctctaagatgaaatagtcgcttaggctttgaggtgggtgctcccatcaccttttccaactggcatttttttggtcaacgcttaaaatcatgtttcagtgtgactggcttcttatcttgcattttatttttcaaggatatacagtacagagagccctgcttacgatctgaatttgaaagatactataaactagaagtaaacctttgttatattatcctactaagaatttgggattactgattattgcaatataagctaccagataacggctgttactattggccatcaaaataaatctttcagatacatgacaccatcacaaaacaagacaatactattaactcctcaaaggccttaatggatgtatggagaagaagttgataataaattggaatatagggtgtgagccacttaaaacagataataaaataaatgtatcccc

SEQ ID NO: 39315 - DNA, 507 bp, Homo sapiens
gttcattatatcagggacagaatgtgtgtctgaactgtatgcattcattatatcagggatagaatgtgtgtctgaactgtatgcattcattataacagggatagaatgtgtctctgaactgtatcagttcattatatcagggatagaatgtgtgtcggaactgtatccgttcattatatcacggatatgaggtgtgtctgaactgtatgcattcattatatcagggatagaatgtgtctctgaactgtatcagttcattatatcagggattcaatgtgtgtctgtgaactgtatccgtttattatatcagggatatgagttgtgtctgaactgtatcagttcattatatcagggatacaatgtgtgtctgtgaactgtatcagttcattatatcagggatatgaggtgtgtctgaactgtatcagttcattatatcagggatacaatgtgtgtctgaactgtatcaatacacataacctacttctgaracacagtaaggacagggct

SEQ ID NO: 39316 - DNA, 1286 bp, Homo sapiens
catatttgactgcttcctctactgtgtaccttatcttatatacaatccagattcactgagcaggagatgaacgcccagttgagtgttcctctaaaccctctcctgtcacatctaaagtgcgaattcagtcaacactgattaaagcctgcaaagaaggaaactacttcatttattcacacttcctttttcttttttttcctctaatgcccactgtttcccttttaaatattgaagtctcccaaccgtctttggaagaagcacaaatctcagatgctcctgtcatmttgtgttcctttttcccaggtgcatcctcaaccttggcaccagaaacatctacattgattgagacttggctccaatgctttttggttcacacttatttataactttaaagatttctccccaaacaagaggccagtgacttttgagaaagagcttttttagtttgtcatagcctctatttctaaagaaatttaaaatctaattttcaatttagagcgaggctcttatccccacatcactgcctttaaaatctctctggagagatgccaagattcagtaagacattttcatgatgaaataccaagaaacgattccagtccttcacttgggaaaacaatgcaccctctgcaagaaaggacaggctgcttctaaagttcatggtaaacccagtcaacttggattaattgctaacccaggaattcttcctgggggatgtgggactctattagtgaaaagactttttgacctagcctcacccctacacaatgtatttaataagaagtctgacattccactactgctttagaaagacttggacccagcttctctgaggtaggatccttagatcttcatgaaaaacagaacatcacccagatactgggatgttttcttcaggtattactctgtaactattagaaggccacgttactactgtgagcttatctgctaataactgaggcagtggtcttctcaagattaagcataaataacatatattcactatctggcaagcagacaactggaaaagggcatttagcatgaaacgtgggaagctaagggaaatgtaatagtttagaagaacatgaatagatttactgaaggaaaatggcatgtaagagccgacagttagaagaatgtgcttggtattcacaatgagaaagtttcagaattaattggtagcaggggtgcatactattggataagcatagattgccctctgaatattttgttaaaattttaatttacattttaagttaaatgattaattgctccgttcatatgca

SEQ ID NO: 39317 - DNA, 1286 bp, Homo sapiens
catatttgactgcttcctctactgtgtaccttatcttatatacaatccagattcactgagcaggagatgaacgcccagttgagtgttcctctaaaccctctcctgtcacatctaaagtgcgaattcagtcaacactgattaaagcctgcaaagaaggaaactacttcatttattcacacttcctttttcttttttttcctctaatgcccactgtttcccttttaaatattgaagtctcccaaccgtctttggaagaagcacaaatctcagatgctcctgtcatatygtgttcctttttcccaggtgcatcctcaaccttggcaccagaaacatctacattgattgagacttggctccaatgctttttggttcacacttatttataactttaaagatttctccccaaacaagaggccagtgacttttgagaaagagcttttttagtttgtcatagcctctatttctaaagaaatttaaaatctaattttcaatttagagcgaggctcttatccccacatcactgcctttaaaatctctctggagagatgccaagattcagtaagacattttcatgatgaaataccaagaaacgattccagtccttcacttgggaaaacaatgcaccctctgcaagaaaggacaggctgcttctaaagttcatggtaaacccagtcaacttggattaattgctaacccaggaattcttcctgggggatgtgggactctattagtgaaaagactttttgacctagcctcacccctacacaatgtatttaataagaagtctgacattccactactgctttagaaagacttggacccagcttctctgaggtaggatccttagatcttcatgaaaaacagaacatcacccagatactgggatgttttcttcaggtattactctgtaactattagaaggccacgttactactgtgagcttatctgctaataactgaggcagtggtcttctcaagattaagcataaataacatatattcactatctggcaagcagacaactggaaaagggcatttagcatgaaacgtgggaagctaagggaaatgtaatagtttagaagaacatgaatagatttactgaaggaaaatggcatgtaagagccgacagttagaagaatgtgcttggtattcacaatgagaaagtttcagaattaattggtagcaggggtgcatactattggataagcatagattgccctctgaatattttgttaaaattttaatttacattttaagttaaatgattaattgctccgttcatatgca

SEQ ID NO: 39318 - DNA, 1286 bp, Homo sapiens
catatttgactgcttcctctactgtgtaccttatcttatatacaatccagattcactgagcaggagatgaacgcccagttgagtgttcctctaaaccctctcctgtcacatctaaagtgcgaattcagtcaacactgattaaagcctgcaaagaaggaaactacttcatttattcacacttcctttttcttttttttcctctaatgcccactgtttcccttttaaatattgaagtctcccaaccgtctttggaagaagcacaaatctcagatgctcctgtcatattgtgttcctttttcccaggtgcatcctcaaccttggcaccagaaacatctacattgattgagacttggctccaatgctttttggttcacacttatttataactttaaagatttctccccaaacaagaggccagtgacttttgagaaagagcttttttagtttgtcatagcctctatttctaaagaaatttaaaatctaattttcaatttagagcgaggctcttatccccacatcactgcctttaaaatctctctggagagatgccaagattcagtaagacattttcatgatgaaataccaagaaacgattccagtccttcacttgggaaaacaatgcaccctctgcaagaaaggacaggctgcttctaaagttcatggtaaacccagtcaacttggattaattgctaacccaggaattcttcctgggggatgtgggactctattagtgaaaagactttttgacctagcctcacccctacacaatgtatttaataagaagtctgacattccactactgctttagaaagacttggamccagcttctctgaggtaggatccttagatcttcatgaaaaacagaacatcacccagatactgggatgttttcttcaggtattactctgtaactattagaaggccacgttactactgtgagcttatctgctaataactgaggcagtggtcttctcaagattaagcataaataacatatattcactatctggcaagcagacaactggaaaagggcatttagcatgaaacgtgggaagctaagggaaatgtaatagtttagaagaacatgaatagatttactgaaggaaaatggcatgtaagagccgacagttagaagaatgtgcttggtattcacaatgagaaagtttcagaattaattggtagcaggggtgcatactattggataagcatagattgccctctgaatattttgttaaaattttaatttacattttaagttaaatgattaattgctccgttcatatgca

SEQ ID NO: 39319 - DNA, 971 bp, Homo sapiens
atataggtgaatagtatttgacaggtatggtatcaaggtaaacctcaaatgaatttttggtaaaccagattaggagccctgatcatgatttgaaatagtcttttaaacatgtgaagtgttatttgcaaaaagttttatgtataacagaaaatccattgataatggtttacttgtgaaggagaaaaggagaaaaaaacttttagttaagattagttaatattttcccaggtcttacttacaagattcagacatttaaattaatgtaaattaaattacatttcatttttagataatataaatcgaaagcatgaactttaaaagtaatatgtagaacttcttataagaagttcaacataaaaatatcttcttatattgctgtttatcactgtaaaacaatctctcagaataaattctattcccttatgtttcagaatgacacaagtatcttaaaatttaagacccagcctaatacacatatgggaagagaagtttattgctcattttttgtctttgaaaaaatggcactcatttctcttaactaagaatttcttgagtcttttgttacatatctatggtatgaacacttggttctcatttttcatcctagcaaaaaagagagagtaataatttaagatataccctgaaaatatttttacttttaacattagctttgtaatatccttgaagcattttccttaaaactagggttcttttgtttgcataatgatttttcttcgtgggacttaaagtactatggagttggatcccattccgttgaatgcayagatagctctctggtggtggttggaattgttcagtgcctaggatggttagcaggtacttaagggtttgttgaatttaaaagaaggtgagtttctttaaaattcctttaaagaattaattctcgatgagcctgagagggaatttggaattcctttggtttctctcattttatattgaggaagctgaga

SEQ ID NO: 39320 - DNA, 1508 bp, Homo sapiens
tttgcagaagaatgctcaattagaaagatcttcaaacttgccctagcagcacaagtatccttagatcagttttcttcaatgtgcctcaaccaagaaaatgaccttttccttaattacctattctaaaggtggtgatcaaaatttttaagtggtcagatatcaaatgtattgttccgaaacaaaatgagaggctttgttagtcagtgttaattaatggaagcagaaagaggagaatgtggagcagtgttatttatctttcctattaagaacttgtctggaatttcataaatgaggtacagaagacacttattctacttgtaatttgagctatgaaatttgtcctatgtctaatgcaaccagcatttaaaaaaaacacaattaaaagaaagaaaaagaaagctagcagcttgcaaacggtgcctctttgcacgaaaggaccacatttcagaatgtggtttatgggactccgcctgtattaagctgaccaaaatggrggtgacccatagacaatagatttctttattgtattgttttgacacagaacaagtgacattcctcaggccccttttcatgttacagtctgccacaaaatacgtctgtactccttttacctgcagaactgggttatatcaaccccatcacttttaggcttatctgatgacaaatgaaaattgatactggtggggaggctaatgacaacttggttaccagacaaccattcacctctgtttcaaagttctttgagctgtttcagtgtaaaactggaaaaatgtttatgagcaacaataaactcacatttccataaatatatttatacaagaaaaatgggaaaccatggacaaatgtgttctttatataatatataatatgtattaatgcaaagattagacattatattatgattatgtgtacatacagatttcttgtgtacccctgtttatatgttctaatatgactttatctgtgtatgttgatgtggatatagttatgtgtgtagtcaaagcattttttgaaacactctggaaataatgcatatgttgctatagaatgaacaaagtgcctaaaccattgattgtgtgaatgctgctcatataatatgtaggttctatgtgcttctatgtatcagaatggctggaaaagggaggagttcttagaatatcttctataatactcctagtgacatcatgatttcattgttttggaatatagcatgaaatagatttgtacctttttccccccttgagcactgagaaaattatatgttctaccaaatagtaaggaaataaggatctgttgaaaacaatctattttaaatattttatgaatgattacacaagcattatataaatatgcagtaattacatatgctaatacatacatttgatatatctaagttttcaactgcaaatattttctagcatgcttttctatagttacatttactctgtatggaaattgtatcttagctttagccttggataaatttcaaagaatcacagatcactgca

SEQ ID NO: 39321 - DNA, 1508 bp, Homo sapiens
tttgcagaagaatgctcaattagaaagatcttcaaacttgccctagcagcacaagtatccttagatcagttttcttcaatgtgcctcaaccaagaaaatgaccttttccttaattacctattctaaaggtggtgatcaaaatttttaagtggtcagatatcaaatgtattgttccgaaacaaaatgagaggctttgttagtcagtgttaattaatggaagcagaaagaggagaatgtggagcagtgttatttatctttcctattaagaacttgtctggaatttcataaatgaggtacagaagacacttattctacttgtaatttgagctatgaaatttgtcctatgtctaatgcaaccagcatttaaaaaaaacacaattaaaagaaagaaaaagaaagctagcagcttgcaaacggtgcctctttgcacgaaaggaccacatttcagaatgtggtttatgggactccgcctgtattaagctgaccaaaatgggggtgacccatagacaatagatttctttattgtattgttttgacacagaacaagtgacattcctcaggccccttttcatgttacagtctgccacaaaatacgtctgtactccttttacctgcagaactgggttatatcaaccccatcacttttaggcttatctgatgacaaatgaaaattgatactggtggggaggctaatgacaacttggttaccagacaaccattcacctctgtttcaaagttctttgagctgtttcagtgtaaaactggaaaaatgtttatgarcaacaataaactcacatttccataaatatatttatacaagaaaaatgggaaaccatggacaaatgtgttctttatataatatataatatgtattaatgcaaagattagacattatattatgattatgtgtacatacagatttcttgtgtacccctgtttatatgttctaatatgactttatctgtgtatgttgatgtggatatagttatgtgtgtagtcaaagcattttttgaaacactctggaaataatgcatatgttgctatagaatgaacaaagtgcctaaaccattgattgtgtgaatgctgctcatataatatgtaggttctatgtgcttctatgtatcagaatggctggaaaagggaggagttcttagaatatcttctataatactcctagtgacatcatgatttcattgttttggaatatagcatgaaatagatttgtacctttttccccccttgagcactgagaaaattatatgttctaccaaatagtaaggaaataaggatctgttgaaaacaatctattttaaatattttatgaatgattacacaagcattatataaatatgcagtaattacatatgctaatacatacatttgatatatctaagttttcaactgcaaatattttctagcatgcttttctatagttacatttactctgtatggaaattgtatcttagctttagccttggataaatttcaaagaatcacagatcactgca

SEQ ID NO: 39322 - DNA, 989 bp, Homo sapiens
cgcttagcatctgaccttagagcagctgcagagaggggccctggccccatgaagtgagcctaggaagggcaccaacccgctgcccggagccctgtgtttctcacattaagttcagtccttccaggaacagcttctctgggactgtgactgctcagcatgtctagggaaacatataaaaggaagactcatttgagagagtacagtctcagctgctcagttggtcccgagctagaactgatggcttcaattcatcagttgaattgaaggattaattcaattcctcatcccaccctaaaccatcctagattccttcacccttagctggcttttctcctggtcaagataacatcacataggccactggcagagggttctcatctcatccctgaagaatctgagcccctggttaccatgcctttaacagatcagcattcctataattgcccattgcctgttagaattgacagggaagggataccccagtggatcgctggactgcaaaccattttcctgtctgcccccatgacttggcagcaaccctacttcctcatgatgatgggggtcaattacctctgccaatagaccaagtcttgtttttgcctgctgtcctggcatgttsagcccaaagtgaccagtcacagccatagctttaaatttagtacaattcctactttgaacctttgtggaagtatccgcatctgagaatcagaatgtatatatccacagaacctaacactgaagatggaaaacataaattccccaagtgggtccctgggagtgattggggagcaggtgccctcctattttcatcccctggtttcaagacccacgtattctacccagtgtccacaggtcaagatgaatatggcatcctgcaatgtactactctagccccacagggtattatctacaagctagagcctcagctgtcaccttgaaggggtcatgccaccatcacaccaggctgcacggcctggggcaggaccaat

SEQ ID NO: 39323 - DNA, 989 bp, Homo sapiens
cgcttagcatctgaccttagagcagctgcagagaggggccctggccccatgaagtgagcctaggaagggcaccaacccgctgcccggagccctgtgtttctcacattaagttcagtccttccaggaacagcttctctgggactgtgactgctcagcatgtctagggaaacatataaaaggaagactcatttgagagagtacagtctcagctgctcagttggtcccgagctagaactgatggcttcaattcatcagttgaattgaaggattaattcaattcctcatcccaccctaaaccatcctagattccttcacccttagctggcttttctcctggtcaagataacatcacataggccactggcagagggttctcatctcatccctgaagaatctgagcccctggttaccatgcctttaacagatcagcattcctataattgcccattgcctgttagaattgacagggaagggataccccagtggatcgctggactgcaaaccattttcctgtctgcccccatgacttggcagcaaccctacttcctcatgatgatgggggtcaattacctctgccaatagaccaagtcttgtttttgcctgctgtcctggcatgttcagcccaaagtgascagtcacagccatagctttaaatttagtacaattcctactttgaacctttgtggaagtatccgcatctgagaatcagaatgtatatatccacagaacctaacactgaagatggaaaacataaattccccaagtgggtccctgggagtgattggggagcaggtgccctcctattttcatcccctggtttcaagacccacgtattctacccagtgtccacaggtcaagatgaatatggcatcctgcaatgtactactctagccccacagggtattatctacaagctagagcctcagctgtcaccttgaaggggtcatgccaccatcacaccaggctgcacggcctggggcaggaccaat

SEQ ID NO: 39324 - DNA, 989 bp, Homo sapiens
cgcttagcatctgaccttagagcagctgcagagaggggccctggccccatgaagtgagcctaggaagggcaccaacccgctgcccggagccctgtgtttctcacattaagttcagtccttccaggaacagcttctctgggactgtgactgctcagcatgtctagggaaacatataaaaggaagactcatttgagagagtacagtctcagctgctcagttggtcccgagctagaactgatggcttcaattcatcagttgaattgaaggattaattcaattcctcatcccaccctaaaccatcctagattccttcacccttagctggcttttctcctggtcaagataacatcacataggccactggcagagggttctcatctcatccctgaagaatctgagcccctggttaccatgcctttaacagatcagcattcctataattgcccattgcctgttagaattgacagggaagggataccccagtggatcgctggactgcaaaccattttcctgtctgcccccatgacttggcagcaaccctacttcctcatgatgatgggggtcaattacctctgccaatagaccaagtcttgtttttgcctgctgtcctggcatgttcagcccaaagtgaccagtcacagccatagctttaaatttagtacaattcctactttgaacctttgtggaagtatccgcatctgagaatcagaatgtatatatccacagaacctaacaytgaagatggaaaacataaattccccaagtgggtccctgggagtgattggggagcaggtgccctcctattttcatcccctggtttcaagacccacgtattctacccagtgtccacaggtcaagatgaatatggcatcctgcaatgtactactctagccccacagggtattatctacaagctagagcctcagctgtcaccttgaaggggtcatgccaccatcacaccaggctgcacggcctggggcaggaccaat

SEQ ID NO: 39325 - DNA, 989 bp, Homo sapiens
cgcttagcatctgaccttagagcagctgcagagaggggccctggccccatgaagtgagcctaggaagggcaccaacccgctgcccggagccctgtgtttctcacattaagttcagtccttccaggaacagcttctctgggactgtgactgctcagcatgtctagggaaacatataaaaggaagactcatttgagagagtacagtctcagctgctcagttggtcccgagctagaactgatggcttcaattcatcagttgaattgaaggattaattcaattcctcatcccaccctaaaccatcctagattccttcacccttagctggcttttctcctggtcaagataacatcacataggccactggcagagggttctcatctcatccctgaagaatctgagcccctggttaccatgcctttaacagatcagcattcctataattgcccattgcctgttagaattgacagggaagggataccccagtggatcgctggactgcaaaccattttcctgtctgcccccatgacttggcagcaaccctacttcctcatgatgatgggggtcaattacctctgccaatagaccaagtcttgtttttgcctgctgtcctggcatgttcagcccaaagtgaccagtcacagccatagctttaaatttagtacaattcctactttgaacctttgtggaagtatccgcatctgagaatcagaatgtatatatccacagaacctaacactgaagatggaaaacataaattccccaagtgggtccctgggagtgattggggagmaggtgccctcctattttcatcccctggtttcaagacccacgtattctacccagtgtccacaggtcaagatgaatatggcatcctgcaatgtactactctagccccacagggtattatctacaagctagagcctcagctgtcaccttgaaggggtcatgccaccatcacaccaggctgcacggcctggggcaggaccaat

SEQ ID NO: 39326 - DNA, 1104 bp, Homo sapiens
gatccctcatgcaaataggataacatttcctggataacactactaaatattaaatatacttaattatttttgcaaattatttttgtaattttaatcamtttaaatttgttggagcttagggggcatattaatgacaaagaatcattaattatcattaattctgagggtggaaaagctcttgagctataatttatttgactcttctagaaaatatcctaggacaaatccaactcttctaagtacaagaagcataataaataataattctttttcttttaagtaacattggccaacactacatgtgatgtaaacttgaaactgtcaaggttagttggaatgtcctacattcaacattcctttttcgtgaccacagcactaagccaaggcattaagaaagacagcctgccttctacaagagtgcatcctagttggggagataatactcgtgaccggaaatagctttacataaaggctgcataaggatgtgaataagtgctgaagaatagaggacttggggaagaaagaggcatgtgtgggacaaaatgatttcttggtcatttcctacttgcatttcttgctcttacttccaggtgattcaccactgacattgcattgactttgttaaggttatctgtgggtaacatacccacagtaggagcctggcagtctcagaaagttggctctcattggctgctgcatcttgttggcagaggaaaggggaaaggggtggggacagagtgaccatgcaactgcctctgtgtgcaggtgctttgcctgcaataccttatccaaactttcagcacccttggaggaaaagaggtaccatttctgtttcacatgcaaaagaatgaagctgggggtgttagtaacttccccaagttatcatgcaattagtaagtgggttaaaattcatgtctttttgatgctatgacaaaccatctcatggtctactaatattgaaagcccagaattttaatggtcatgaattactctctaggaaaattggctcaagtttagcagtagccttatatgccaggaagctacctagggggtgagctgtgagaagacccagaaaaatcagctatagactaaaccattcattat

SEQ ID NO: 39327 - DNA, 1104 bp, Homo sapiens
gatccctcatgcaaataggataacatttcctggataacactactaaatattaaatatacttaattatttttgcaaattatttttgtaattttaatcaatttaaatttgttggagcttaggggscatattaatgacaaagaatcattaattatcattaattctgagggtggaaaagctcttgagctataatttatttgactcttctagaaaatatcctaggacaaatccaactcttctaagtacaagaagcataataaataataattctttttcttttaagtaacattggccaacactacatgtgatgtaaacttgaaactgtcaaggttagttggaatgtcctacattcaacattcctttttcgtgaccacagcactaagccaaggcattaagaaagacagcctgccttctacaagagtgcatcctagttggggagataatactcgtgaccggaaatagctttacataaaggctgcataaggatgtgaataagtgctgaagaatagaggacttggggaagaaagaggcatgtgtgggacaaaatgatttcttggtcatttcctacttgcatttcttgctcttacttccaggtgattcaccactgacattgcattgactttgttaaggttatctgtgggtaacatacccacagtaggagcctggcagtctcagaaagttggctctcattggctgctgcatcttgttggcagaggaaaggggaaaggggtggggacagagtgaccatgcaactgcctctgtgtgcaggtgctttgcctgcaataccttatccaaactttcagcacccttggaggaaaagaggtaccatttctgtttcacatgcaaaagaatgaagctgggggtgttagtaacttccccaagttatcatgcaattagtaagtgggttaaaattcatgtctttttgatgctatgacaaaccatctcatggtctactaatattgaaagcccagaattttaatggtcatgaattactctctaggaaaattggctcaagtttagcagtagccttatatgccaggaagctacctagggggtgagctgtgagaagacccagaaaaatcagctatagactaaaccattcattat

SEQ ID NO: 39328 - DNA, 592 bp, Homo sapiens
ccggaggctctttaggcttttcrttgcccttagaacttctctcagagcccagctcatctctgaaaaccttctgcttcacatttggtatccttgtgacagccaccaaatgattgggtagggtcaagaagtcaaatgacttcctcatatgcttctgccatcactccatgcctgggtgggggtgggagccagctgaggtgccttgggcttctgtaagggtgtgagagtgactgggatactgatgggattaaaatatcagttagaattctttaccgggaatgggttaaatggcacatgccaggagttgcttttgtctggcagcagcgaaactgagtgatatgatctctcctccattgtttatgacatgaggatatgctcttcttctggaaacaagctgattcttagaggtgcatagaatggtgctactgggagacctaacagggggttaattactggggtgctgtgaatacagatgacgtgcattaaagtatttcatctgtcagccaccaaatgctactctgttcagaagctaggggtgaatctgagggaagcttggcatgaaaggtctaacttaatgaaaagaatctaagaaaac

SEQ ID NO: 39329 - DNA, 830 bp, Homo sapiens
atccttactctgcactgagtactaaactaagagctttgtgtgtactccttcatttgagcctygcaacaaccttctgtggtaagagctattatcttcattttactgatggagaaattgagtctaagaggtaaagtcatcttatgaagcccacatggccacaagtgttcaagccatgttgccccatttggacccgaacaataaaaatttggactccacggtcttagccactgccttatgcttctgagggttttggtgcaggactgactaggcacaactcattgatacaaatttatgaatcagcacataaattacagcttgtggacaaagttatacatttttaaaatttcacattggacatgtttcaagggcaatttacataacgtgggtcacagttaatgtgtaaattataatgatggtattaaattggaaataaaattactcattagcaaacctcactttcaaaaattaagagaatccctagagagatagctttatttagatagcattgtgatttttgcctgaactttggtagtatctgttttttatatcccctggtttctattacggaaatgctctgttcactgggcactctaccgtgaccctcatcctgttcagaaagatgagttcctttgatcattgttgtatatatttgtgaagtatgatattgcactattcttaaaagcagaagagctgaatttagcttgattttttttttttaaacacaaacatcactgaaaaccatccagaaacaacattgtctggtagacaatagaagttccctgcatccccaaagtaggtctctcagaagtatgtacgaactggagtttttc

SEQ ID NO: 39330 - DNA, 1207 bp, Homo sapiens
ggattagttaaaatctttccgttgtaaagcctgcattgtttggggtttaccaagttctagtcccaaccccaacccccagtgctgggccctcacaattgggtcacaagactgggcctcaagtcaatccgacaagcatttgctgagcctctcctgcgtgcaaggcacagytttcctcctcttggcccccagctcatacccagaccaggctgcagcccccacgcccctgccaccatggtgccccaaaggcccgcccctcagcctggtcctgcaggaattgcccaggcctgcaaaactccagcagtgccagagagatctggtcttccagcctcagggaaaatgccaacacaaagacatgacaaaaacaagaagcttgaggcctttttattgacaattctccatagacacagagatccttttagttcctctccagtgtaaagaaagcacggggtactgaactctcctctcttaaaaggacacagaggcgatacgataccaaagcctgtctggctccccagggctgtggcacctccactggcctgggtaagcccctggctgcacagccccagctaagctgcttggctcggcaagaaagcgggcctaggatgggtcccttgcctccccagcctgcctctctggacccctgctcctcgagtgtagaaacctctcagccccctcatgggtcctgggtcccaggcagcccatgactccagggaagagtcctaggtagaagacccccacccccaattcctcctcatcccattacttgtgccacatgttcccaggaaccatgcaataaataaataaatacttgagaaaggcagggcagctccagggaagggaagggatgcctgagccagctcatggctaagggagagatactgagcccgtaagagtccagtagtgaacatgaaactgttggaaagaaatggagacccccagggggccttatcccataactgagactgtcctccagggaatagccctggaatccaggacccagcccagcgagatcctacactacccaggcccccaggggtcaagggcttcaggacctctgctccactcacctggcctcccactccattggacaagaggcagggaaaggaaactggagtgctgggccagtggaggactgccctagactctggacagagggtgcagaagttgtgatccaagtgccctgcagctgctccagcggagctgggga

SEQ ID NO: 39331 - DNA, 1085 bp, Homo sapiens
taggaacccacagcgtgggtcagggcctcccacattaaccgcacccactacttactatgaaccaaccagcactgtgctagcccttcgtaagtactactgtctcatttgacatgagacctgtaacaaccctatgaggtaagaatgatgatcccccttttacagaaggggaaactgaggcacggggtgtgaaataatttgctcaaggacacctggctgagctgggatttgcagcaggcagtgagactctactctgttcctcaccatcatgctacactgccttctgaagttctgtcaggattatggttctctacagtcctgggatggcatttcccaaactgagttccttgtcttcccacaactgaatgtccaatcaggatggagggacaagaaggaacccacacccactccctcagcagtcctgccgggcatctgctagctccccggggtcccgcggacacaccttcactccctgctcttgtcacaagtcagtacccacagttctgagactctgcccctgtggctgggtgttccccactagagtcccagaagtccacccccactcccccaccagcccagccctgtcccctggccgcaccgaagttgttggtggggtagcgcttgcggagccgctccgtgagccgagacaccttgctgcgcagcacctcattcttgctcaggaacccgttgtcctgcagggccagctcatcctctgctgggcacggggcgccctcatcatcctcctgtgggaacagctccttccagtcctgcccacctcttgcaaggctgcaggacccgtgtgcagaggcatcctgcgcggcagcccccacgaggtgtggcagcagccggttcagccaccctccccagcccagcccctgcccacccaccaaggcttccacttaccagcaccaccaagtgggtctcctgcctcccaaggtgcggggaagaggagagaaaacagaaagaaaaagatagcaagaagaaagaagctacctggaggggcccccaagcagaaggaagcatggaagcgctgctctgagctctgcgcacttcccaaatggtgacrttgacagacgccccccacaaga

SEQ ID NO: 39332 - DNA, 1171 bp, Homo sapiens
caggaggaggaggcttcgcctgtgcccagggcaggttctaggggaccagctggctcctgcattgcttcagatagccctgggatagctgggtaccattgatggctcagcactcagcagggagaagacctgacccacatcctggtgcagcaggaaaccactcgcatttgtttacccttactctgtgccaggccccaagccaagggcctcatatccatcatttcacttagtccccccagccatcctgggaggagtggtacctctgctacaccccttctacagatgggcaaggaacttccccaagaggacacatccaagtaggaaagtcaggattccaactccagtctatctgatacctgatcttgtcctcttttcagaggagtctccactcctctagtgggaatccagagactggagcccagcctattccaaaatcccaccactgccagcctgcaattccatttgccactcctctgaatgaaagcactgttgtctcctgaaggtcccagagggacacaataaatggagaaggtatcggactgtcagtcactccaacaggccaggctataagcaagtgggacatgggccaacaaggtttgacaggggatgaggctgggactattgggaggggagggggtctgagagacacctgcaggtgctccaggaggtgtgcctaaagaaagaggagcttggtacagcagagtgactgagtgactgcggtaccttactccaatacttgggtgcagcccagtgatctagaaagaacagctccctggggcagaaatgcacaaggccagagagcttttagagagaaggcctctctggcagaaggagtttcggctggctagggaagactgcagctggggccctgctcccaggatctaaatcaggccacccaggctccagggccccsaggcactggactgctttgggaactggggaaattcctccggaatgagatggcacacaggctgccagccatcctcccgcgatgctcactgagcttctggcagggagggagcccagagccagcagaggggctgcattttgaaatcagtgggatgactgcaggtgggagaggctgtcagcaggaatcctgcagctccggggctcctgtggaagagacgggagggatgcaggaaacgcctttcctaagaagcacagcaagcttaga

SEQ ID NO: 39333 - DNA, 604 bp, Homo sapiens
tgaaatcagaacacctgggtcctcccagggcccccatcacttccagctatgggaccttgagcgagtcccagggcccatctggtgaatggggctgctgagggaaattcagacaagcatcagagcccaccgtgcccttccctctcggtgtcaggtgttttctgcctttgcctgagccgtggccrcactcccttgctaatccttcagacgactgacacgtatacagctgttgccctggcctgagaccctgatgtggcctgaccggcatgggcccctacccaatgcactaactagcagcaaatgagccttattaaaaaatatttgaggccgggcatggtggctcatgcctgtaatcccagcactttgggaggccgaggtgggtacatcacttgaggtcaggaattcgagacctgcatggccaacgtggcaaagccctatttttactaaaacaaaaaaaaaatacaaaaattagccagacgtggtggcgtgcgactgtaatgccagctacttgagaggctgaggcaggagaatcacttgaacccgggaggcagaggtggcagtgagctgagatcgtgccactgcactccagcctgggcaacagagcaag

SEQ ID NO: 39334 - DNA, 995 bp, Homo sapiens
cctgtacccaccaaggagaataaaaaatataccttagtactcacctagttcaaccttttcattttaccaatgagggttcccagagaagggaagtgactcatcccaggtttcccagcaactttagtccatagtggctcagtttgcccagccagaaatccccaatgctcccatcgaaggttgtggcgctgacaacatcacagctgagaggaggactccatggtgcccagaacccccgcagcgccattcaccagaggtggacaacactccctcccggcatccccctgggcctggcttctgaccagaaccctgccctggacatctcaaaagccctcaggacctcggtgctgccacctgctcacagagtgtggcgggtacgggggtggacagcccacgtccctctgccaggttatttataaagtgttttcagatgagtcaggcacggagctgcccagcaccaccagggactaccccctagaaatgctagaatgatcctgagctctggaaccccaccccaccccttcatagcctgcttctcatggaaagctagaggcaggaaggtgaggccagggctctggggctgttgtgatgccccccrtgagcccgggcaggccaggcttgggagacagatggggaggccccaggaaggagaagaagggcctcggacaggccccctccgggccacagaccacatgccccttccccttccccctcccaaacaagaatgacgggacaagcccaagaagacaacccccaccctgtgccccaggcgctggctgctcgcacctccattcctgtgtgtactgctctccgccttcgccaggagcccagctatttctatctctatggaaagggagcccaagcctccaagcctcctgcccccctttcctgctcctggcagtgctctaattaacttctcacctggatgccgcctgccatgggtactctggccagggctgccatgaaatactgcacctgcgctcacacccagcttccca

SEQ ID NO: 39335 - DNA, 995 bp, Homo sapiens
cctgtacccaccaaggagaataaaaaatataccttagtactcacctagttcaaccttttcattttaccaatgagggttcccagagaagggaagtgactcatcccaggtttcccagcaactttagtccatagtggctcagtttgcccagccagaaatccccaatgctcccatcgaaggttgtggcgctgacaacatcacagctgagaggaggactccatggtgcccagaacccccgcagcgccattcaccagaggtggacaacactccctcccggcatccccctgggcctggcttctgaccagaaccctgccctggacatctcaaaagccctcaggacctcggtgctgccacctgctcacagagtgtggcgggtacgggggtggacagcccacgtccctctgccaggttatttataaagtgttttcagatgagtcaggcacggagctgcccagcaccaccagggactaccccctagaaatgctagaatgatcctgagctctggaaccccaccccaccccttcatagcctgcttctcatggaaagctagaggcaggaaggtgaggccagggctctggggctgttgtgatgccccccgtgagcccgggcaggccaggcttgggagacagatggggaggccccaggaaggagaagaagggcctcggacaggccccctccgggccacagaccacatgccccttccccttccccctcccaaacaagaatgacgggacaagcccaagaagacaacccccaccctgtgccccaggygctggctgctcgcacctccattcctgtgtgtactgctctccgccttcgccaggagcccagctatttctatctctatggaaagggagcccaagcctccaagcctcctgcccccctttcctgctcctggcagtgctctaattaacttctcacctggatgccgcctgccatgggtactctggccagggctgccatgaaatactgcacctgcgctcacacccagcttccca

SEQ ID NO: 39336 - DNA, 570 bp, Homo sapiens
ggaggagcagatagacttttttctgctagaaatgtctttgaattgttacaataagcatggatttatataaactttatgattttttaaaatgaaaacttttttaaaaaaattgctcaaggcataatttccaaattttctatggcgttgtcttatctttgcacttagaataatataatatgaaaactaaaaggaggtacagccactgtggagagcagtttggcagtttctgcaaaaggtaaacagaatttccgtatgacccaccaactccacrcatttggatatgctcgaaatgactgaaaacagggactccccttgttcacaaatgttcatcacagcactatccacagtaaccgaaaggtagaaacaactcaatgtccatcaacggctgaatggataaacaaatcgtgttatgtacatgcaatagaatattactcagctattaaaaagaaataaagtgctgacacttgctataacatggatgaaacttaaaacattacgccaagggaaggaagccagacataaaaggccacagagtctatgattcctttgaaatgaaatgaacacaatagg

SEQ ID NO: 39337 - DNA, 3174 bp, Homo sapiens
ctgccacttaactgtgcagttttcggcaagttacttacttctctgttacttaggcatctgctgccagcatcacctataaatatatacctttttctgaactgtaatatttgtattgtactatagcatgggtctgttgtgagggtgaggtgaacgaatgcatgtaaagcatcacaggctccttaggtcgtcttatcccccagtgcccaaatatgtgatctagggcaagccacttcaccactctgagcctgttcttcctctgtaaaatgagtgtaatatgtatttcaacgattgttgtgaagcaagaatgaagtaatggattaggcatcttacactccacattggtatgtagtaaatgcacaatagaaatagttgctataattgccatccccatggggaactggctgtcactattttatatgtaggttcgattttaggatcaagggagtttgctaccaagtctggccattgcctcttctctgttctgacttaagagaatgttttggtggatgggtgagatttcaagttgagaggagaggaaagtaaaagacttataaaaatggaaagaaatgcatgaaaacagatgtattacagaaggtctttgagaagttgtggatgaggtttggctagcctttagtacttcaattttcatgggaaggagagaaacctcttccttcacccccatctatacataaccaacttttatttcctgataggattatgtaacaatttttttctgttaattatcatggacatgttaggatttgattatttggagaggactagcatgcttaattagcgttcagaatttacaatttataacagggctctctttgcagtgtactcatttttgttacactggagacttctaaaaaagcaaaaagttgccttgattatcaatgaggaatcaaatgcaggtggttggtggtacaggaaatcaacccaattactgattaatatgagtgatagagtgattttcctatgatcttatttgaagcatgcaccactcaattggagttaagatgatagttacaagtaagcagatcctaaatcaaacttaaatgtaatttaacatggaaaacatgaacatcttttaaaatatttttgaattaatctcacccttttaccaacctgtggcattattttcttgctgttgatgcccaagcctttccttatttcctcatacaaactctgatgtgagtcctgactggcttagctatttgtgattgtccctattgtaaagatatgtaaagtatggtctggggttccctgtgggaagtcccaggatccttccaggggttctgagagatcaaaactatttttatactaaggtcaagacattttttgcccttttctctcttattctttcataaatttatagtttatgagactggagctgtttgggagaagtagtttcttcaaatgttctctggtggtttcattgggagtttagtatctttttagcttttctgctaggtctgacatctatctggcttaccgtcttttagagacaatgcaaataggtacttttttgtcactgttcggtgacttatgtcaaaatgaagactgtcaaaaagtatttttccccctggttggctttaccatgctcctctcagattgtaagagtatggcatcttttctgaatctctttgatgcatcacatgatagatgccgacaccattcatcctgccttagtctttatttcttttacccatgtaaagtgcctaataccaaaactggtacatagtagacattcatcacatattagttccctttggtttattgccttgtctttatccagcttgctttgaatgtgtttctcaaacttcaatgtgcatacaaatcacctggagagcttattatgtgctgattctaatttggtaggtttggggtaggacccaataatctgcatttcttttcaattctcaggtgatgccactgctgctggttcactgaccacactaggaatagcaaggatgattgatgtatatataaccttaaacatgctcccgcacacatgcccttttgtaactttgccttcttctcccccactgtgattattaagttcgaagcaggaatcattgccttgagttgattgatcactgaatttattcagcaaacatttatcttgggtgatatgattgttttcacagggctgtttctgaaacttygttttgcattatcttaatcccaggtgtctatctctggtaggctgatgagacagtttggagttgagtagtcttcattgcatgcagcctggtcttattctggggctctcttttcctgtctcacttggaaatttcatttcccagtaatcatacttcataaccattaagttgcttggagttcacacttttttcttttagtgtcctgaaacttatttttgactgactcagaagtactataagagaaataagtttccatatcatttttattaacctcttgtttagattcaagcctacagagtagctactcctgttgtgttcacaggattttctcctgagctacattttcttaacctcagactatctctccctgaccaaagagcccagtagtccttagtggggtggtgtgggagacacagcatcagcagggctgctgtactcttgatcaactgttgaaagggaaagtcaggcccagaatctgcctccaactcttttttccatctctttttccactagggtggttgtatgctctttaggcactgttgatttctggctttgaatcgtgatctcttcatatttcagtatgcatgaataataggacaatttcatgcattcattttgctatttctgagtagaagttagtgtgaccaaccaagttttaatctgatggacctgcatctgaatcctggctatgttgctcactatttgtcagtttactacacctctctgtgggtcagtttctccaagccttggtttctcctctgtaaaataggggtcataaagtgaccttattgaatgacagtgaggattacatgaagcaatctatttaaatgcttggctgagggtctgttgcatgatcggcatccaattaatggtcatcctcatggtgataaagatgatcagtgtcatcaaatgaaaatgaaagggaatacagcctgagataatagtctggggaagtaagtgcttgtggtagggaaggaagtaataggcaaaaagtatgctttagctctct

SEQ ID NO: 39338 - DNA, 1142 bp, Homo sapiens
atattatctatatctttatagatagtttaatattatctatatctttaatattatctatatttctggaaaaagttgggactataaattttccattttattgcatttatgtttttttttaaacaccacagttctcacagatatttgagggttctttgggtctgtgtactatatgaaaattttagcatgtttatgggaaactgtcaattaaattaagatattatgttataattcaatttaggaaacaaaaagaactttccaatgtatttttcggtcatcattgtatggtagtgccagagaaaatatttaaagattggtatgaattagaaagtagtacaggccgggcgtggtggctcacgcctgtaatcccagcactttgggaggccgaggcgggcggatcacgaggtcaggagatcgagaccatcccggctaaaacggtgaaaccccgtctctactaaaaatacaaaaaattagccgggcgtagtggcgggcgcctgtagtcccagctacttgggaggctgaggcaggagaatggcgtgaacccgggaggyggagcttgcagtgagccgagatcccgccactgcactccagcctgggcgacagagcgagactccgtctcaaaaaaaaaaaaaaaaaaaaaaaaaaaaaaaaagaaagtagtacaattaaccagtcctagaaacgtctgctccacttgttccactgagttaaggactccacatttgtatttgttaaaacatttgcattgtggcagaatttctaaggagtaagattcaccagacttatcactgaacattttactaaaaagcgttgcttttgtttggcaatcttcctaatcataaagtgattttattttaagatgttaaagttggttaaatggaggagacactgctattgaaagaaacaaataaattaaatgtagtctttgttaaattttcttattaagattacatattttaacaaagataagtgtgacagtaaaaatatttgctttttcataggcagatagaaatactctccacatttcttgagagaaattctgaaagtgaaaggacagattgttagatctaacctaaagattatgaggagattaatcatctaccaaggactgtgagtttcatggagtatgtgtcacaggggataac

SEQ ID NO: 39339 - DNA, 1142 bp, Homo sapiens
atattatctatatctttatagatagtttaatattatctatatctttaatattatctatatttctggaaaaagttgggactataaattttccattttattgcatttatgtttttttttaaacaccacagttctcacagatatttgagggttctttgggtctgtgtactatatgaaaattttagcatgtttatgggaaactgtcaattaaattaagatattatgttataattcaatttaggaaacaaaaagaactttccaatgtatttttcggtcatcattgtatggtagtgccagagaaaatatttaaagattggtatgaattagaaagtagtacaggccgggcgtggtggctcacgcctgtaatcccagcactttgggaggccgaggcgggcggatcacgaggtcaggagatcgagaccatcccggctaaaacggtgaaaccccgtctctactaaaaatacaaaaaattagccgggcgtagtggcgggcgcctgtagtcccagctacttgggaggctgaggcaggagaatggcgtgaacccgggaggcggagcttgcagtgagccgagatcccgccactgcactccagcctgggcgacagagcgagactccgtctcaaaaaaaaaaaaaaaaaaaaaaaaaaaaaaaaagaaagtagtacaattaaccagtcctagaaacgtctgctccacttgttccactgagttaaggactccacatttgtatttgttaaaacatttgcattgtggcagaatttctaaggagtaagattcaccagacttatcactgaacattttactaaaaagcrttgcttttgtttggcaatcttcctaatcataaagtgattttattttaagatgttaaagttggttaaatggaggagacactgctattgaaagaaacaaataaattaaatgtagtctttgttaaattttcttattaagattacatattttaacaaagataagtgtgacagtaaaaatatttgctttttcataggcagatagaaatactctccacatttcttgagagaaattctgaaagtgaaaggacagattgttagatctaacctaaagattatgaggagattaatcatctaccaaggactgtgagtttcatggagtatgtgtcacaggggataac

SEQ ID NO: 39340 - DNA, 1316 bp, Homo sapiens
tgcataaatacaacctcctttttattgtggagtttagattatcttcttatttgtaatatttcccaataaggagataycttaagtatgtagaaaagagtgtactataaaaaaaccctttatacccatcaactagttttatatttcttaatattgtgccagttttgttttttatacaggtgttttatttttctgaaagatgaaacattacagttttacttgacagtctctatggagttcttttgatcccattctttttccttccctcttggaagtgatcataatcctgaaataactctttgatatcaggtatattagtcagggttctccagagaaacagaactggtaggatagatctagatatctagatatagatatataaaagaggatttatcatgagaatgggctcctaggattatagaagctaagaagtctcacaatatgccatctgtaagctggagaacctggaaggtcagtggtattcaacctgagttcaaagggcttgagaaccagggggcttgtggtgtaagttctggaatgtgaagcgtaagaaccaggagttctgatatccgaaggcagaaggtggatgtcccagctcaagagaagagagtacatttgccctttcttgacgtttgtttcattcaagccctcaaagaattggatgatgcctgactatatcagtgagggaggatctttactcggtttatggactcaaatgctaatctcttctgaaaagaccttgacagacatgcccgaaataatgttttaccagctatctgggcatcccttaacccagtcaagtggagacataaaattagccatcacaccacggaaaaggaatgattagtttttataactaagaatataaattgccttcaatttctgtagagtttgcaattatgcaaagcttaactatttttggcagaaggggaatcataccctgattcaagagttccagtggtaagtggacaaaaagcatacaccactttccatgctttcctttgtcagtcctcagaactggcctcaatcagtggccacagtaatagcagcttggctgccctccttcagatgctctctgagagagatttgtgaagttctaaactactagcatccagctagcactgattatccacttactcttgcaaccagaagaaagcagaagaagaaagcaggagattctggacttagacttttgcccactaggtgggtttgggcacatcacttaacctctcttggcctaggagatagtctccttatctcataaacggtaatggtaactttcatcctttatatctattttaagtactaattcttatgca

SEQ ID NO: 39341 - DNA, 1316 bp, Homo sapiens
tgcataaatacaacctcctttttattgtggagtttagattatcttcttatttgtaatatttcccaataaggagataccttaagtatgtagaaaagagtgtactataaaaaaaccctttatacccatcaactagttttatatttcttaatattgtgccagttttgttttttatacaggtgttttatttttctgaaagatgaaacattacagttttacttgacagtctctatggagttcttttgatcccattctttttccttccctcttggaagtgatcataatcctgaaataactctttgatatcaggtatattagtcagggttctccagagaaacagaactggtaggatagatctagatatctagatatagatatataaaagaggatttatcatgagaatgggctcctaggattatagaagctaagaagtctcacaatatgccatctgtaagctggagaacctggaaggtcagtggtattcaacctgagttcaaagggcttgagaaccagggggcttgtggtgtaagttctggaatgtgaagcgtaagaaccaggagttctgatatccgaaggcagaaggtggatgtcccagctcaagagaagagagtacatttgccctttcttgacgtttgtttcattcaagccctcaaagaattggatgatgcctgactatatcagtgagggaggatctttactcggtttatggactcaaatgctaatctcttctgaaaagaccttgacagacatgcccgaaataatgttttaccagctatctgggcatcccttaacccagtcaagtggagacataaaattagccatcacaccacggaaaaggaatgattagtttttataactaagaatataaattgccttcaatttctgtagagtttgcaattatgcaaagcttaactatttttggcagaaggggaatcataccctgattcaagagttccagtggtaagtggacaaaaagcatacaccactttccatgctttcctttgtcagtcctcagarctggcctcaatcagtggccacagtaatagcagcttggctgccctccttcagatgctctctgagagagatttgtgaagttctaaactactagcatccagctagcactgattatccacttactcttgcaaccagaagaaagcagaagaagaaagcaggagattctggacttagacttttgcccactaggtgggtttgggcacatcacttaacctctcttggcctaggagatagtctccttatctcataaacggtaatggtaactttcatcctttatatctattttaagtactaattcttatgca

SEQ ID NO: 39342 - DNA, 534 bp, Homo sapiens
ggggtctcccaggcaccaaacggtctggacactgcctccttccattgtcatctcttgtcaccttgttcccttctccactaagcttccaggcacacagatggctcttctgatgcttgagcaccacacacttcccccgcctttgcctgagccctctcctgggtgcacttcctgagtcctttgctggcwgagctgccatccatcataacttaaatcacaccacctccaagaggccctctgggaccaccaccctctattaagaatggcattcttccttatcatctgtctccaccctccttccaaatggaagttccaccatgattgtgaagcctccccagtcatgtggaactgtgattccattaaacttctttttccttataattacccagtcttgggcatgtctttatcagcagcatgaaagcagagacctcactgctttgcggactgctgcattcccagcatgaaacccagagcccagcacatggcaggtgcttagcaaatggccatgaagtcaaaacaacggggaggaagcactct

SEQ ID NO: 39343 - DNA, 761 bp, Homo sapiens
gggaagagaatgggaggctgggttgactcctccctgtctaacctaagtgtcatcgctaaaagcatccatagggaattgacccctatgacatttgctgacagggaacacgcagcagctagtgatctctgaaaaacaaaggaaaatgaggacatttaagaatatctgtttagggcactgtcaagggttaaaagaaataaagaacagggaacagaaacagctacgtcatgtggaggacccagcacaaaatgaaaatggrggtcaccttgttcaaaaagcagaaaaaaaggtcattcgtgggactaaaatgtaaagctttttcttttctttcacagcctctccctctctcaactattcatggcattttaaaatttgccatgttgactgaagtaaagaaaaattaaaaattaaaatgattagcatggatttcagtgtttgtctttatactgtgcaatgccaattttaaatgcaaatatcatttaactcgaatgcagaatcaccaaaatcacacagtttcataacttacacaccttgattttttttttccttaacagaacagtgtgtaaaagaaactaaatgcaactttgatgcctggaaactggatttgatgttcagagcttggtctatacgttattgcaaactgatctggcacagctaatcctcattttctcctgcttgacataaacaatctctcaggacatggatgcagaccaggtcactgtgcaaccaacaaaaccccagacatccccttctcttgttcactg

SEQ ID NO: 39344 - DNA, 761 bp, Homo sapiens
gggaagagaatgggaggctgggttgactcctccctgtctaacctaagtgtcatcgctaaaagcatccatagggaattgacccctatgacatttgctgacagggaacacgcagcagctagtgatctctgaaaaacaaaggaaaatgaggacatttaagaatatctgtttagggcactgtcaagggttaaaagaaataaagaacagggaacagaaacagctacgtcatgtggaggacccagcacaaaatgaaaatggaggtcaccttgttcaaaaagcagaaaaaaaggtcattcgtgggactaaaatgtaaagctttttcttttctttcamagcctctccctctctcaactattcatggcattttaaaatttgccatgttgactgaagtaaagaaaaattaaaaattaaaatgattagcatggatttcagtgtttgtctttatactgtgcaatgccaattttaaatgcaaatatcatttaactcgaatgcagaatcaccaaaatcacacagtttcataacttacacaccttgattttttttttccttaacagaacagtgtgtaaaagaaactaaatgcaactttgatgcctggaaactggatttgatgttcagagcttggtctatacgttattgcaaactgatctggcacagctaatcctcattttctcctgcttgacataaacaatctctcaggacatggatgcagaccaggtcactgtgcaaccaacaaaaccccagacatccccttctcttgttcactg

SEQ ID NO: 39345 - DNA, 761 bp, Homo sapiens
gggaagagaatgggaggctgggttgactcctccctgtctaacctaagtgtcatcgctaaaagcatccatagggaattgacccctatgacatttgctgacagggaacacgcagcagctagtgatctctgaaaaacaaaggaaaatgaggacatttaagaatatctgtttagggcactgtcaagggttaaaagaaataaagaacagggaacagaaacagctacgtcatgtggaggacccagcacaaaatgaaaatggaggtcaccttgttcaaaaagcagaaaaaaaggtcattcgtgggactaaaatgtaaagctttttcttttctttcacagcctctccctctctcaactattcatggcattttaaaatttgccatgttgactgaagtaaagaaaaattaaaaattaaaatgattagcatggatttcagtgtttgtctttatactgtgcaatgccaattttaaatgcaaatatcatttaactcgaatgcagaatmaccaaaatcacacagtttcataacttacacaccttgattttttttttccttaacagaacagtgtgtaaaagaaactaaatgcaactttgatgcctggaaactggatttgatgttcagagcttggtctatacgttattgcaaactgatctggcacagctaatcctcattttctcctgcttgacataaacaatctctcaggacatggatgcagaccaggtcactgtgcaaccaacaaaaccccagacatccccttctcttgttcactg

SEQ ID NO: 39346 - DNA, 549 bp, Homo sapiens
taaggttttttttttgtcccctcccccccaccccccagcagttattgtgaaaggggttgcaatagctgtgctactgatttgtgtgcattaattttgtatcctgaaactttgctgaattcatttaccatttttaggagcttttggatgagtttttagggttttcttggtgtacgatcatatatcagtgaacagcaacagtttgacttcctttttgccgatttggatgctttttatttctttctcttggagcagatgtgggtttgaatcctgcctgactttgtcactccctggagaattttctgaaaccgttagcgtcttaaatttcctcatttttaaaatgggaacaataatatcaacktagcagggctgttaagatcattacctgaaataagctgttaaaagttcacagcatagtgttggatggattaagtaatcacagtaaaataaatgccataataatcatgacaaggacaatcatcattaccaaattgtagccactgtgtcaaagaaaacgacacatagaatgtgtttcattattactctgcagcc

SEQ ID NO: 39347 - DNA, 548 bp, Homo sapiens
gagtaacatacctttagctgctatgataaggagaagaaccttacagatttttcttttatctttaaacgttttaagaagacggagctcctgacagctggctttgctgtcatgcatagactgggtggtaaaagggagcgccacctagtggcctgcaagtcatttggtcggtgctgccctccaagggagagcagggctaaggaaaagcaaataggatttaaacttctcagccttctacgacctgccacaaaccagcacagtacctggttttatagaacagagtgatggttccggctccttccatgccagcccctccctagtcaggactggtgttaaactttgtctttacaagcctgtgcttgcaatttctagctttgccattgccactgacatcygcttaaaatgaaggctttgggggcctggatatacctctctccaaatggccagtcatagaaggctttgaaaatctggcctttgatgtattttatagggataaggagccatatattaaagtgagctctgctgcacactctaggccacataactgggtc

SEQ ID NO: 39348 - DNA, 747 bp, Homo sapiens
agatttctttcttccaggttggtgctttttcaatcataacacacactatgactggcacctscgaaggtaatgaattggctcctggatcttcaaagacaagatttaaatcacaaagagaatgaacttcatggagttgctgctcttctttgatccttatttgttaaacatatttttctctaaataggtttgtgacccctcagtgaagatgtagactgtcagcgtgaatattttgtgaagattctcattttaagttttacaactttatactgctggaagttgtaaaaacatgtggcccttaaaaattccagcttgatggttaaaatgtccattcagggtctgttcatctttcttgttaggaaacctagattgtaagtatactaataacttaatagtaatggactagctcagtgctgtgtttagggagatgcactaagctagttgggattaggtattattttggccgagggtggaagtgagatttttaccttactcacagttcttaccacatcaagaccaataaaaacatctgctgcatgactgactattctgtttcacatatgttacttgtctgtaagcttctacaggtaaaggcaaaggccatggttaaatagtatctggccgggagcagtgtatcacgcctgtaatcccagcactttgggaggctgaggggggcggatcacgaggttaagagatcaagaccatcctggccaacttggtgaaaccccatctctactaaaaatacaaaaa

SEQ ID NO: 39349 - DNA, 608 bp, Homo sapiens
tcctggggacatcaacatgcaaacagaagttagaagggacaataaaggaagctagaagaaacagcatctaaaaggcaactgaaattagagtcatgtcatgcaattcatgtggttggaagaatattgataagattaatctttttgctaaaaggcagtctgaagaaaggcccactgtatttggcaataagagggctattgtgrtcacactgcaagcattttcagtgaaataacaaaatcagaagacaaaacaggttgaatgactggcaggcgtggaagaggagatagaaaatacagatcgactttttgaaaaccctgtttgtggcttaaaagtgagcagtaagtgtgtgggtatgtgtaccaggcaggctgtaaaatgcttcccaaaggtccccacccttgtattgtgtgtgtaggctggccttattgactggcttttcctgaagacaatttggcagcaaagatgggatgtcaattttgaggatagatcacaaagaaactgtggcttcgattttcagcattctcttgctcattcactttccagcaatccacctgccattctgtaagctgccctactcagaagccaaaaggacgaaaaacatccagcaatg

SEQ ID NO: 39350 - DNA, 561 bp, Homo sapiens
gcatgctgaaataataatattttggacccaagaagagccaggcagaacaagccagggctggcccaaagccaggataacttgatggcgggtccttgacttgcattaaggctccatcttgggaccgtttcagcttcaggtggggtgaggatttattcaggggctcatctgtgggaagagctaaagtacaagattgtgactcaagcagggcctggaatgagttcattgaaataacccaacatggattcagctacttttgtttttaattagagatttaaaatctgagtctccatgcaaatggaatttttacagaatacaaaaatctcccattcctgagaactgtttgaggtttcccccgaattctcagtgaattattccttcctttgctcagttcctgtcaccatcctgttggaacggatgcctgcccaccatgatccgcagattctggacggagactcaggagaggaagccgagacaacgacgccacagtgcrgaacggagcctccctcttccgggctgaagatctcagccattccggctgcatccaggagcggcccgggagct

SEQ ID NO: 39351 - DNA, 1231 bp, Homo sapiens
tattttatgactatggtttaggggaaaggatgtcgaaactaagacatctgtgaaagcatttgctacactgataatggaaaccccttccgcatctgttttgaaatctgggagataattgtccaagcgaagctctgtttcaagtaaccgtcaagcctccaaactgaagaaagctgttctaattcagattctaagccattaactttcttctggaaggtcatgtgcccatcattgacatgaaaatatttcctgtctacgtggcctcacagccctgggctaatccaaactgctctttcattccttgcataaaaccttaacatcactttcttcttattcatgaaatgcagtttctagggcaatgcattttctccactttgagaggggtaacgtcagctacagatacagatatcatttgarttttttctccatacatgaaaagtttgctttccatgctggcaaccacggtgatgtctggagaagactcctgttttaatcaaatctttaaaaaatattatttgcacattaaatgaaataaaacactctccagcttctctcctttgcccttgcaactgtgaacacactatgcctacaaagctgctatgtctcaccttaaaagtcattaaaatgtaataactaagcctctacagctattgtccccagaaaaaaaaaaacacatcaacacttgcagagtgtatttagttttgaggctataagcgctccttgcaaatgtttgaacatctccattccttaaaataaatacacaaagcaattgtagatgccttcattctcctatgcttgttcacacaatttactaattcacaaaacaggtcatccaaaatgggtcattcagttattggcataattatccaggttcagttgttaatataattaggggtaatgtaaatgtgagcaattttccaaaccataattaatagggcacaacaatacacagagaaataaaagccacaattttcctaaattgctagtctagtgctcattagagtaagctgtgtgggagcatttgccatgcaccaggccctaggcaggggctttaaacagatcatatcattcagtcctggacagtccccattaaacacatcagaaactgaagctgacagaggttgagccctttgttcacgtaagcagtaagtggtaaattaaacctttgtagttgggtctgtctaattttgatcactgtgccatagtacctactcctagattaaacttttgaaaa

SEQ ID NO: 39352 - DNA, 594 bp, Homo sapiens
cctcccttttctttggctaagatggtcttctaacattgaaagaagttcmatttaacattccccggctcaaagtggtgtccctaggccaactcccataaaacttgtgttctaccctttctcttgggaccctcctctccctttccccaaagttgtacagacaggaaaagcacctttgttacctggatttccaacccacatctctatggtagatgccattttagagaacacttttctaaaagacatagatttgcttaaatatattctggaacaaaatgggacatcttttctgctcttatggggactaaaagaaagtgaaatagttactgtcttgaaaagccaagactatgttcagatggatgctttgtcctcactctgcataattcctgcaacttgttagaagccctttattgattagactacaacaactacccacgaactactagaaagcatatggtgtgtcagcacagagaagatatattaaaactgacaccgaatgaagaatttaaatgtaaaaaccataactctaagatattcttatccatagaaagatctatgtgatagaaactcataatgaaagtcatacttaatttccat

SEQ ID NO: 39353 - DNA, 594 bp, Homo sapiens
cctcccttttctttggctaagatggtcttctaacattgaaagaagttcaatttaacattccccggctcaaagtggtgtccctaggccaactcccataaaacttgtgttctaccctttctcttgggaccctcctctccctttccccaaagttgtacagacaggaaaagcacctttgttacctggatttccaacccacatctctatggtagatgccattttagagaacacttttctaaaagacatagatttgcttaaatatattctggaacaaaatgggacatcttttctgcwcttatggggactaaaagaaagtgaaatagttactgtcttgaaaagccaagactatgttcagatggatgctttgtcctcactctgcataattcctgcaacttgttagaagccctttattgattagactacaacaactacccacgaactactagaaagcatatggtgtgtcagcacagagaagatatattaaaactgacaccgaatgaagaatttaaatgtaaaaaccataactctaagatattcttatccatagaaagatctatgtgatagaaactcataatgaaagtcatacttaatttccat

SEQ ID NO: 39354 - DNA, 594 bp, Homo sapiens
cctcccttttctttggctaagatggtcttctaacattgaaagaagttcaatttaacattccccggctcaaagtggtgtccctaggccaactcccataaaacttgtgttctaccctttctcttgggaccctcctctccctttccccaaagttgtacagacaggaaaagcacctttgttacctggatttccaacccacatctctatggtagatgccattttagagaacacttttctaaaagacatagatttgcttaaatatattctggaacaaaatgggacatcttttctgctcttatggggactaaaagaaagtgaaatagttactgtcttgaaaagccaagactatgttcagatggatgctttgtcctcactctgcataattcctrcaacttgttagaagccctttattgattagactacaacaactacccacgaactactagaaagcatatggtgtgtcagcacagagaagatatattaaaactgacaccgaatgaagaatttaaatgtaaaaaccataactctaagatattcttatccatagaaagatctatgtgatagaaactcataatgaaagtcatacttaatttccat

SEQ ID NO: 39355 - DNA, 631 bp, Homo sapiens
tattatttcagatggttaaaaatcttaattcctggagattgatctattttcttctttgttatattgagagaagkctattacatagaaataaacaattttaataaccacgtgataatctctcataaactaaatttaattttctaatatttgtttcttttcttttgccttcttttttatctttgcatttctgcaatagaacttacatattgcacggtcattaaatatgtatagattgactggtggtgagctttattctggttcttctaaacattattttgtgtactattattgcctctgacgtgccttctgatgtttagataatctgacagtttagacaatttgccttataaattagttttgtaatttaacataagtttctttccttgtaatcattagttaatactactgaaagtgaaaatgaaaaccgtgttgactcccttcctttataaaaatgagattcaagtgttgcttaaattttaaatatatctatttgtttttcttgctttctatattagcactcttttagagctttctccctaaaatgggatcactttagctatctaacatcggggctggcaaaccttggaccatggcccaatttcacttctgcctgttttatacataaaattgt

SEQ ID NO: 39356 - DNA, 631 bp, Homo sapiens
tattatttcagatggttaaaaatcttaattcctggagattgatctattttcttctttgttatattgagagaagtctattacatagaaataaacaattttaataaccacgtgataatctctcataaactaaatttaattttctaatatttgtttcttttcttttgccttcttttttatctttgcatttctgcaatagaacttacatattgcacggtcattaaatatgtatagattgactggtggtgagctttattctggttcttctaaacattattttgtgtactattattgcctctgacgtgccttctgatgtttagataatctgacagtttagacaatttgccttataaattagttttgtaatttaacataagtttctttccttgtaatcattagttaatactactgaaagtgaaaatgaaaaccgtgttgactccctycctttataaaaatgagattcaagtgttgcttaaattttaaatatatctatttgtttttcttgctttctatattagcactcttttagagctttctccctaaaatgggatcactttagctatctaacatcggggctggcaaaccttggaccatggcccaatttcacttctgcctgttttatacataaaattgt

SEQ ID NO: 39357 - DNA, 441 bp, Homo sapiens
acactcaccgtgaagatctgcagcttcactcctgagccagcgagaccacgaacccaccagaaggaagaaactccgaacacatctgaacatcagaagggacagactccagaaacgccaccttaagagctgtaacactcaccgccagggtccgtggcttcattcttgaagtcagtgagaccaagaacccaccaattccggacacagtttgattttgaagaatcttttgcgttctacaagagatttggaggatgacatttagaataatattgcaaatggaatgtgcttaggagaagtattgtgtatagtgttagagactccctatttcatttttttgtttgtttgttgttgtcgttttaagagacaagctgtcactctgtcagscaggctagaatgagatggcaccttcttatctcaccgcagcctcaaactcctgggctcaag

SEQ ID NO: 39358 - DNA, 1089 bp, Homo sapiens
tgtgaatctaatcctgaatcagttcaatctcagttattactgggtctgataaaagtcttgagagttttaaatactcctttctggacactaggaatgtgtgtcctttgtcccatcctgcagagtcttttcatgaccagtggctttgccacctcagtcccataattggaacaagggaatctctgccaaggaatcatacggcaaagtgcagccttccaaggcatgtcgggcagtcatccctctgggccttgccctgcatccaggctactgccatggggcagtgcttaatggaccaaggtgctgatactgagtgggcgccatgacctttcctcccttactrtatcaagaattccatttttcaactggctcttggatattcttccttaacttccccctgcccaggatacttaataggtttaattaagtaattgcagctgacaaaacaagtaggacctgatttcatcagctactgcattctctcctgcaggaatttttgggacatgaaaatctaaaatgcctggtttacctatttggaatcagaaaaaaaaacaatgggatcaaaccacaagttaaaacctcaaaaaaagttatcctgccattttctttgcttgtaaattcgtttcagccaagagaatgtacttcccatttcaatgtcccccactgagaggacggaccctaggtctctgtccagagttggacaactctcattcacaaataaaagataaagggtagcaattcccacacacaaagccaccctacccgtgtggatatttccattaggctctaggcccaatgaaaacttgaaacttcccagtcctcccagcactgattctagcccatcctagtggttctgcctcactctgtgtttaaagactaaaaattttaaaacagactattttttagagcagtgttgggttaacagcaaaaccaaacagatagtacagagagttccattatacttcctgcctctacacatgctcagcctccccagctatcaacctccaccagagtagtacatttgttacgactgctgagcctgcattgatccatcaatatcacccaaaatccacagtttacattagcattcactct

SEQ ID NO: 39359 - DNA, 667 bp, Homo sapiens
atttaatgggaaattcagttgtacatgaagtatgatccctgccctcaagaagcttacagttatcttgcacttggaagcacagatccttagaaatagaaagaaccccaaaagtccaggtgtctcattatttaaatgagataactgagatctagagagtaaatgtgattatctttagtcagtgctcttgtctaggtcagacacagtggctcacacctgtaatcagagcacttcgggaggcccaggcaggcagatcgcttgaacacaggagtatgagactagcctgggcaacatggtaaaacctcatctttaccaaractagaaaaattagctggatgtgatggtgtgtgcctgtagtcttagctactccagaggctgaggtgggaggattgccttaagcccaggatgtcaaggctacagagagttgtgatcttgcactccaacctgggtgatagacaagatcctagctcaaaaaaaaaaaaaaaaaaaaaaagctcttttctataacccaggttccagattcaattctgtgttttttccattatgtgatgctttgagaggttacttcgttttgtagttatttttctttttccctccctagctaaattataggtctctttaaaggcaggaagtaatgtctgatatttctttcccattcaggccacccaag

SEQ ID NO: 39360 - DNA, 562 bp, Homo sapiens
tcaaagcaggcccctacactactccaagtaaaatgtccttttgcagcaaggttaaatagaacctgttctattgtatttttccaattatgcttttawtttgtgtgttatttgcataataactttctccaacacatttcattttttggacacctacttcatgttgttttgttttttcttttgtcctcctacgtgaaactggaatgttttctctttaagtctgttttgtagcagtcattttgcaactcctcttttctgctgtcctgtgttggaaccatgatcctcggaacctcatgtctcccatttgttgtttctttcctcctgttgcttgactgtattgtatcttcaattaactcccttaaaaggcacgattaaaaggtaaacgttaccctcctttgcctgtcagaaaaaaattattttgttctcacacctgattgatatgttggctcagaaatttgagagaacattgcttcattttcctgtaatatccaattgttcatgagaagtctgacattaatctgatccttattcctttacatatggcttgtttttcctgtccagaaga

SEQ ID NO: 39361 - DNA, 562 bp, Homo sapiens
tcaaagcaggcccctacactactccaagtaaaatgtccttttgcagcaaggttaaatagaacctgttctattgtatttttccaattatgcttttaatttgtgtgttatttgcataataactttctccaacacatttcattttttggacacctacttcatgttgttttgttttttcttttgtcctcctacrtgaaactggaatgttttctctttaagtctgttttgtagcagtcattttgcaactcctcttttctgctgtcctgtgttggaaccatgatcctcggaacctcatgtctcccatttgttgtttctttcctcctgttgcttgactgtattgtatcttcaattaactcccttaaaaggcacgattaaaaggtaaacgttaccctcctttgcctgtcagaaaaaaattattttgttctcacacctgattgatatgttggctcagaaatttgagagaacattgcttcattttcctgtaatatccaattgttcatgagaagtctgacattaatctgatccttattcctttacatatggcttgtttttcctgtccagaaga

SEQ ID NO: 39362 - DNA, 562 bp, Homo sapiens
tcaaagcaggcccctacactactccaagtaaaatgtccttttgcagcaaggttaaatagaacctgttctattgtatttttccaattatgcttttaatttgtgtgttatttgcataataactttctccaacacatttcattttttggacacctacttcatgttgttttgttttttcttttgtcctcctacgtgaaactggaatgttttctctttaagtctgttttgtagcagtcattttgcaactcctcttttctgctgtcctgtgttggaaccatgatcctcggaacctcatgtctcccatttgttgtttctttcctcctgttgcttgactgtattgtatcttcaattaactyccttaaaaggcacgattaaaaggtaaacgttaccctcctttgcctgtcagaaaaaaattattttgttctcacacctgattgatatgttggctcagaaatttgagagaacattgcttcattttcctgtaatatccaattgttcatgagaagtctgacattaatctgatccttattcctttacatatggcttgtttttcctgtccagaaga

SEQ ID NO: 39363 - DNA, 672 bp, Homo sapiens
tttaaagtctgtttctctacgggtacctgagattaattatctaaaacagaggaataactctcaagtctctgctacttagaagaaatttaaagtatccaggagaatataaaagagtaaactgcatccagttacattcttcttgtgctgacaatacagttttagacctttttttttttttttttttttttttttttccgacggagactctytctgtcacccaggctggagtgcaatggtgtgattttggctcactgcaacctctgcctcccaggttcaagcaattctcctccctcagcctcctgagtagctgggattataggcccatgccaccacacccggctaatttttgtatttttagtagagacggggtttcaccatgttggtcaggctggtctcgaactcctgacctcttgttccacccacctgggcccctgaaagtactgggattacaggcatgagccactgcgcccaggccgtttcttaaattaataacaaaagtcaacgtatctgagtctgttctctcttatataagaaattctttgaggacagactttttgaaacttactctaccatgactttgcctagctgcctgcaccttatgaccagggtgatattaaacgtgtctataatggagaatgaagaggaagaaaatgttcaagttactagaatgag

SEQ ID NO: 39364 - DNA, 672 bp, Homo sapiens
tttaaagtctgtttctctacgggtacctgagattaattatctaaaacagaggaataactctcaagtctctgctacttagaagaaatttaaagtatccaggagaatataaaagagtaaactgcatccagttacattcttcttgtgctgacaatacagttttagacctttttttttttttttttttttttttttttccgacggagactctctctgtcacccaggctggagtgcaatggtgtgattttggctcactgcaacctctgcctcccaggttcaagcaattctcctccctcagcctcctgagtagctgggattataggcccatgccaccacacccggctaatttttgtatttttagtagagacggggtttcaccatgttggtcaggctggtctcgaactcctgacctcttgwtccacccacctgggcccctgaaagtactgggattacaggcatgagccactgcgcccaggccgtttcttaaattaataacaaaagtcaacgtatctgagtctgttctctcttatataagaaattctttgaggacagactttttgaaacttactctaccatgactttgcctagctgcctgcaccttatgaccagggtgatattaaacgtgtctataatggagaatgaagaggaagaaaatgttcaagttactagaatgag

SEQ ID NO: 39365 - DNA, 575 bp, Homo sapiens
ttaactataaggtaaagctatgatgctgattaaataaatgacatacaaagtgtctggcacagaataggtgctcagcaaaccactagttgccttcctctttcctaaagtctccatggagttgttacatataacaacatggagttgttaaatatttgggagcagaatgcaakagttggccctcaatcttgtgttcttcccatttcaccaggctgcttcctgctgagatttatagggaaactaccttgttgaagagctagctgctgcctctcacttgggaatgtgttggggagatggtgtgagtgaaaggtagagatgtgttacaaaccctgactaccaccatggctgaaactgcaaccaccaactacaggagggtcattcattgtaatagaaaggggctgttggtggcagaactgtgttttcagcatccacagctgacagtccccctgaggttatagaactatgctgcacacgagttcacagctgtgagtgtgacaccgatgataaagcaataatcctctctatctaatgtccttccaggttgggtggctgcctgccttacctaaataggttttgtg

SEQ ID NO: 39366 - DNA, 517 bp, Homo sapiens
tggcaagtcactcttcctcttcttctgccctccaaactgaatagtctggtctgattttctctggggtctttctgctctaacattctatgatcttaattttcatttaattattccacaatgcctcaaaaatgaggacacaatcaatggtgtcaaagggyaaagagatataggataaaatgagaataaaaggtacccactgatttttgccattttgaatgagatgatcggggtggaagaacatgttaaattgaggagtgaatagaaagtaaatagaaatagattgcaaagaagaaaaagacatagagaaatggccagagctgtgatgagtctggtgaaatttggaaaggggaaatgatagtacaaaaaatacagctgccccttggtatctgcaaggatgatagggtctttcttcttatttcccaaagttctagaagggattggtcccaggagccacaccgccccctaactccccaccctcgggacaccaaaatccatgatgctcaagttccgtatataa

SEQ ID NO: 39367 - DNA, 548 bp, Homo sapiens
tcatttgaggtcaggagtttgagaccagctagaccaacatgaggaaccccacctcaactaaaatttaaaaaaactaatttacttcataaatttaccttttctatacagttgttataaatagatacaacaagacaatatttagtctcttatgtttgacttctttcatgtagcacaacatttctgagttttacccatgacacagcaagggtcagtatttgcttcatttttatcactaaataatactccgttctatggatataccacatattgttcatttatcaaytgataggcattagattgtttccagtttttgtttttcaatattccacttggtagaactctcttagcatacagaattttcacatcttatttctgtctccctttcttccttcctaccttcctgcttcctttccttcctttctatattatagctttccaacacaaattatgaaatcagcaccaataaataagttatagatgttgctaattggatccaaacgggttatccactatttataataagtaaaagtttaggtccttggagttta

SEQ ID NO: 39368 - DNA, 561 bp, Homo sapiens
gaagacctgtctctatgcaaatttctaagttgggacraggcttcacaatggtgcagaatcccaaactgattctcatacatttttctactaagtaaatatattcctgaatttatcaggaataaacaaattttctactaagtaaacatattctgaatttctgagaaattctgaaatcacccccgagttgtctaaaatgaagcaacaaattgggaccatgtttctttaaatatataattaaaacttatttacagctgggtgtggtagctcatacttgtaatctcagcactttggaaagctgagatgggaggatcacttgtgctcaggagttgaagacaagcttgggtagtgagactgcatctctacaaacaatttaagatattagccaggaatggtggtgtgtgcctatagtttcagttacttgggaggctgaggtggaagattgtttgagcccaagagttggagcctgaagtgagctatgattgttccactgcacaccagcctgagcaatagagaccccattctaaaaaaataaagcaaaaaccaaacttatttgtagtaaca

SEQ ID NO: 39369 - DNA, 665 bp, Homo sapiens
ggatcctccagtttgggaccacgtgatggtaaattaactcttgatcaacacccccacatagtttggaaggagcaaagttttaaaagcagactagtccacctggaaggaaataatcaaaatacacatattttggaaaggacttttaatcagattatataaagaacttttgcaattcaataataaagagtgaagcaactcaatttaaagaaaaatggagaaaatattttaatagacattttgtcaaagaagatatacaaattgctaataagtccctaaaaagatgtgtgaaatgcaaattaaaaccataatgaggtaayattatacatttattcgaatggtggatttttcaaaattgacaatatcaagtgttggtgatgatgtggagcaactggaactctcatacattgttggtgagaatggaaaatggcaccactactttaaaacattttggaagttgcctataatgtaagacatacactgatcttataacctagcatcccactcattggtatttactcaagagaaataaaatatgtctacataaggacttctatgtgaatgctcatagcaactttactcaaaatagcccaaaactggaaataaaacaaatatccatcaaccgatgaacggataaacaagttgtgatatggctatgctcctgctat

SEQ ID NO: 39370 - DNA, 665 bp, Homo sapiens
ggatcctccagtttgggaccacgtgatggtaaattaactcttgatcaacacccccacatagtttggaaggagcaaagttttaaaagcagactagtccacctggaaggaaataatcaaaatacacatattttggaaaggacttttaatcagattatataaagaacttttgcaattcaataataaagagtgaagcaactcaatttaaagaaaaatggagaaaatattttaatagacattttgtcaaagaagatatacaaattgctaataagtccctaaaaagatgtgtgaaatgcaaattaaaaccataatgaggtaatattatacatttattcgaatggtggatttttcaaaattgacaatatcaagtgttggtgatgatgtggagcaactggaactctcatacattgttggtgagaatggaaaatggcaccactactttaaaacattttggaagttgcctataatgtaagacatacactgatcttataacctagcatcccactyattggtatttactcaagagaaataaaatatgtctacataaggacttctatgtgaatgctcatagcaactttactcaaaatagcccaaaactggaaataaaacaaatatccatcaaccgatgaacggataaacaagttgtgatatggctatgctcctgctat

SEQ ID NO: 39371 - DNA, 712 bp, Homo sapiens
tgcatttastatgtctcaatgaagctgacatttgaaaattttaaagataacattgggatgttagcaaatcatagatttgcagcattaatcatagattaagcattgcaatgtcttgggctttttatgcctcagggtgttcagacaaaagatgtgagaaaacataattatttatttatttatttatttattgacggagtttcactcttgttgcccaggctggagtgcaatggcacgatcttggctcaccgcaacctctgcctcccaggttcaagtgattctcctgcctcagcctcccgagtagctgcatttacaggcatgcaccaccatgcccagctaattgtgtatttttagtagagacagagtttctccttgttggtcaggctggtcttgaactcctgacccaaggtgatccacctgccttggcctctcaaagtggtgggattacaggcatgagccacagtgcccagaccagaattcatttttttttttttttgagacgttttgctctgtcgcccaggctggagtgcagtggtgcaatctcggctcactgcaagctctgccttccgggttcacgccgttctgcttcagcctcctgagtagctgggactacaggcacccgccactgcgcccagctaattttttgtatttttagtagagatggggtttcaccatggtctcggtctcctgacctagtgatctgcctgcctcggcc

SEQ ID NO: 39372 - DNA, 712 bp, Homo sapiens
tgcatttactatgtctcaatgaagctgacatttgaaaattttaaagataacattgggatgttagcaaatcatagatttgcagcattaatcatagattaagcattgcaatgtcttgggctttttatgcctcagggtgttcagacaaaagatgtgagaaaamataattatttatttatttatttatttattgacggagtttcactcttgttgcccaggctggagtgcaatggcacgatcttggctcaccgcaacctctgcctcccaggttcaagtgattctcctgcctcagcctcccgagtagctgcatttacaggcatgcaccaccatgcccagctaattgtgtatttttagtagagacagagtttctccttgttggtcaggctggtcttgaactcctgacccaaggtgatccacctgccttggcctctcaaagtggtgggattacaggcatgagccacagtgcccagaccagaattcatttttttttttttttgagacgttttgctctgtcgcccaggctggagtgcagtggtgcaatctcggctcactgcaagctctgccttccgggttcacgccgttctgcttcagcctcctgagtagctgggactacaggcacccgccactgcgcccagctaattttttgtatttttagtagagatggggtttcaccatggtctcggtctcctgacctagtgatctgcctgcctcggcc

SEQ ID NO: 39373 - DNA, 2556 bp, Homo sapiens
  misc_feature (1)...(2556): n = A,T,C or G
cccaagtgtgtgggggacatgggagggagatatcacagtatgtaccactctcaagtagccaccaatatgatggttttcttttcctcaggaagctcgagaatgatgagtaaaatctgagacttctggacaatacaggacacacacaaataatggaaaagacactcaaataaggtggaaactaagtaaacaattgaaacgtggagtcagatgccactgacagcctaagaaagccaagtagcccagcttccccatggggttgtcctcggctttggtgaggggaagaagcagggtctgtcctggacacttgttcctgggctcagggcccaagtgtttgatgcacagcttcccactctttcaatggaggtgcacctattgtctcctcagccaaagactcaggatcatgaataactcatagtaaactcactggggggttgtaggcatggattttttgtaaacaccataaaaggtccttgatccaaaaggctctgcactcagtgcattacatgtactttctattctccccaggccctaccccacccctacatcagcccattataattcttaaagattttgtgctcaagccaggggcccgagtgggggcatttaccctccatatagtgcaaacatacacaaagaacaattgaccaccatataacataacactttgtagggttttcaagcttacaaatatcagactaatttttttttttttttttctttttgagatggagtctcgctcctttgcccaggctggactgcagcggcgctatcttggctcactgcaagcyccgcctcctgggttcaggccgttctcctgcctcagcctcccaagtagctgggactacaggcgcccgccactgcgcctggctaatttttttttttgtatttttagtagagacggggtttcaccatgttagccaggatggtctcgatctgctgaccttgtgatccacccacctcggcctcccaaagtgctgggattacaggcatgagccaccgcatccggcccagactaatgtttatctctgacccaaagggaaaaaaatacttcccaagccaagtagacctgacctgaaaacaccaccatctggccaagaaacagaacttttgggatgattggatccaagaaattgttgtgtggattatccagccttcttctccctggctgccactcttaggactaatcactgataggaggaaatgctgctaacacattgatatagtttggatatttttttaccctgcccaaatttcatgttgaaatgaaattcccaatgttggaggtgggggccgataggaggtgtgtgggtcacgggggtggatcctcatggattggtgctgttcttatgatagtgagtgtacannnnnnnnnnnnnnnnnnnnnnnnnnnnnnnnnnnnnnnnnnnnnnnnnnnnnnnnnnnnnnnnnnnnnnnnnnnnnnnnnnnnnnnnnnnnnnnnnnnnagcttacagtagactaacatctgtaaagttgaacataaacttgtcctaacaataatacccatcacttggacagtgctttgcaggtcacaaggcactttaatgctacttcatgtattccttttgacagcactgtaaggtcactggaacaactgttattatccccatttcagagataaggtaaaccacagctcagggtggctaaatatcacataacaggtaagttgcctagaagggacttgtacccaaggtatcaaaccccagatccgttaggtggccagcaggtaatgactaatggtgacaatacttcacgcagaggatggaccatcagcaaaacagactcatgaatttggccctgagtgcagcataagccacagcttacagggccttcccctgggtcagcatctgactatgggaaagccccaaaatttctagcttacattgcatgtggcagttagactctgggacgtgttttgacccatatcatgtttgaattcgtgagaggcaacctgcaataggttgtctttttagtgtaaatttctgatttgaggactagaggtattgagattgtgtagaattagaggagaggcctgcggtaagggagaacagcagctttctcatcatccaatctggaaaaccctgtgccctgggcaggccacttagacccacccaaaacctgtcccagggacttgccacaggaccgccagtcttggggaggcacacgtggtggcatgccaggagcaggggtttggggtcagaaagaactaagtttaagtcccagccccattacttgactgtggaacctcacagaggtatcttaacttctgagtctcagcttcctccttaaaaagtgaggaaaatctctacttttcagacttggtataaagctgatacaagatgacttatatgaaatcactggcccactggagatgcttaaatggctcctgttgtccttgacctttcacagcccccagatgaagatgacaagcaactcaccctacctcctccaagaggccctgccccatgctatcaccagcaggttctcaggtatgaccaacaagatgattgttttatagtgcccaacacagagaagcca

SEQ ID NO: 39374 - DNA, 2556 bp, Homo sapiens
  misc_feature (1)...(2556): n = A,T,C or G
cccaagtgtgtgggggacatgggagggagatatcacagtatgtaccactctcaagtagccaccaatatgatggttttcttttcctcaggaagctcgagaatgatgagtaaaatctgagacttctggacaatacaggacacacacaaataatggaaaagacactcaaataaggtggaaactaagtaaacaattgaaacgtggagtcagatgccactgacagcctaagaaagccaagtagcccagcttccccatggggttgtcctcggctttggtgaggggaagaagcagggtctgtcctggacacttgttcctgggctcagggcccaagtgtttgatgcacagcttcccactctttcaatggaggtgcacctattgtctcctcagccaaagactcaggatcatgaataactcatagtaaactcactggggggttgtaggcatggattttttgtaaacaccataaaaggtccttgatccaaaaggctctgcactcagtgcattacatgtactttctattctccccaggccctaccccacccctacatcagcccattataattcttaaagattttgtgctcaagccaggggcccgagtgggggcatttaccctccatatagtgcaaacatacacaaagaacaattgaccaccatataacataacactttgtagggttttcaagcttacaaatatcagactaatttttttttttttttttctttttgagatggagtctcgctcctttgcccaggctggactgcagcggcgctatcttggctcactgcaagccccgcctcctgggttcaggccgttctcctgcctcagcctcccaagtagctgggactacaggcgcccgccactgcgcctggctaatttttttttttgtatttttagtagagacggggtttcaccatgttagccaggatggtctcgatctgctgaccttgtgatccacccacctcggcctcccaaagtgctgggattacaggcatgagccaccgcatccggcccagactaatgtttatctctgacccaaagggaaaaaaatacttcccaagccaagtagacctgacctgaaaacaccaccatctggccaagaaacagaacttttgggatgattggatccaagaaattgttgtgtggattatccagccttcttctccctggctgccactcttaggactaatcactgataggaggaaatgctgctaacacattgatatagtttggatatttttttaccctgcccaaatttcatgttgaaatgaaattcccaatgttggaggtgggggccgataggaggtgtgtgggtcacgggggtggatcctcatggattggtgctgttcttatgatagtgagtgtacannnnnnnnnnnnnnnnnnnnnnnnnnnnnnnnnnnnnnnnnnnnnnnnnnnnnnnnnnnnnnnnnnnnnnnnnnnnnnnnnnnnnnnnnnnnnnnnnnnnagcttacagtagactaacatctgtaaagttgaacataaacttgtcctaacaataatacccatcacttggacagtgctttgcaggtcacaaggcactttaatgctacttcatgtattccttttgacagyactgtaaggtcactggaacaactgttattatccccatttcagagataaggtaaaccacagctcagggtggctaaatatcacataacaggtaagttgcctagaagggacttgtacccaaggtatcaaaccccagatccgttaggtggccagcaggtaatgactaatggtgacaatacttcacgcagaggatggaccatcagcaaaacagactcatgaatttggccctgagtgcagcataagccacagcttacagggccttcccctgggtcagcatctgactatgggaaagccccaaaatttctagcttacattgcatgtggcagttagactctgggacgtgttttgacccatatcatgtttgaattcgtgagaggcaacctgcaataggttgtctttttagtgtaaatttctgatttgaggactagaggtattgagattgtgtagaattagaggagaggcctgcggtaagggagaacagcagctttctcatcatccaatctggaaaaccctgtgccctgggcaggccacttagacccacccaaaacctgtcccagggacttgccacaggaccgccagtcttggggaggcacacgtggtggcatgccaggagcaggggtttggggtcagaaagaactaagtttaagtcccagccccattacttgactgtggaacctcacagaggtatcttaacttctgagtctcagcttcctccttaaaaagtgaggaaaatctctacttttcagacttggtataaagctgatacaagatgacttatatgaaatcactggcccactggagatgcttaaatggctcctgttgtccttgacctttcacagcccccagatgaagatgacaagcaactcaccctacctcctccaagaggccctgccccatgctatcaccagcaggttctcaggtatgaccaacaagatgattgttttatagtgcccaacacagagaagcca

SEQ ID NO: 39375 - DNA, 2556 bp, Homo sapiens
  misc_feature (1)...(2556): n = A,T,C or G
cccaagtgtgtgggggacatgggagggagatatcacagtatgtaccactctcaagtagccaccaatatgatggttttcttttcctcaggaagctcgagaatgatgagtaaaatctgagacttctggacaatacaggacacacacaaataatggaaaagacactcaaataaggtggaaactaagtaaacaattgaaacgtggagtcagatgccactgacagcctaagaaagccaagtagcccagcttccccatggggttgtcctcggctttggtgaggggaagaagcagggtctgtcctggacacttgttcctgggctcagggcccaagtgtttgatgcacagcttcccactctttcaatggaggtgcacctattgtctcctcagccaaagactcaggatcatgaataactcatagtaaactcactggggggttgtaggcatggattttttgtaaacaccataaaaggtccttgatccaaaaggctctgcactcagtgcattacatgtactttctattctccccaggccctaccccacccctacatcagcccattataattcttaaagattttgtgctcaagccaggggcccgagtgggggcatttaccctccatatagtgcaaacatacacaaagaacaattgaccaccatataacataacactttgtagggttttcaagcttacaaatatcagactaatttttttttttttttttctttttgagatggagtctcgctcctttgcccaggctggactgcagcggcgctatcttggctcactgcaagccccgcctcctgggttcaggccgttctcctgcctcagcctcccaagtagctgggactacaggcgcccgccactgcgcctggctaatttttttttttgtatttttagtagagacggggtttcaccatgttagccaggatggtctcgatctgctgaccttgtgatccacccacctcggcctcccaaagtgctgggattacaggcatgagccaccgcatccggcccagactaatgtttatctctgacccaaagggaaaaaaatacttcccaagccaagtagacctgacctgaaaacaccaccatctggccaagaaacagaacttttgggatgattggatccaagaaattgttgtgtggattatccagccttcttctccctggctgccactcttaggactaatcactgataggaggaaatgctgctaacacattgatatagtttggatatttttttaccctgcccaaatttcatgttgaaatgaaattcccaatgttggaggtgggggccgataggaggtgtgtgggtcacgggggtggatcctcatggattggtgctgttcttatgatagtgagtgtacannnnnnnnnnnnnnnnnnnnnnnnnnnnnnnnnnnnnnnnnnnnnnnnnnnnnnnnnnnnnnnnnnnnnnnnnnnnnnnnnnnnnnnnnnnnnnnnnnnnagcttacagtagactaacatctgtaaagttgaacataaacttgtcctaacaataatacccatcacttggacagtgctttgcaggtcacaaggcactttaatgctacttcatgtattccttttgacagcactgtaaggtcactggaacaactgttattatccccatttcagagataaggtaaaccacagctcagggtggctaaatatcacataacaggtaagttgcctagaagggacttgtacccaaggtatcaaaccccagatccgttaggtggccagcaggtaatgactaatggtgacaatacttcaygcagaggatggaccatcagcaaaacagactcatgaatttggccctgagtgcagcataagccacagcttacagggccttcccctgggtcagcatctgactatgggaaagccccaaaatttctagcttacattgcatgtggcagttagactctgggacgtgttttgacccatatcatgtttgaattcgtgagaggcaacctgcaataggttgtctttttagtgtaaatttctgatttgaggactagaggtattgagattgtgtagaattagaggagaggcctgcggtaagggagaacagcagctttctcatcatccaatctggaaaaccctgtgccctgggcaggccacttagacccacccaaaacctgtcccagggacttgccacaggaccgccagtcttggggaggcacacgtggtggcatgccaggagcaggggtttggggtcagaaagaactaagtttaagtcccagccccattacttgactgtggaacctcacagaggtatcttaacttctgagtctcagcttcctccttaaaaagtgaggaaaatctctacttttcagacttggtataaagctgatacaagatgacttatatgaaatcactggcccactggagatgcttaaatggctcctgttgtccttgacctttcacagcccccagatgaagatgacaagcaactcaccctacctcctccaagaggccctgccccatgctatcaccagcaggttctcaggtatgaccaacaagatgattgttttatagtgcccaacacagagaagcca

SEQ ID NO: 39376 - DNA, 1322 bp, Homo sapiens
tgcatgacataatttttgttgactcttctactcccactaccctgtgaggaggcccaactttcctggacaacataaaggagcagggaaaacaatctcagcttctgtaattgctcctatccctggttatgaaagacatctacccccttttcctaggccagagtcccttgagaaagggatttggccaaggagaacaggtgacgcaatgtgatgatgccactatatgattaatggcacacatcatttttggccagagtttgtagaaacaaacaatagatctatattagtcccagttctttgggggcaagcaaggtcaagttaacccattatatataattaaaattctatcccttacgattttaccctttgtcttcagcayagattccttccacattcttcctgagactgtccccaagcgaacttggtcttgagtgactttaccttttttactgcttaatcgcatatggttattcttactcttatatcattgccataagaaggagataaaataagaaagttttgttgacaagccaatgcaatgtaaatctttactgaaattctatttgcgttatacctcctgccttggcttagctcatatttctggtcaaaataatgcaatgaagtcctcaattcccgttcccatacctcactttctacacacctgttttctctttgtctctgtaagttctggatgatcatattaatttgatttctcctgaaaaatcttgatgctgtttgtaccttccacaaagccattttctcctattctctccattcagcagtttgcattctgctgtctcactagtcctgtttggccatagaatgtcccatctgctttagagatgttcccagtgtactgcaatgatgtggcccttgttctcagagggtgaaaatctgcatgccgctgcatttaagaggaatataggaaagacgggagggacacacagacatttacacacatagcgctagaaaagggagggaaggaagcccagtgggccaggccttgagtcagatgtttgaacctctttgtctcacttgatcctcacaccaccttgtacagtgatacggattgttttccaaatttacaaatgaagcaatcaatgttcaccaagagttaaaaggaatgtctattaaaagttaaattattcatcttattccacatattgagttatgcaagaaaaatgatcttattttttttttattttactttaagttctgagatacatgtgcagaatgtgtagtttgttacacaggtatacatgtgccatggtggtttactgcacctatcaacctgtcttctaggttttaagccctgcatgcattag

SEQ ID NO: 39377 - DNA, 1322 bp, Homo sapiens
tgcatgacataatttttgttgactcttctactcccactaccctgtgaggaggcccaactttcctggacaacataaaggagcagggaaaacaatctcagcttctgtaattgctcctatccctggttatgaaagacatctacccccttttcctaggccagagtcccttgagaaagggatttggccaaggagaacaggtgacgcaatgtgatgatgccactatatgattaatggcacacatcatttttggccagagtttgtagaaacaaacaatagatctatattagtcccagttctttgggggcaagcaaggtcaagttaacccattatatataattaaaattctatcccttacgattttaccctttgtcttcagcacagattccttccacattcttcctgagactgtccccaagcgaacttggtcttgagtgactttaccttttttactgcttaatcgcatatggttattcttactcttatatcattgccataagaaggagataaaataagaaagttttgttgacaagccaatgcaatgtaaatctttactgaaattctatttgcgttatacctcctgccttggcttagctcatatttctggtcaaaataatgcaatgaagtcctcaattcccgttcccatacctcactttctacacacctgttttctctttgtctctgtaagttctggatgatcatattaatttgatttctcctgaaaaatcttgatgctgtttgtaccttccacaaagccattttctcctattctctccattcagcagtttgcattctgctgtctcactagtcctgtttggccatagaatgtcccatctgctttagagatgttcccagtgtactgcaatgatgtggcccttgttctcagagggtgaaaatctgcatgccgctgcatttaagaggaatataggaaagaygggagggacacacagacatttacacacatagcgctagaaaagggagggaaggaagcccagtgggccaggccttgagtcagatgtttgaacctctttgtctcacttgatcctcacaccaccttgtacagtgatacggattgttttccaaatttacaaatgaagcaatcaatgttcaccaagagttaaaaggaatgtctattaaaagttaaattattcatcttattccacatattgagttatgcaagaaaaatgatcttattttttttttattttactttaagttctgagatacatgtgcagaatgtgtagtttgttacacaggtatacatgtgccatggtggtttactgcacctatcaacctgtcttctaggttttaagccctgcatgcattag

SEQ ID NO: 39378 - DNA, 1322 bp, Homo sapiens
tgcatgacataatttttgttgactcttctactcccactaccctgtgaggaggcccaactttcctggacaacataaaggagcagggaaaacaatctcagcttctgtaattgctcctatccctggttatgaaagacatctacccccttttcctaggccagagtcccttgagaaagggatttggccaaggagaacaggtgacgcaatgtgatgatgccactatatgattaatggcacacatcatttttggccagagtttgtagaaacaaacaatagatctatattagtcccagttctttgggggcaagcaaggtcaagttaacccattatatataattaaaattctatcccttacgattttaccctttgtcttcagcacagattccttccacattcttcctgagactgtccccaagcgaacttggtcttgagtgactttaccttttttactgcttaatcgcatatggttattcttactcttatatcattgccataagaaggagataaaataagaaagttttgttgacaagccaatgcaatgtaaatctttactgaaattctatttgcgttatacctcctgccttggcttagctcatatttctggtcaaaataatgcaatgaagtcctcaattcccgttcccatacctcactttctacacacctgttttctctttgtctctgtaagttctggatgatcatattaatttgatttctcctgaaaaatcttgatgctgtttgtaccttccacaaagccattttctcctattctctccattcagcagtttgcattctgctgtctcactagtcctgtttggccatagaatgtcccatctgctttagagatgttcccagtgtactgcaatgatgtggcccttgttctcagagggtgaaaatctgcatgccgctgcatttaagaggaatataggaaagacgggagggacacacagacatttacacacatagcgctagaaaagggagggaaggaagcccagtgggccaggccttgagtcagatgtttgamcctctttgtctcacttgatcctcacaccaccttgtacagtgatacggattgttttccaaatttacaaatgaagcaatcaatgttcaccaagagttaaaaggaatgtctattaaaagttaaattattcatcttattccacatattgagttatgcaagaaaaatgatcttattttttttttattttactttaagttctgagatacatgtgcagaatgtgtagtttgttacacaggtatacatgtgccatggtggtttactgcacctatcaacctgtcttctaggttttaagccctgcatgcattag

SEQ ID NO: 39379 - DNA, 597 bp, Homo sapiens
aggcctcagcactggaaaaaaaaaaaaaaagtataggatggtaggtattaaacagggccattgaatgaaacagttttcaaaatgaaaatgaggtacatttttagaattggtgaattgaaatatatatttgaggacgttgcacaaaatgcagttctgaagctgatgaagagacaygaaggatagagtgaaaagttccaacatgaatcttactgtaggaccttaaagacagaagagagctagtgggggatagactgggaatttgtaaagtgacataagactttcttttaaagagtataataaaaataattccccatctagactcatcatagtaaagctgcagctcaccaaaggtagacagaaaagttaaaaatcatcatcataaattataataaatgaaaagagacatggtaaatagaaaatgaaataaatttaactatactagtaatcccaataaaggtgaacaaatgtatttactaaaagatatttaaatgtgtccatttaaacagcatatacatatatatatacatttttaaaagtttaaaaagtaaagggataaaaagatgggaaaaaattctggcaaacacagaacataataaa

SEQ ID NO: 39380 - DNA, 597 bp, Homo sapiens
aggcctcagcactggaaaaaaaaaaaaaaagtataggatggtaggtattaaacagggccattgaatgaaacagttttcaaaatgaaaatgaggtacatttttagaattggtgaattgaaatatatatttgaggacgttgcacaaaatgcagttctgaagctgatgaagagacatgaaggatagagtgaaaagttccaacatgaatcttactgtaggaccttaaagacagaagagagctagtgggggatagactgrgaatttgtaaagtgacataagactttcttttaaagagtataataaaaataattccccatctagactcatcatagtaaagctgcagctcaccaaaggtagacagaaaagttaaaaatcatcatcataaattataataaatgaaaagagacatggtaaatagaaaatgaaataaatttaactatactagtaatcccaataaaggtgaacaaatgtatttactaaaagatatttaaatgtgtccatttaaacagcatatacatatatatatacatttttaaaagtttaaaaagtaaagggataaaaagatgggaaaaaattctggcaaacacagaacataataaa

SEQ ID NO: 39381 - DNA, 556 bp, Homo sapiens
tttttgtgtatttttttagtagagayggggtttcactgtgttagccaggatggcctcgatctcctgacctcgtgatctgcctgccttggcctccgaaagtgctgggtttataggcatgagccactgtacttggccatatgtatatatgtttgatacatacacatacacacacatattattggttatatttctctggagaatcttgactaatacaggagtaatgatgtctaagctctttacatattggagataaaattggaagttctgattatatattaaattatttactgagaattaaaaataaaaagacactgcaactgtccccaaatagatgtgtctcttttctccctgctgtatgagaaactccaacattttagaaattttgtttatactttttgatgattttgtgaattacatatataatattattaaatttttggaatatgaatctacttgtccaattttattacattgtattaagctttatcacaactatttagttttaactctacattatatagacagttaaactgttcatgtttaatttttttctacc

SEQ ID NO: 39382 - DNA, 556 bp, Homo sapiens
tttttgtgtatttttttagtagagacggggtttcactgtgttagccaggatggcctcgatctcctgacctcgtgatctgcctgccttggcctccgaaagtgctgggtttataggcatgagccactgtacttggccatatgtatatatgtttgatacatacacatacacacacatattattggttatatttctctggagaatcttgactaatacaggagtaatgatgtctaagctctttacatattggagataaaattggaagttctgattatatattaaattatttactgagaattaaaaataaaaagacactgcaactgtccccaaatagatgtgtctcttttctccctgctgtatgagaaactccaacattttagaaattttgtttatactttttgatgattttgtgaattacatatataatattattaaatttttggaatatgaatctacttgtccaattttattacattgtattaagctttatcacaactatttagttttaactctacattatatagacagttaaaytgttcatgtttaatttttttctacc

SEQ ID NO: 39383 - DNA, 599 bp, Homo sapiens
tttagatttttctacctagaaaaatcatatcatctgtgaataaagacagttttatttcattcttcccagaatcatgtcctttttatgcccttttaatcatgtcttgttgcaatggttaggacttccaatatgatattgaataggagctataaaagagaatatcttgtatttgttctcatggtatgggaagaacatttaatttttcaccattaaaattgatgttagctgatgtttattcttattctctctctctccccaactttaatttttgtaaatgtttcttatcaggctaactaatttcattcttaagttaccgaggtttttttttttttaaaggatgtggattttatcaaatacttttcctgtaattattgagatagtcatatagattttctctttcatctgttaaaatgatgaatacattgattttcaaattttgaggactactttaatttagttcctgtattcgaggtgtcctggatcttacagtaagtataagtttgagtaagttacagtaagtgtaagtgttaagcattcaggaycagccaatggttagagcttctcacggaaaacttccctgtgttctatggagctatgtc

SEQ ID NO: 39384 - DNA, 745 bp, Homo sapiens
tgacctgccccctccaaagttatatccatggctagtgttgcaagccagtttggtttttctctcggctattgtgacccctgttcaaatactccagaccttgtagactggggaagaaggaatctgtgggtttattctggtcttgtgtcatacttcagacatccrgcaacttgtggagaaaagtgggaaataagaatggaagagttgcaaccaagaggtcaccttctctgctcaagggtctcttttccacatttgacatggcagctgtagtctttacccagcccaactggtgggtaaagactttacagggcccctctaactgtgcaatagggactcctattgcaaatgaaaattgagtaagcatcactttgggtttccagttagatatgtactgtgctgcccggcatatctcccaggcatatctcccaggtctgatgagactgagaggaagttcccaattgacccacagcctacacttatttaagattttgcctgtctaattagggaaggctggtggagtttcaccacagagcctctgaggcaaaccatgacttttcatgcaggcagtacatcatcaggatagtcctcatctttgattcagtttcatttgcagaaatatccaaaagtttcaggtgtgaatctagagtatctactatccagcaaataatatagtttgtcctcttttttttttttaattccgctttaataggaatcaagaaaagttgtctagaagagttagatacattta

SEQ ID NO: 39385 - DNA, 553 bp, Homo sapiens
agattgggtgcagtggttcacacctgtaatcccagaactttgggaggccgaggcaggcagatcacctgaggcaaagagttcaagaccagcctggctaacatggtgaaaccccatctctactaaaaatacaaaaattaaccgggtgtaatggcgcatgcctatagtcccagctagagttcaagaatcacttgaatccaggaggcagagattgcagtkatccaagattgccccactgcactctagcctgggcgacagagggagactctgtctcaaacaaacaaacaaacaaacaacaacaacagaaagacttccaagagattgtaaacaaacatgtaaagtagaaaattagaccaatgagaattcttgaagtatattttgaagagttaaaaaagcccaaaaaacaaaaaggagaaaataaatgatttaaatgtctatttttaaatgtaagacaaaggcaataaagctgttcctgtaaccaaatttctgtttagtagctctgtattgttaccacaacataccaatgagaactctggttccacggaggaaaaccttt

SEQ ID NO: 39386 - DNA, 1126 bp, Homo sapiens
gtagcagtgctcagctgtaatcttttagaagtgacagtattatacttatattagaattttaactgaagaaaaccaatggaaattataaattataatacaattctaattttcctttcctcatttgttgtttttcagattcttgtgccatattatttcctgtcactgatagaaagtttaacattatatacttattgtttctatcaaaatttgattcaattaaaaaawtttttttttctatgactgagtgtgatagacagaataatggcctgcaaaataagtttatgtcctaatcctggagcctgtgagtctgttaccttagatggcaaaggcaccttgcaaatgtgattaagatcttgatgggagattatcttggattacgtgggtgggcccaatgtaatcacaagggtttttatgaaagggaagcaggtagctcagagtgagagcgagtcagagaaggagatgtgatgttggaagcagaggtcagaatgatgccattgctagaaggagccatgaaccaaagcacccaagcaggctctagaagctggagaagcgaggaacagattctccctgaaatcctccaggaggagcacagccctgctgataccttgactttagccctgtaagacccatttttggacttctctagaattatgagataatacactggtgatgttttaagccactaagtttgtgataatttgttaaagcagcaataggaagctaaaatgctggaagtttcagtaaaaaacacaacatgattttcattcttttaacctaaaacttagtgacaggtcctgtccagggagcattgtcactttaagaagctatgatagtctcaccaaagcagctgggggtttgctaacccaaaagccacaaagactgactcattgtcttgtgggtttgatcttgggtccctctctccctgccttctttacttccctccatgttctctggccaccatgcctggtcactgacctatacccagggttatgatctagtttctcactatgatttagttaatgagccttagaatcctcagcttctcctctacctggtttgaagtgatgcacatgccagtcctttttggcttaccctgcctggccaatgtgataagatgtctgactta

SEQ ID NO: 39387 - DNA, 1126 bp, Homo sapiens
gtagcagtgctcagctgtaatcttttagaagtgacagtattatacttatattagaattttaactgaagaaaaccaatggaaattataaattataatacaattctaattttcctttcctcatttgttgtttttcagattcttgtgccatattatttcctgtcactgatagaaagtttaacattatatacttattgtttctatcaaaatttgattcaattaaaaaattttttttttctatgactgagtgtgatagacagaataatggcctgcaaaataagtttatgtcctaatcctggagcctgtgagtctgttaccttagatggcaaaggyaccttgcaaatgtgattaagatcttgatgggagattatcttggattacgtgggtgggcccaatgtaatcacaagggtttttatgaaagggaagcaggtagctcagagtgagagcgagtcagagaaggagatgtgatgttggaagcagaggtcagaatgatgccattgctagaaggagccatgaaccaaagcacccaagcaggctctagaagctggagaagcgaggaacagattctccctgaaatcctccaggaggagcacagccctgctgataccttgactttagccctgtaagacccatttttggacttctctagaattatgagataatacactggtgatgttttaagccactaagtttgtgataatttgttaaagcagcaataggaagctaaaatgctggaagtttcagtaaaaaacacaacatgattttcattcttttaacctaaaacttagtgacaggtcctgtccagggagcattgtcactttaagaagctatgatagtctcaccaaagcagctgggggtttgctaacccaaaagccacaaagactgactcattgtcttgtgggtttgatcttgggtccctctctccctgccttctttacttccctccatgttctctggccaccatgcctggtcactgacctatacccagggttatgatctagtttctcactatgatttagttaatgagccttagaatcctcagcttctcctctacctggtttgaagtgatgcacatgccagtcctttttggcttaccctgcctggccaatgtgataagatgtctgactta

SEQ ID NO: 39388 - DNA, 1126 bp, Homo sapiens
gtagcagtgctcagctgtaatcttttagaagtgacagtattatacttatattagaattttaactgaagaaaaccaatggaaattataaattataatacaattctaattttcctttcctcatttgttgtttttcagattcttgtgccatattatttcctgtcactgatagaaagtttaacattatatacttattgtttctatcaaaatttgattcaattaaaaaattttttttttctatgactgagtgtgatagacagaataatggcctgcaaaataagtttatgtcctaatcctggagcctgtgagtctgttaccttagatggcaaaggcaccttgcaaatgtgattaagatcttgatgggagattatcttggattacstgggtgggcccaatgtaatcacaagggtttttatgaaagggaagcaggtagctcagagtgagagcgagtcagagaaggagatgtgatgttggaagcagaggtcagaatgatgccattgctagaaggagccatgaaccaaagcacccaagcaggctctagaagctggagaagcgaggaacagattctccctgaaatcctccaggaggagcacagccctgctgataccttgactttagccctgtaagacccatttttggacttctctagaattatgagataatacactggtgatgttttaagccactaagtttgtgataatttgttaaagcagcaataggaagctaaaatgctggaagtttcagtaaaaaacacaacatgattttcattcttttaacctaaaacttagtgacaggtcctgtccagggagcattgtcactttaagaagctatgatagtctcaccaaagcagctgggggtttgctaacccaaaagccacaaagactgactcattgtcttgtgggtttgatcttgggtccctctctccctgccttctttacttccctccatgttctctggccaccatgcctggtcactgacctatacccagggttatgatctagtttctcactatgatttagttaatgagccttagaatcctcagcttctcctctacctggtttgaagtgatgcacatgccagtcctttttggcttaccctgcctggccaatgtgataagatgtctgactta

SEQ ID NO: 39389 - DNA, 728 bp, Homo sapiens
ttcaaagttccacaattccctttatcttctctctcaaccactgtgtgtattaacaacagttccacaaatcttcctttggcatttgggttttcacagaggatgcttacaaaaattcttaagtgaaactgaagcactcacacaaagtaaaacaagaaaatttagacgatttgaaaacagattatttttaagggaagggtccactgctatataggtattgcctgggaagctgcctgcagagcttgtctctctatatcattcctatcttttctttaataacttatctttcttctactgtaaatctgtaatgatttaagagttctacattttcctgcaatagcctccataataacagtaacccctcctgtggggaaaggatctgagaaagtatgttttgctgttttgttattttatttggcagaggggtgacatatgacaagtcaagaattctcagtaggagctcaggagtgtggatggacctatttcttcyccaatgaggggggataagcaattatgggcttcatttagcccagggtaagtgaataagtgataaagaataagtgacgatacaaaacatgcttgagatttcctacataataaggtatcggtgacgattaattttctgaattccatgtgtaataaactactttgatctgagatgtaaatcaaattaagacctcaaaattatttaaaagatcacattacattttattcaaacattcagaagcatg

SEQ ID NO: 39390 - DNA, 1315 bp, Homo sapiens
tttttcacattttttctttttatttatttttaatttttaatgtattttactttgtaggatgtgttttcctttttattttttaaggtatgtgtgccatttctttctgatattttataattagaagttgaaacagctttacagttgacatccatatactcaccccaaaggtatattatgctgcatttgctttatcacatatctattcatttatccttccctctatccatgcctcaatattattaatgcatttaaaaataatttatagacaaaagaacatttctttctcaaatacattcccaggtttaggtttttttttttacaagttttcttttttcttttcttttcttcttttctttcgagataggatcttactctgttgctcgggctagagtgcagtgcagtggcgtgatcacagctcactgcaaccttgaactcctgggctcaagtgattctcttgccttagtctcttgaatagttaggactacaagtgtgtgccaccatgcttggctcatttgaaaatgtatatatatagagagatgggtcttgccatgttgcccaggctaatcttgaactcctggcctcatgggatcctccaaccttgggctcccaaagtaatgggattatagggataagccaccatgcctggccctgattttatttcttgaggtcaagtttaaatacagttaaatgcaaaaaccctatttgtatgtttaagttaattttggcaagcccatccacttatgtaagtcaaatcctttttaagatatggatcattaccgttatccagaaagttctcccataccacttctcagacagtcccaacccacacctccaaaggcaagtcctgttctgattttcttccataaagtagttatgctttttctataacttcatataaatggaatcatattgcatgtatgtgtgtctgtgtgtgtatstgtgacttcttttgcttggaataacatttttgagatcggtattgttccctgtttcagtagttctctctttttaatactttgtagtgtaacttaatataatgtcatattgttgcttgatgccctactatatggtcaattttcttaaatgttgttagtgttcctgagaagattggatgttctcttttcgttggttttatgtttctctgtcctttcaatcaacctgttaatatgctatttgtttcttcttaattcatttaaaaatctattgtttaatatttacactgtcattcttcatattttaaagttatttttaaatttaaatataacaaaattgatttttttttgtggcatataacttcatgggttttgacagatgc

SEQ ID NO: 39391 - DNA, 674 bp, Homo sapiens
tcggagtagactatgtaaggatcctaggatattcatatatttgactttaatagattggatcagacagttttccaagtggtaccaatttacactctcactaaattatacttaactcccatataagagtttttgtcaccccacattattactaacatgatattgtcmatctttttaattttacagtatttcattgtggttttaacttgcatttccctgatgaccaatgaggatgcggtcaaatatctttagtttgattggatatggtattagtcatttataaattgtttaaaaaaacatttatttcttgttcacttacaatggtggtagctgttatggagctacacttgttattctgagaatcaggctgaaagagtacctcctatttgagatatgctcttatttcagagggaaagagaaaaaactggcagaaatgactgatttttgaagttactgtttggattaagtataggtcatgtccattcatgttccatttgccaaaggatattacaaaactgtgttgtcaatggggggagggagttatactcttcccactggaggcattgcaagtcacatggccatggatggggatgaataattcttgttcaggaaaaggagagggtacaaatactctggaacagtgacatagtccaccactttgtgagatggctgttaaa

SEQ ID NO: 39392 - DNA, 674 bp, Homo sapiens
tcggagtagactatgtaaggatcctaggatattcatatatttgactttaatagattggatcagacagttttccaagtggtaccaatttacactctcactaaattatacttaactcccatataagagtttttgtcaccccacattattactaacatgatattgtccatctttttaattttrcagtatttcattgtggttttaacttgcatttccctgatgaccaatgaggatgcggtcaaatatctttagtttgattggatatggtattagtcatttataaattgtttaaaaaaacatttatttcttgttcacttacaatggtggtagctgttatggagctacacttgttattctgagaatcaggctgaaagagtacctcctatttgagatatgctcttatttcagagggaaagagaaaaaactggcagaaatgactgatttttgaagttactgtttggattaagtataggtcatgtccattcatgttccatttgccaaaggatattacaaaactgtgttgtcaatggggggagggagttatactcttcccactggaggcattgcaagtcacatggccatggatggggatgaataattcttgttcaggaaaaggagagggtacaaatactctggaacagtgacatagtccaccactttgtgagatggctgttaaa

SEQ ID NO: 39393 - DNA, 674 bp, Homo sapiens
tcggagtagactatgtaaggatcctaggatattcatatatttgactttaatagattggatcagacagttttccaagtggtaccaatttacactctcactaaattatacttaactcccatataagagtttttgtcaccccacattattactaacatgatattgtccatctttttaattttacagtatttcattgtggttttaacttgcatttccctgatgaccaatgaggatgcggtcaaatatctttagtttgattggatatggtattagtcatttataarttgtttaaaaaaacatttatttcttgttcacttacaatggtggtagctgttatggagctacacttgttattctgagaatcaggctgaaagagtacctcctatttgagatatgctcttatttcagagggaaagagaaaaaactggcagaaatgactgatttttgaagttactgtttggattaagtataggtcatgtccattcatgttccatttgccaaaggatattacaaaactgtgttgtcaatggggggagggagttatactcttcccactggaggcattgcaagtcacatggccatggatggggatgaataattcttgttcaggaaaaggagagggtacaaatactctggaacagtgacatagtccaccactttgtgagatggctgttaaa

SEQ ID NO: 39394 - DNA, 1343 bp, Homo sapiens
attagtaaattgactactgtattttataaaacctcaacattagcttattatttctcattaaaagcaatacctttctgtggcgaatttggcccatctctgtctctgtccattgtcttgaagtcttggtgttactgtttatctgtgtctcttgtctttgtgcatatgtgagttgcctctattttgcatagstggtagcaggaatgagtgtgatatgtagcttatgattgtctttaacctcaccattgcaagtccaaaatattgttatgaacagaatgcaaataaagtcttaaagttatgaggtgatatggtattgataattgactttaatttaaagagactggtaaaggataggtatgtgcttttctaattgagagtccagaaggtagatatatggttagagaatctcaagggagaaactaggcagctcttctctgccttcccaaagtttagatcaagagttcgtattaaatacatatgtgatgatattaagacattaataacttttggggtgtgtgtgataatgatattattatttatttagttatttattgagacagggtcttgctctgtcacccaggctgaagtgcagtggtgcaattatagctcactgtagcctggaactcttgggcttaaatgatcttcccacctcagccaactgtgtagctgaaactacaggcatatgccactgtacccagttaatttttttttgtagagacaaggtcttgccttgttgcccaggctggtctcaaactcctggctttaagccatcctcccaaagtgctgggattataggcatgagccacagtgcccagccttatggtcatgtttcagagaaaaagttattattttttagagatatattttgaaatatttacaaatgaaaaatgtttggcacttgtttcaaaatgatctgagagtaagttaagtggatgggtggtatagatgaaataagattggccacaggttgataattgttgaagttgaatgataaataaagggagttgatttagctcttctgtctactcttgtatgtttgaaattttttacaataaaatgttaaaatcctatgttattatttttgagtgccaaaagggtaaaatgtttttcccctcttaaaagacaactttcaacattcttttgaatacagaaaaccaagtgaacgtctcttttccagtagtcagtgatcctcaaggactagctcctttaacttacttacagagggtagtgtttacaaagaagccagactggccaattaagttctatgattcccaggagatgtagcgaaagcagtgattatgagagccaaaattgggaagtccaggttgagaagagaaaccctaaga

SEQ ID NO: 39395 - DNA, 556 bp, Homo sapiens
cctgacctcgtgatctgcccacctaggcctcctaaagcgctgggattacaggcgtgagccactgtgcctggccaacaagtttttgtttttttagggtctgttgctgaggctggattcgaactcttgggctcaagggaccctctggtgcaacctcctgaatagctagaactacgggtgtatgctgccatgcctggctaacataaaagtattttatatccgctttggatagttcacacaaagagttctggctggaaagccaaatagagatattttaaatgccacttgttaaccattttcacttcctcaataattgcaactccttgctggtagctggcctatttgaaagggtacctcagatgcagagaatgatttttgaacaaaatggtaaatggcagtatcacatgtcaatttatgtatttatgtatgtatgtatttattttttgagacagggtcttgctctgtcatccaggctggagtgtaatggcatgattgtggctcactgcagccttgactttctaggctcaggtgatccttccaccttagcyccgtgaatagc

SEQ ID NO: 39396 - DNA, 719 bp, Homo sapiens
tggaaactctgcctcaccacaggactgaccatgagtagctcacttcaatggattggtatttcacaacttagcctggacatcggtcaagttggtaagccctgcttctggctatggctgacccaacttcaggacctggagcaccttaactttttgtgaatctaaagaaagaaaagcacacacacgtcatcatatcttcactttcagggtgttcacaatccccttgtggccagaccatggtcccaagattaagacctcttggcccacatgaccccttgtttgcctctcgacagkagaatctgctgcctgtgaccatctctggcacagcattagcctccaatcgcccctctcccggacactgagtccacatcagcactatggataaatctgcctccaaaaaaggaatgagaggagaagacatatagggaaggaatcaaaaagaaaaggaaagaaaaactatgatgtgaacccaaagatgtgtaacttgaagcattcttgcagccatccaaatattgccctgaaacgcaatcttatccacattcttaagttaatgatgatacacacagacctctgtcagcatgaaaatgtttatcaattatgtctgatcaccttttccctcattacagctccacttatttatggtatttctccaagtgtgagacatactaatgtatatgaattgacttgaagtggtacatgaacacacagttttcataaatatg

SEQ ID NO: 39397 - DNA, 730 bp, Homo sapiens
aaatctttagaggcaaagaaaatttaaaaactgtagtagagatctgtacatcaacctaaaagaaaaatatcttaacacttttttggtgtttttttttgtgggattttaaaacggtaaatagaggccaggcgcagtgctcacacctgtcattccaacactgtgggaggccaagacaggggaatcacttgaggctaagagttcgtgatcatcctgagcaacacaatgagaccccatctctacaaaaaaacaaaaaatattagtcaggcatggtggtgcacctatagacccagctatttaggaggctgaggatggaggatcacttgaactctgaggttcaagsctgctgtgagctgtgattgcgccgctacactccaacttgggtgacagagtaagaccctgtctctaaaaaaaaaaaatggaaaatagaaatttagcattaattaaaggacccaaatgggtgagtgtaacattcacttagtcaacaaatatttactgagcacctactatgttttaagtactttgcttggtcctaggcatagagagaaaaaataaaactcagtttctacccttagattgcgcatactctagtaaagaagctacatctgtatatgcaaatgtaatagactgtgacaacagtgcaatgataaaagtgatgattaccacaggagcacatagggagggggattggcccattctacaccataggtgaaggcgatagtcaaagaaagct

SEQ ID NO: 39398 - DNA, 618 bp, Homo sapiens
attatgattgaaacaatataaaatgcttaaaaattgtcccaaaatgtgatctaaatctaaaaaataaaagttttaaaaaattaaattctcacaaactgcttttaccaaaggttattttgtgattttagattttttagggattcttacattacacagtaccaaaaatgtaagaattgtgtgacaacattatatgatgattaatggctcatagtttagaatcaaagcaaaacaggctgacatctcacaattatctcttgctacttccatgatttaagtacttagcctcttacaattacttctaaatctagagaatacctacctcataggatagtttttaggtagaaatgaaacatcagtggtaaaacaccacagtgccaagtactctttaaatgctagacaaacattagctaaaatattttacaatgaatctataccctccttcaacttattcgttgttgcttttagaaccagaattctactctgtatgtcttaaagtgttaatattttgtcataytaaaatttcatatattttatctttcatagcagagattaacaaaactaaattatttatgtaaccattaagatgtatatacaaaacacatcattaatactggttat

SEQ ID NO: 39399 - DNA, 548 bp, Homo sapiens
tcttttattagctgctataaagaagcaatctgtcatgtagtatgctgccacatgaaggagagacctccaaccaacagccagcaagaaactaaagccctcactcaagtagcccacaagaagccgaatgctgtctataaccacatgagtttggaagcagatccttttcccaatcaagccacagatgagaccaaaactccagtcaacacttgrcttacagctttgtcaacctggatacaaaaaatgtatctaaattgtgcccagacttgtgacccagaacaactgtgagataaatatgtgttgtttaggacattaagtttgtagtaatattgctttgcagcactggaaagctaatactgcctgttacgaatttcagcttggctactaagtaccatgacttttatgatgtaattgtgtccctatataaggtatatatgaattctaaccgcatttgctgcatagaataaatgaggctaggcatatataattttcttacacattgcatggaaaatggtagatgctaaataaatgttaacaaatttttcacttta

SEQ ID NO: 39400 - DNA, 578 bp, Homo sapiens
ctgcaatttagtgtcatgtaacagtgaacttcaaagaaaagtatttgatcataagattattttatcttaatttgtacacataaaaatttctttttttctgatgatatttctatttgggaactgaatcaggaagtagatttaacataaaatttcaatgtggaaactaataaataaaattactaatttccccrtctcagttctaacctttgctgactaaactatattataggttgacaaaatattctatttgtttagtcatttgaaaaatagcttgactgcttagttgtggcagttgaggaacacaactataaatcctagcataatactcactcctctaaattagaaagacaaaaaaattattttataaatctataaagataaatataaggcttagtcataacatatactaaaactattttctaatggcatttgaattatatctttttttagcttggttcagtaaaggcaaataataattaaagtgtatttttcttagactttttatcatataaaaacacaaggtattatgataatagttatttttctttatattttataaacttctttatgttagatca

SEQ ID NO: 39401 - DNA, 524 bp, Homo sapiens
tgcaagagtcaccaagtggcacttggaacaagttcttctgcctggaggccagcccaagaaataaagggatctgccattatcttctctgcagcaatcagcaggggagaacagccatctcacagaggaaaggaagtccacaagaagcagagtctcccttcctagggaagtctgctcaggtgggaccacagggaagctcttgctcagccagcatggctcagcggcagggggcatggacagcctgctttcacctctccacccctcccagtccctttcctgattctgtctgcctccagtcctctgcctccaggccagctggtattcaacagcctccacctccctgacttmactcattcactcaggtatttagagagctgaacaagacgtagcccctgcactcaaggagttcatggtctaatggaagcaacaggtacataagaagtaacactgatatagattgattacagccatgggggcagacttctggagaagagtggttcaggctaacggagcagcataattaacca

SEQ ID NO: 39402 - DNA, 1115 bp, Homo sapiens
tggaaatatgtcgggttgcaatgaattgaatagttttgacattgttatgtcaactgacattgaatggtgccctctcactggactgatggggaaactgaggcccagagctggaaagtcaattgcacacagtggctgcaggagtcagcagcagatgcggaactgagctcagtattccctcacatctgctccagcgccctgcagcccttgcacatggatctgggcctcagaaaaaagctctccctctccatcctgccttaatccactcaactaggttgtgcacagcccagtcaagagggggaaatgtccacattaccaaaatcatacgaaagaaattatggatggaaaaatcattaccttataaatcggccgagctgttcagaacttgtaggaaacggcatataaaactcatatggcacgttagggctttgatagcgcctcattacagccctcagactccagtgaaaaatgtcctcacccagagggggctaattttcctttattaatgacatggggcggggctgacgccataaattccagctacctgagagccctgagcttgagacaaactcttctaagagacgtctctctccaggctaggctgctccaccccgttttactctgctgtatgcaaaggaagcaagactagagaagacagcctcccctgactcaaggaccccagcccctagactagagaaacacatggagagacagcaagatctttcttttcyctatgagggccaaacccaaaatgttaagtaattcaggcacttaatagaaagtagagggctgagaaaagggggatacacatattacccccaattttaggtgtgatttctataatggaagttgtgtgcattctaccatctacattcctcacagccagtctgtgaccagggtgaggggtcagctatgaccaggatcagggctctggctgtgaccaagattacggctcaggctgtaaccaggatcagggctcaggctatcctgagtgggcagaactagaccctgctcacaggcccacaggggatttaagaatgtagtcacagtcatcatatcagaaaacactcaaccaaacctggaccctaaaagcaaacgtggcttccagcccatggttt

SEQ ID NO: 39403 - DNA, 1299 bp, Homo sapiens
ttcaatgaacattcataggtgctctccaccctaagggcacattgcatggacactgcagagctagagctgagccttgacccttggtctcccacactccagcttgtgcccttccctccaggccaagccacctccccatcttggtgccccagtgcctgacttgggatttggcctggaccaaggggtgagtgagtgctgcctggcaccactaagaaggaagtgcagacgggagggagggaatgaatgatcaaaacaggtgggccyctgcccactctccgcctcctctggctcatgtcttctatatcagtggtccccaaccttttggcacctgggaccgatttcatggaagacaatttctccacagactcgggggttgggagatggtttagggattaaattgttccacttcagatcatcagaccttagattctcataaggagcacacaacctagatcacttgcatgcacagttcacaacagggttcatgctcctctgagaatctaatgccaccgctgatctgacaggaggcggagctcaggtggtaatgctcgctcacctgctcacctcctgctgtgtggcctggttcctaacaggctatggactggtaccagtccacagaccaggtggtggagacccctgttctatatgaatgttctacctgagaaggagggcagagtctgggctcactgaggactgactggtgacaggccccattctccttgtttcaggctgtcttggactctgctgcacactcatgactctccttcttcccaccccatgctccatggcccaccccagcccttcagaactaaagcagctcatcagcacataaaatataacaaattataaataatcaaaatgggaaaccagccttttaaatatcaaggcctcttgggataataactatgtcccccaacctaaggagagtcacaagaatgtatgtgaacctgcggggtggtgtgtgtagtcacagagtgggacatgggtgaggaaaaagagggaggaagggagggagagagggaaagagattgatttttgacattatgctcagtaagaaatttagatcttcttttgagttatactggagctgaagaaatgtcagagagttttgtagagtcagaagtttctgctccaagtccttctctgtcatttgctcggacaagtgatattcagtgtcccaagccacaatgggagtgacaatccccacttcccagggccactgtgagaattagttgagtgtgtgtgtacatatcccacagaggctgacctactaagtactagacatgagcaaatcgcaccaca

SEQ ID NO: 39404 - DNA, 1299 bp, Homo sapiens
ttcaatgaacattcataggtgctctccaccctaagggcacattgcatggacactgcagagctagagctgagccttgacccttggtctcccacactccagcttgtgcccttccctccaggccaagccacctccccatcttggtgccccagtgcctgacttgggatttggcctggaccaaggggtgagtgagtgctgcctggcaccactaagaaggaagtgcagacgggagggagggaatgaatgatcaaaacaggtgggcccctgcccactctccgcctcctctggctcatgtcttctatatcagtggtccccaaccttttggcacctgggaccgatttcatggaagacaatttctccacagactcgggggttgggagatggtttagggattaaattgttccacttcagatcatcagaccttagattctcataaggagcacacaacctagatcacttgcatgcacagttcacaacagggttcatgctcctctgagaatctaatgccaccgctgatctgacaggaggcggagctcaggtggtaatgctcgctcacctgctcacctcctgctgtgtggcctggttcctaacaggctatggactggtaccagtccacagaccaggtggtggagacccctgttctatatgaatgttctacctgagaaggagggcagagtctgggctcactgaggactgactggtgacaggccccattctccttgtttcaggctgtcttggactctgctgcacactcatgactctccttcttcccaccccatgctccatggcccaccccagcccttcagaactaaagcagctcatcagcacataaaatataacaaattataaataatcaaaatgggaaaccagccttttaaatatcaaggcctcttgggataataactatgtcccccaacctaaggagagtcacaagaatgtatgtgaacctgcrgggtggtgtgtgtagtcacagagtgggacatgggtgaggaaaaagagggaggaagggagggagagagggaaagagattgatttttgacattatgctcagtaagaaatttagatcttcttttgagttatactggagctgaagaaatgtcagagagttttgtagagtcagaagtttctgctccaagtccttctctgtcatttgctcggacaagtgatattcagtgtcccaagccacaatgggagtgacaatccccacttcccagggccactgtgagaattagttgagtgtgtgtgtacatatcccacagaggctgacctactaagtactagacatgagcaaatcgcaccaca

SEQ ID NO: 39405 - DNA, 531 bp, Homo sapiens
  misc_feature (1)...(531): n = A,T,C or G
ccccagatccactcaggggcccctgtttgaagctctcctacaccctggactctttattcagagtacttataatggtttgtctttatatacttatgaggttaatcatttgttccatgacagggagtatgtgaagtttgtcacaagtatttcattcaaatcctgccaactctgtgaggtggttctcaattttatccctattttrctggtgagacaaaggaggcacagagaggttaagtgactttcctgaggtcacacagcaagtaagtggtggatgaatgaaaatagtctagcaattttagccatgtgccaaacagtcatctaccgacttctctgcagatgtaacgagagtgggggctatgtcagctttactcattctcgtttcccagtacctagtccaggacctgccatttgtagcctctcactaaagggnnnnnnnnnnnnnnnnnnnnnnnnnnnnnnnnnnnnnnnnnnnnnnnnnnnnnnnnnnnnnnnnnnnnnnnnnnnnnnnnnnnnnnnnnnnnnnnnnnnngg

SEQ ID NO: 39406 - DNA, 442 bp, Homo sapiens
gatttattactcccacaaactctttttatcccactccttctcagagactttgatagatctttatcttgataaatgatgaggcctgggccccgcaggcagagagagaggtgagtggtaagatgtgagcctggaaaggaaaaggaaaaggaaaacgtactagaggctgtcagccattgatgtgcaggagaagctgtcactcagagctcctccacagccagctgagaatagctgaataggaggttttttgacagtttcagcaatggtccaacaacttgccaggtgaccgcagtagcactgccttcggtccttgagcctgytgggagatggcctttgcagccaagcaaactgtggcctctgttcacctttatgttttggagttgaccatcataaaggcactttctgcatccaagtgggcagtcttggtgcattgcaaggattttcc

SEQ ID NO: 39407 - DNA, 772 bp, Homo sapiens
tccttacagttttttctaatcatttgaaggcacagggggtgatggtgtgggttttgagaaattacagccatgttccggaaggaattaggaaaaaggaaagggaaggtttaggaagaacatgaccttatttgctcaagtcttttctactttgtgaatttatgggggaaattctgtgtcctatggagtacattcttaggtcactgaagggaacacttttccattctgttccttwaagtgggaacaaagaaagaggcttgggataggtaatttattatgactatcttcaccctttctctagtgttaggtatgtcgcagtgatgtcatcctctggactgtgaatgacaaattgatgatgtcactgaggccccatctcccctgtataaacagtgtggtacggattataacagacaattaatctcaccggtcactcataaattgtgccaattcttttttatcttctctgggcctcagtttcttcatctgtaaaataaggataaatgtaatctatctcctaggattattaccagggttaaatagatgaataaatgtcatgaacttggaagagtgcctgacttacagtgagctctccatcagtagtactattattagctattatttataacttatgcttctcaatgggtatgatttaggaaatagcaaaataatatattttgggttttgtaattcttaatttcaaatggactggcagcttatataccaagaatcataccagacaactcataccattgagtttcctctatggtgtaaaatg

SEQ ID NO: 39408 - DNA, 772 bp, Homo sapiens
tccttacagttttttctaatcatttgaaggcacagggggtgatggtgtgggttttgagaaattacagccatgttccggaaggaattaggaaaaaggaaagggaaggtttaggaagaacatgaccttatttgctcaagtcttttctactttgtgaatttatgggggaaattctgtgtcctatggagtacattcttaggtcactgaagggaacacttttccattctgttcctttaagtgggaacaaagaaagaggcttgggataggtaatttattatgactatcttcaccctttctctagtgttaggtatgtcgcagtgatgtcatcctctggactgtgaatgacaaattgatgatgtcactgaggccccatctcccctgtataaacagtgtggtacggattataacagacaattaatctcaccggtcactcataaattgtgccaattcttttttatcttctctgggcctcagtttcttcatctgtaaaataaggataaatgtaatctatctcctaggattattaccagggttaaatagatgaataaatgtyatgaacttggaagagtgcctgacttacagtgagctctccatcagtagtactattattagctattatttataacttatgcttctcaatgggtatgatttaggaaatagcaaaataatatattttgggttttgtaattcttaatttcaaatggactggcagcttatataccaagaatcataccagacaactcataccattgagtttcctctatggtgtaaaatg

SEQ ID NO: 39409 - DNA, 772 bp, Homo sapiens
tccttacagttttttctaatcatttgaaggcacagggggtgatggtgtgggttttgagaaattacagccatgttccggaaggaattaggaaaaaggaaagggaaggtttaggaagaacatgaccttatttgctcaagtcttttctactttgtgaatttatgggggaaattctgtgtcctatggagtacattcttaggtcactgaagggaacacttttccattctgttcctttaagtgggaacaaagaaagaggcttgggataggtaatttattatgactatcttcaccctttctctagtgttaggtatgtcgcagtgatgtcatcctctggactgtgaatgacaaattgatgatgtcactgaggccccatctcccctgtataaacagtgtggtacggattataacagacaattaatctcaccggtcactcataaattgtgccaattcttttttatcttctctgggcctcagtttcttcatctgtaaaataaggataaatgtaatctatctcctaggattattaccagggttaaatagatgaataaatgtcatgaacttggaagagtgcctgacttacagtgagctctccatcagtagtactattattagctattatttataacttatgcttctcaatgggtatgatttaggaaatagcaaaataatatattttgggttttgtaattcttaatttcaaatggactggcagcttayataccaagaatcataccagacaactcataccattgagtttcctctatggtgtaaaatg

SEQ ID NO: 39410 - DNA, 584 bp, Homo sapiens
tgcaaatggcatagcatttaaggtgtctgtagctcctctggggattaaaaaaacctatctagcactggtgagccttggattctttgggcaagacactaaagctgggtatgcgtcttttgtgtctttttgtgtctcagtttccttgactgtaacaacaaaaaaaaagtatcaaacaatttcctaaagtggtctgggagggtcaaatwaaatcagctgacagataagaacatattttggagaagattaaagagtaatattacatatgtgaatgaagaacatgagatcacctcataatttagaagaacaaatgctttaatttcatttattcttctgcctgcctaagcaatacagtagatgcgatgttgaggttttatatactaatggtctctttcccaaaccagcaaatatttgataaatgtcaaaacatgatagtaatgttcatgacaaattatcctcaaataaaggaacttttcttatctctgggattatgtatagactagaaactgatccaaagtacccgatttgaaaaagatgagatgtgatgatattgatgggtcaaagaataaaagtgactaaaaataaaa

SEQ ID NO: 39411 - DNA, 1704 bp, Homo sapiens
ttcttagtatggaaagatgtttgaaatatgcaattaagagaaagagcagatcataaaacagcatgcgtgctgtagtacacactgcaaattccctcctttcttgatcatctttgggggaccacatgcgcactctcagtcaataaattatgactgatccaaagtcaatcatgacaatgctattctctagtgctagggatggccatgagatcaggttctggccaatctaaacacagatttccacacctaaagagaaatcctctgggggtcacctctgacgttcttgcttttctaataagaatacggaagtgactgcttttgctggccttgtaaactcatgtagtggttggagcttcggtagccgtcttacagccataagctaaattccaatagactcacaaagatgctgggcctaacattgttgaaccagtgaaccatagccaggaaccatagatactctaactatgtaagaaaaatgaacctgtctttgtttaagtgactgaactttcagattaatgcactcccaacagatacagagcatgatcccatatatacctgtatgtgcaaatatgaatagaaaaataaagtgattatctctgcgtggtaggattctccttcattttttttattttataaagttttcccaaagggcatgtaaataataatcagacaaatatttctgtacattcagaaaataaacaatggtactaattttatttttaaaaaataaacaaaatattggggccccagaagatagttcactaccatatgataagttgtttagccacgamcgagatgaacacttgtgggtatcctggaggacaggttcggcagcagtgagaggtcccctccagaacagtatgtggttccaaactcctgagggagcgggggcagaccgcaaggaagtagatgagaacctgaatgaggctctgtggggagagaggatgttcctcagccctcacaaggacatgtcagtttcacttgagattaggtcctggccttggctgggcagcctgccaggcaggttctcagcagcatggggtgataacaggagtacgggaagcctggcaagctggggcagctctggggtcttcaggtggggccgtcttgggcagcaactgtgttggctgtaaacacagatttccaggaagcagagcgttgcaatctctcccaccacaaacctggaccatcttagtttccatagcagcatccatgtcagtgaggaatctggacatgatctgtgatcccctctcccacttttccttttctcttagaatgggacagagcagcctggagtagctagtgtcctgtagtgactccagtttgctgctctcttccttatcttcttcctcctgctctctgtctcctctgcatccttcacgttctacatgaggaagctcaagtcaccgggctgagcctgggcttctcatctaaatcacggagtgccagtcaatgcctcccttcctcttcccagggagcaagtttaatcttccctgcctgcagtggagagctagaccctgttccttattccctgtgggaccatccgcagcctgtttcctcacccctgtaatgggactgcagtcctccctgcccacctggcagtgctaattccaggccgggagccctcctgggaaaatcaccagcgtgggtgatacggtgggtgtttgtgtgtgtggaagggtggggctgccacctggccacttacag

SEQ ID NO: 39412 - DNA, 1124 bp, Homo sapiens
cttgagcccaggagtttgaggctacagtgcattattattgcatctgtgaatagtcattcacttcagcttgggcaacatagtgagaccccatcttaaaacaaaacaaacaaaaaatgttagtccccttctcccttgcccctacttctcctggaayggggtgagtttcttctcagacccaagtcacctgaggaaaaccctttctggcctgctgggatcttttccctgttcttctccctcccacagcttccagagaccctggtctcattgtctgttctcttgcctgccttcctctgctagactggaagcactctgaaaacagatatctcagcaccattgattttccagtatcgggtcaatgtcgggtgtataccagctgcttggagaatgttgaatttaactaaactgataaaatcctttaaaaagatgtatataagaccagtaagtggaaggcaaatgacacaagatggaaggaattagggtaatttggcacagagaaggtcatcccggctgtccaagctcacggctatcttaggtacggttagtccgacatcctcactttataatgaagaagtctgagacccagagagtcggtggctgagccagagagttcaccaggctcctgacttctggcatcatgccggagagctggggctgggactgacgggctctgtccctctcccccgtgagcagggcaggatgatcctcccaggccaagtgtatggagagggtctgtgtcttactcccaattcctcagaatcagtgcagggtgaccctaaacccagaaagctcttgtgactttgaggccagcaccactgtcctcagggcacctggaatttcttgttagcaggctggatgtgcacttgactctgcaaattttggctctagcaataaggccacgtacttccttgattctgggaggtcaagcattaagtgggagtgtttttgaagagggaagaggatgagccacgtctaacatggccagccctttccctgcagtgcctgctccaaataacaaactgattcaacctgtcattaagtcatcctgttattatggactctgaactggtcctccatggaaccaccttgcagcttcctcagtggaatggcctggggcaaagatggat

SEQ ID NO: 39413 - DNA, 1124 bp, Homo sapiens
cttgagcccaggagtttgaggctacagtgcattattattgcatctgtgaatagtcattcacttcagcttgggcaacatagtgagaccccatcttaaaacaaaacaaacaaaaaatgttagtccccttctcccttgcccctacttctcctggaacggggtgagtttcttctcagacccaagtcacctgaggaaaaccctttctggcctgctgggatcttttccctgttcttctccctcccacagcttccagagaccctggtctcattgtctgttctcttgcctgccttcctctgctagactggaagcactctgaaaacagatatctcagcaccattgattttccagtatcgggtcaatgtcgggtgtataccagctgcttggagaatgttgaatttaactaaactgataaaatcctttaaaaagatgtatataagaccagtaagtggaaggcaaatgacacaagatggaaggaattagggtaatttggcacagagaaggtcatcccggctgtccaagctcacggctatcttaggtacggttagtccgacatcctcactttataatgaagaagtctgagacccagagagtcggtggctgagccagagagttcaccaggctcctgacttctggcatcatgccggagagctggggctgggactgaygggctctgtccctctcccccgtgagcagggcaggatgatcctcccaggccaagtgtatggagagggtctgtgtcttactcccaattcctcagaatcagtgcagggtgaccctaaacccagaaagctcttgtgactttgaggccagcaccactgtcctcagggcacctggaatttcttgttagcaggctggatgtgcacttgactctgcaaattttggctctagcaataaggccacgtacttccttgattctgggaggtcaagcattaagtgggagtgtttttgaagagggaagaggatgagccacgtctaacatggccagccctttccctgcagtgcctgctccaaataacaaactgattcaacctgtcattaagtcatcctgttattatggactctgaactggtcctccatggaaccaccttgcagcttcctcagtggaatggcctggggcaaagatggat

SEQ ID NO: 39414 - DNA, 567 bp, Homo sapiens
catggttgtgaggactttagacactgaaattagagtgaaaaaggaaatctacaaacccttgagtcaaaatcatagttctctgaatttgtcacatctgcccaggtccaatgtcatgagaataggatcagggcgccacaggtatggcctgagactaggaagagagtcttgctcactgacccatcccttgtctgggcttccaggtagaactagagtttcattcaacctacatgtgcctataggtcctccctgtggcaatgacatctctcagctcagtaatggccacttggagcaggaatatgatctttatatggaagactcagtggatccttatcaccttcatagaaaggtactcacctcccacgtcaagagaaaagccaacatgtttttcctccaatgcataaaaggaacttccatagggctggcaggagtcaggctgttcaagacaactggaaggagttgaataacatctatccagtgagtcctgcaagacttcaggctctactacctccagsagctccctgctgagcctggaaaaggaggaaaaagtaaagaataagccaggggaaa

SEQ ID NO: 39415 - DNA, 653 bp, Homo sapiens
tcaccatcctcttccctgaatgtagagaccctgggctggctggctgggggaatttttcccccaagtcctttatttcctcctttggtgtcagggacatcttgtccaaactgcagggagcactccctctgcgtggggctgtgtgcggaagagcagtcaggggagtccctgggaagcgcgatgagcggtgatgactggygacgtcaaggccttctcctcgaggctcaggatgggtgcgggactcggggtgttttccacctgtgggtgctcaggctctgattgcgtttcccgcttgtttgctgccttcctgcacatggtcctgtgttccagggctgggcactggggatgtggcaagggagtcccatggtcagctggtgagatgagtcccatggcagagcagagctctgcaggcacccagcaaggccacccaggaccagctggcatgtgagggtgggcctgctcgggtcagactcccttggttctggctcatcgtgggctgctgcctaaatgagtttattgaaggatgctgaactggtggtctcgggcatcttggaaaaaggtaaaaaggtgggtgctgcagtcagtcgcgtgtgggtcagtcacccccaagagtgctggaagctgggaaacgcttcccccaggccaggtgagggccc

SEQ ID NO: 39416 - DNA, 1330 bp, Homo sapiens
gaatctcaagagaattatgtggaagggaagaagccagatacaaaaagagtgcatgaccccactggtgtaaagtttaagaacaggcaaaacacattcctaacagaaaccacagagtggctgcttgtctgggagtgggatgggctcagataggccaagagggatgtttgtggggaatggcaatgtcttatgtcttgttttgggcagtagttccaagggyatacaaaaaccgtccaaacaaaattaaaatgagcattttgttgtatgcaaattataacaatttttaagtttttaaattttaagcaagcaaaaataacaatgctgttttgtaaaatatgcagacatattagtcataatcttaataacaatgttaatataaacatagaaaataaatgctggcacagtagatatctccaatatgtagcattatatacaagggaacttttatcgtctgcactataacatttgagtaatgtgagatttctttactattttttatccgttgagcatgtgttatttttaaatgatagaggcagtagtgaggatctgccatttttaattctatccacacttctacactttcaaccattactgactcatcaaataataatcttgttcataaggatgaccctcaagcaatagcttacacataataaaagaacaactgaattaacaacaacacacggtcattttttaatgtactgagctgcactgcaactctccaaaaactagcaccatgcgtgcagccagtaagacaccaggaagaatatccgccacccaaacttctccagtcaccaacatcttacgcatccaacaaaattcactgaggctttttaaaagccacatgaaagatttttatgttcataaaagcaatctgctggggtactgacagcatgtctggttcagttgtgagccagtaaaggccagactgctcactcaggttatggaataagacactcagaagagcaaccttcactgcaattatggatgagctaagagtacctattttaccaatacatcccaatgaaaatcttttttttttttttttttttttgagacgtagtgtcgctctgcccaggctggagtgcagtgctgtgatctctgctcactgcaacctctgcctcccaggttcaagcgattctcctacctcagccttctgattagctgggattacaggcacctgccaccacacaaggctaactttttgggttttattttttagtagggatggggtttcaccatgttggccaggctggtattgaactcctgacctcaaatgatccgcccacctcagcctcccaaagtgcaaggattacaggtgtgagccaccatg

SEQ ID NO: 39417 - DNA, 1330 bp, Homo sapiens
gaatctcaagagaattatgtggaagggaagaagccagatacaaaaagagtgcatgaccccactggtgtaaagtttaagaacaggcaaaacacattcctaacagaaaccacagagtggctgcttgtctgggagtgggatgggctcagataggccaagagggatgtttgtggggaatggcaatgtcttatgtcttgttttgggcagtagttccaagggtatacaaaaaccgtccaaacaaaattaaaatgagcattttgttgtatgcaaattataacaatttttaagtttttaaattttaagcaagcaaaaataacaatgctgttttgtaaaataygcagacatattagtcataatcttaataacaatgttaatataaacatagaaaataaatgctggcacagtagatatctccaatatgtagcattatatacaagggaacttttatcgtctgcactataacatttgagtaatgtgagatttctttactattttttatccgttgagcatgtgttatttttaaatgatagaggcagtagtgaggatctgccatttttaattctatccacacttctacactttcaaccattactgactcatcaaataataatcttgttcataaggatgaccctcaagcaatagcttacacataataaaagaacaactgaattaacaacaacacacggtcattttttaatgtactgagctgcactgcaactctccaaaaactagcaccatgcgtgcagccagtaagacaccaggaagaatatccgccacccaaacttctccagtcaccaacatcttacgcatccaacaaaattcactgaggctttttaaaagccacatgaaagatttttatgttcataaaagcaatctgctggggtactgacagcatgtctggttcagttgtgagccagtaaaggccagactgctcactcaggttatggaataagacactcagaagagcaaccttcactgcaattatggatgagctaagagtacctattttaccaatacatcccaatgaaaatcttttttttttttttttttttttgagacgtagtgtcgctctgcccaggctggagtgcagtgctgtgatctctgctcactgcaacctctgcctcccaggttcaagcgattctcctacctcagccttctgattagctgggattacaggcacctgccaccacacaaggctaactttttgggttttattttttagtagggatggggtttcaccatgttggccaggctggtattgaactcctgacctcaaatgatccgcccacctcagcctcccaaagtgcaaggattacaggtgtgagccaccatg

SEQ ID NO: 39418 - DNA, 1330 bp, Homo sapiens
gaatctcaagagaattatgtggaagggaagaagccagatacaaaaagagtgcatgaccccactggtgtaaagtttaagaacaggcaaaacacattcctaacagaaaccacagagtggctgcttgtctgggagtgggatgggctcagataggccaagagggatgtttgtggggaatggcaatgtcttatgtcttgttttgggcagtagttccaagggtatacaaaaaccgtccaaacaaaattaaaatgagcattttgttgtatgcaaattataacaatttttaagtttttaaattttaagcaagcaaaaataacaatgctgttttgtaaaatatgcagacatattagtcataatcttaataacaatgttaatataaacatagaaaataaatgctggcacagtagatatctccaatatgtagcattayatacaagggaacttttatcgtctgcactataacatttgagtaatgtgagatttctttactattttttatccgttgagcatgtgttatttttaaatgatagaggcagtagtgaggatctgccatttttaattctatccacacttctacactttcaaccattactgactcatcaaataataatcttgttcataaggatgaccctcaagcaatagcttacacataataaaagaacaactgaattaacaacaacacacggtcattttttaatgtactgagctgcactgcaactctccaaaaactagcaccatgcgtgcagccagtaagacaccaggaagaatatccgccacccaaacttctccagtcaccaacatcttacgcatccaacaaaattcactgaggctttttaaaagccacatgaaagatttttatgttcataaaagcaatctgctggggtactgacagcatgtctggttcagttgtgagccagtaaaggccagactgctcactcaggttatggaataagacactcagaagagcaaccttcactgcaattatggatgagctaagagtacctattttaccaatacatcccaatgaaaatcttttttttttttttttttttttgagacgtagtgtcgctctgcccaggctggagtgcagtgctgtgatctctgctcactgcaacctctgcctcccaggttcaagcgattctcctacctcagccttctgattagctgggattacaggcacctgccaccacacaaggctaactttttgggttttattttttagtagggatggggtttcaccatgttggccaggctggtattgaactcctgacctcaaatgatccgcccacctcagcctcccaaagtgcaaggattacaggtgtgagccaccatg

SEQ ID NO: 39419 - DNA, 1330 bp, Homo sapiens
gaatctcaagagaattatgtggaagggaagaagccagatacaaaaagagtgcatgaccccactggtgtaaagtttaagaacaggcaaaacacattcctaacagaaaccacagagtggctgcttgtctgggagtgggatgggctcagataggccaagagggatgtttgtggggaatggcaatgtcttatgtcttgttttgggcagtagttccaagggtatacaaaaaccgtccaaacaaaattaaaatgagcattttgttgtatgcaaattataacaatttttaagtttttaaattttaagcaagcaaaaataacaatgctgttttgtaaaatatgcagacatattagtcataatcttaataacaatgttaatataaacatagaaaataaatgctggcacagtagatatctccaatatgtagcattatatacaagggaacttttatcgtctgcrctataacatttgagtaatgtgagatttctttactattttttatccgttgagcatgtgttatttttaaatgatagaggcagtagtgaggatctgccatttttaattctatccacacttctacactttcaaccattactgactcatcaaataataatcttgttcataaggatgaccctcaagcaatagcttacacataataaaagaacaactgaattaacaacaacacacggtcattttttaatgtactgagctgcactgcaactctccaaaaactagcaccatgcgtgcagccagtaagacaccaggaagaatatccgccacccaaacttctccagtcaccaacatcttacgcatccaacaaaattcactgaggctttttaaaagccacatgaaagatttttatgttcataaaagcaatctgctggggtactgacagcatgtctggttcagttgtgagccagtaaaggccagactgctcactcaggttatggaataagacactcagaagagcaaccttcactgcaattatggatgagctaagagtacctattttaccaatacatcccaatgaaaatcttttttttttttttttttttttgagacgtagtgtcgctctgcccaggctggagtgcagtgctgtgatctctgctcactgcaacctctgcctcccaggttcaagcgattctcctacctcagccttctgattagctgggattacaggcacctgccaccacacaaggctaactttttgggttttattttttagtagggatggggtttcaccatgttggccaggctggtattgaactcctgacctcaaatgatccgcccacctcagcctcccaaagtgcaaggattacaggtgtgagccaccatg

SEQ ID NO: 39420 - DNA, 1330 bp, Homo sapiens
gaatctcaagagaattatgtggaagggaagaagccagatacaaaaagagtgcatgaccccactggtgtaaagtttaagaacaggcaaaacacattcctaacagaaaccacagagtggctgcttgtctgggagtgggatgggctcagataggccaagagggatgtttgtggggaatggcaatgtcttatgtcttgttttgggcagtagttccaagggtatacaaaaaccgtccaaacaaaattaaaatgagcattttgttgtatgcaaattataacaatttttaagtttttaaattttaagcaagcaaaaataacaatgctgttttgtaaaatatgcagacatattagtcataatcttaataacaatgttaatataaacatagaaaataaatgctggcacagtagatatctccaatatgtagcattatatacaagggaacttttatcgtctgcactataacatttgagtaatgtgagatttctttactattttttatccgttgagcatgtgttatttttaaatgatagaggcagtagtgaggatctgccatttttaattctatccacacttctacactttcaaccattactgactcatcaaataataatcttgttcataaggatgaccctcaagcaatagcttacacataataaaagaacaactgaattaacaacaacacacggtcattttttaatgtactgagctgcactgcaactctccaaaaactagcaccatgcgtgcagccagtaagacaccaggaagaatatccgccacccaaacttctccagtcaccaacatcttacgcatccaacaaaattcactgaggctttttaaaagccacatgaaagatttttatgttcataaaagcaatctgctggggtactgacagcatgtctggttcagttgtgagccagtaaaggccagactgctcactcaggttatggaataagacactcagaagagcaaccttcactgcaattatggatgagctaagagtacctattttaccaatacatcccaatgaaaatcttttttttttttttttttttttgagaygtagtgtcgctctgcccaggctggagtgcagtgctgtgatctctgctcactgcaacctctgcctcccaggttcaagcgattctcctacctcagccttctgattagctgggattacaggcacctgccaccacacaaggctaactttttgggttttattttttagtagggatggggtttcaccatgttggccaggctggtattgaactcctgacctcaaatgatccgcccacctcagcctcccaaagtgcaaggattacaggtgtgagccaccatg

SEQ ID NO: 39421 - DNA, 1330 bp, Homo sapiens
gaatctcaagagaattatgtggaagggaagaagccagatacaaaaagagtgcatgaccccactggtgtaaagtttaagaacaggcaaaacacattcctaacagaaaccacagagtggctgcttgtctgggagtgggatgggctcagataggccaagagggatgtttgtggggaatggcaatgtcttatgtcttgttttgggcagtagttccaagggtatacaaaaaccgtccaaacaaaattaaaatgagcattttgttgtatgcaaattataacaatttttaagtttttaaattttaagcaagcaaaaataacaatgctgttttgtaaaatatgcagacatattagtcataatcttaataacaatgttaatataaacatagaaaataaatgctggcacagtagatatctccaatatgtagcattatatacaagggaacttttatcgtctgcactataacatttgagtaatgtgagatttctttactattttttatccgttgagcatgtgttatttttaaatgatagaggcagtagtgaggatctgccatttttaattctatccacacttctacactttcaaccattactgactcatcaaataataatcttgttcataaggatgaccctcaagcaatagcttacacataataaaagaacaactgaattaacaacaacacacggtcattttttaatgtactgagctgcactgcaactctccaaaaactagcaccatgcgtgcagccagtaagacaccaggaagaatatccgccacccaaacttctccagtcaccaacatcttacgcatccaacaaaattcactgaggctttttaaaagccacatgaaagatttttatgttcataaaagcaatctgctggggtactgacagcatgtctggttcagttgtgagccagtaaaggccagactgctcactcaggttatggaataagacactcagaagagcaaccttcactgcaattatggatgagctaagagtacctattttaccaatacatcccaatgaaaatcttttttttttttttttttttttgagacgtagtgtcgctctgcccaggctggagtgcagtgctgtgatctctgctcactgcaacctctgcctcccaggttcaagcgattctcctacctcagccttctgattagctgggattacaggcacctgccaccacacaaggctaactttttgggttttattttttagtagggatggggtttcaccatgttggccaggctggtaytgaactcctgacctcaaatgatccgcccacctcagcctcccaaagtgcaaggattacaggtgtgagccaccatg

SEQ ID NO: 39422 - DNA, 1071 bp, Homo sapiens
aaaagctctctaggaaagtacatatgcctacccaagtttcacctgaagttatattaacatcccattactcgaaaaaataccattaacaaagtacatctaatttaccgttatgctcatgaaccaacttcagctacagaaactgtctccataaaagaaagaatcaaaaaacaaaactctagttaatactgaagaagaaaaaaaaaacaaactctaattgtgactataggtagaaaatcaggaaatacagacatccattataacttcagcatcaaattgtacaaaaggcatgcaggcaataagctccaaaacaagtacagctgacaaagggaagagttaaaaatagggagacaaaaaaggagcacccaaagatcccgtggaagacgcccaagtgtgggcctaaccaccagcatgcagcaaccacttggcctggggaggtaacttcacctcagtgttctcatctgaaccatgggtacagtgttgcctgattcacaaggtggttgtaagaattaactgacatgacgtgtagaaagcacttagcagaatgcctagtccaaagcacaaatggcagcagtcatcccaggagaggatgacgaattgagcactctactcttttttatttatttatttatttatccatccatccatccactcatttctgacaccccgccccactctgtcatmcaggctggggtgcaggagcacaaccacagctcaatgcagcctctaactcccaggctcaagcaatcctcccaccacagcctcccaagttgctggggctacttgttccctccaccatgcacagcttgatttttaggggagacaggtactcgccatgttgcccaggctggtcttaacctcctgggctcatgcgaacctcacgcctcagcctcccaaagtgctgggattacagatgtgagccactgcacctgggcaacatgtcttcatttctaagtgaaagtgaagcaatggaaaaggctccatcctgcccagacacactcttggtcctagggttaagggagatttccatctcacatgaattaccagtatttccttaatagacagtaataatct

SEQ ID NO: 39423 - DNA, 875 bp, Homo sapiens
caggggagcgatagcgttttgctggatttaagatccactgctttcgtttatgttttcctcggttgactgcagtgcttggcaggagctgtggcaatggaaagacctgggttcaggacctggctctgcctcctaccctctttgtgactttggacaagtagtaaactcttctgaagtttactatttacctcagctttgaagcagagatctggtgtctatcccatgtggtatttgcaatgctacaagataaagtctagttttaaatctgccggattgttgggtacctctgacgtctcagcatccacaactaaagaccaagccagctcttatttcaaatgtgtacagtgggtcgggcgcagtggctcacgcctgtaatcctagcactttgagaggccgaggcgggtggatcacttgagtccaagagtttgaaaccagcatgggcaacgtggtgaaaccctgtctctacgaaaaatacaaaaattagccakgtgtggtggtatacacctgtaatcccagctactcaggaggctgaggcaggagaatcgcttgaacccgggaggcggaggttgcagtgagccgagatcacgccactgcactccagcctgggtgacagagtgagaccctatctaaaaaaaaaaaaaaaaaatcaagtgtgtcagtgtgaccgagaagctgggttaatcctcagcagagagaagttccatatgatggggaggaaaggaagagcaaatatacactcaaaaatgtctgggtttgacggtttagagtaatcatttaggaaggaaagaagatatataaggaaatctagactggggaatttggaagttattcgaagcatgttgagaaggatcaggccattttgctactaactttcctgt

SEQ ID NO: 39424 - DNA, 557 bp, Homo sapiens
tgaggcyatgtatgcctgagagtgtaagttccagcacaggctgcaggagttcagatctttgcttcatcgtgtattagctggataatcttaaacaagttacttcacttctctgagccgtggtttttgcaactgcaaactggggataataatagtagccatttcatagggtgaaaatcaaattagaaaaaatctgtatgatatgtgttagcctagggcatggaatatagtaaatagcaaataaatgttaattatattgctgttttccagggcatactgaagtgtgtgaaatagtccctgcccttgaaggagcacatgaaggaaaattcacaaacagtaattataatagcataggacgtcagctgtggcgcaggcagtcaggtcacctgggagcctggatagtctctcagagtggacatcttggaggagccatttcagtggccttaggagagaagctaaattgcagtggttagactcttacatattgtacattttggctcaaatatctttagcatgaatcaagccctagtcttcagggtcattaatttattacctgaaga

SEQ ID NO: 39425 - DNA, 557 bp, Homo sapiens
tgaggccatgtatgcctgagagtgtaagttccagcacaggctgcaggagttcagatctttgcttcatcgtgtattagctggataatcttaaacaagttacttcacttctctgagccgtggtttttgcawctgcaaactggggataataatagtagccatttcatagggtgaaaatcaaattagaaaaaatctgtatgatatgtgttagcctagggcatggaatatagtaaatagcaaataaatgttaattatattgctgttttccagggcatactgaagtgtgtgaaatagtccctgcccttgaaggagcacatgaaggaaaattcacaaacagtaattataatagcataggacgtcagctgtggcgcaggcagtcaggtcacctgggagcctggatagtctctcagagtggacatcttggaggagccatttcagtggccttaggagagaagctaaattgcagtggttagactcttacatattgtacattttggctcaaatatctttagcatgaatcaagccctagtcttcagggtcattaatttattacctgaaga

SEQ ID NO: 39426 - DNA, 723 bp, Homo sapiens
aatcagtctgtttcattattgaggcctttcctctcctgtatggctacattttattctcaggagagcagtgagagatgtctttttaaaatatagattagtaaaaatctgccttgaattctgttgacacttggaaaaaaattataatatctttatcatggagttaaggtgtgaagagcaaatatgatctctgtgccttgaccttttatctaatctctctcctttcttgctgtgcttcaaccaccactgcctttttataatttctagaagctaaacttgtatattccttarcattagtgctagtccgtttcatagaaagttcttcccccaattttctatggctcactccttcctgtgataattatttccttaaatgtcacttcttctgagatgctctctatgtttcttcaatcactgcattccttcaatattgtactaggggtggtagccagcacaaaaaaaaaaaaaaaaggaaagaaagaaaagttctaagaattggaaagggagatacgaaacagtcatttaatagcaagttgtttatgtgtggtgaaaaatttgaaagaacctataaatacactatttggatcagtaaatgaattagcagagcttcagaatttgaggtaattatacaaaaaaaaatttgtatatttttataaaccagcaaaacacaatgagaaaatgaaacaatgtgaacaccttcattaacataaaaataaccaattatct

SEQ ID NO: 39427 - DNA, 713 bp, Homo sapiens
  misc_feature (1)...(713): n = A,T,C or G
ttaaaattcttggctatagccccaacttcctgattggcattcattattccttctttcttcctctctttacatgcttacccatctcaaactagctctgacttttccagatgtagtttatcctctccttaccagctcatttctcccttgtttactgtatccccaacagaagacaaaacagcccttacatttatatggtagaaataagaaagcaataacacaaatgcagtgtttgtttggctgcctctctttaagggaacactatacatatatgtgaagtaaatccactgaagggtaaaacaaaaattatcttagatagaggcttgaaaaattatttatcttagataaagaaacttgaaaaattattagccaatgcttgtggatgtgtgtgtgtgtgtgtgtgtgtgaatgtgtgygcgtgtgtgtgtnnnnnnnnnnnnnnnnnnnnnnnnnnnnnnnnnnnnnnnnnnnnnnnnnnnnnnnnnnnnnnnnnnnnnnnnnnnnnnnnnnnnnnnnnnnnnnnnnnnnatagtcacctgattcttttcctgtaatttctatggcattctgtagctctctaatgatcttctttgtttcaatttcaagataaatggtaagatctattatttaaaaggcagatctattattttatttgtataaaataaaaaacagagaatacacctgaaagtcatatgattcacatgtacaacatgctc

SEQ ID NO: 39428 - DNA, 713 bp, Homo sapiens
  misc_feature (1)...(713): n = A,T,C or G
ttaaaattcttggctatagccccaacttcctgattggcattcattattccttctttcttcctctctttacatgcttacccatctcaaactagctctgacttttccagatgtagtttatcctctccttaccagctcatttctcccttgtttactgtatccccaacagaagacaaaacagcccttacatttatatggtagaaataagaaagcaataacacaaatgcagtgtttgtttggctgcctctctttaagggaacactatacatatatgtgaagtaaatccactgaagggtaaaacaaaaattatcttagatagaggcttgaaaaattatttatcttagataaagaaacttgaaaaattattagccaatgcttgtggatgtgtgtgtgtgtgtgtgtgtgtgaatgtgtgcgygtgtgtgtgtnnnnnnnnnnnnnnnnnnnnnnnnnnnnnnnnnnnnnnnnnnnnnnnnnnnnnnnnnnnnnnnnnnnnnnnnnnnnnnnnnnnnnnnnnnnnnnnnnnnnatagtcacctgattcttttcctgtaatttctatggcattctgtagctctctaatgatcttctttgtttcaatttcaagataaatggtaagatctattatttaaaaggcagatctattattttatttgtataaaataaaaaacagagaatacacctgaaagtcatatgattcacatgtacaacatgctc

SEQ ID NO: 39429 - DNA, 627 bp, Homo sapiens
agattcttttttagattaatctttaatgttgtatatttaggtcctaaggtaatgaaaagcttctgcaaacattttaaagacattatraggaggaaaaatgtacaggttaggttatatgaaatgtgtaacacttcattttagcctacaaaaatgacaatttcgtgtttcaaactaattttactatttacataattaacaggctcacctaaacatgttttcttcttaaattttgacttcctaaatacaggcttctgattttatgtgaactcaaattaagtttttatttgtaatgttgatcccaagatgagagatctttacacacacacacacacacacacaaacacataaacacacaatatatatgtaattctagaagaaaacaggactccacagaagactgtctataagaagaaataaataataaatggcaagtaaagcaaacaagtgtgtaaaatatgttcaatctaaacacgaaagaatcagattagaactaatataatagcagatgtcagcagaatggttgatcagtctaagcttcctaaggtccttgtattgtttggaagaagggtaaaatattggttatcaatatcttgttaactttgctggttaaaatttccataaaaaccc

SEQ ID NO: 39430 - DNA, 524 bp, Homo sapiens
cttcactactaaaacttaatactgatctcactgactatgattaaattcaaatttaataattatagtgctatagtccctacagatttctcattgtaataccatctaaatgtttatgttttagccctcaacacaaacactcataaatactatagtagaagacagaacaagtaagaagacactaagtttgggcttattagttacatctctatttattgattatctactatatgtcagaygctgtgttagaaaattcctatatatcattcctaattattaaaatgatataacttatctctatcttatgtttcagaaagttaagtttcaaagtgtttaaggcagtgttttcaaggcatgcaactgcatagttgaagaattaggatttgaactcacctttgccttaccaagtgctcacgagcacactattttatggagccctaccgagtatgggaaagtggagaagagaggatgatgttttcagggaaaaggtcttttttcaaggactaacaatacctaatgcctcagaa

SEQ ID NO: 39431 - DNA, 1864 bp, Homo sapiens
gctatgacactaaacctaggcctgccttgattttaaaaaagatagcaacattcaccaccacaattaccatttattggcccttcattgtgtgcctaacattatgttgcacattgtattcatatttttctccatcactgtgtgagctcaacagctataagaagtggctatacatgcagcaaatacctttggtgccctctctgtctccttgcctactccaggaggtctcatgcaggccagatggcatgacagctgtgtccctttgcctgagagggtgccctcgcctcctgagaagatggtaaattgagggctaagctagaggtgctcagtccaggagtratcctcaatctttgaggggtaggaatttctgggaaaatttcttgacttcctattccccatggtgggacaattctggggtaggttcccaggtctcccagagggtcttcaaaaagattgacagcagtggcctagtggtaacctcatggcagccactttattggtttgtctcctctccctcctgtctcacttaccattccctctcattgctctctgggatttctgcccaagcgtgttctcaatccttgtgtcatgatttgtccttgaaggaatctccaccaacatactgcacgattgtcctcccagaacaggagagaaagagagctttgggaggctgacatgcatgaggacgtgtagctggtgagtggccagcaggacatgaatcagcaccatcacttatgtttccatcagaatcagtgtgggcatatttttctagttagttaatcaaattaattaatgtgtagcttttttgaaaatgatttaagcctttagaacatatcctaatacttccttcttctatcaaatctatttgtcctgtgtcacattccattgagactcaggatttaaccagcaatataattagatacaaaatataacaaattaatcaatattgcaatgctatagctgaaagtgatgaaaggtagtatgcctctagcgctattcatactttacactagacttttccaattgcagtgccttaatttaaaggaagaactctgttagtagaatttcaggcatctaagtagtcaaggaaaccccctctccatgctgttcaatggacttttcctgagccccttacacatctttccatttgctaactctacctgctgatactgatgctttatctaatcatcaatgggattcctcttgaaatggaaggcaaagttcaaccctgaatgtgtgctggcctggctccttcgcagtgacaaaaacatgcaactgtctcttctttacctctctggctcatcagggaacatggaggaactgtttacgtgcctttgtttcccagcctgtgaaaggaagataacacttgctccaacatgcttttcagcgggtgatgtgaagataaatgtgataacgtctacaaagtcctccaaattctcgggatgaaatgtgctatgtaaatggaacacagccccgttatgattgaagtttaatgcagcagctctcaggcctatacagggaatgcagtctggctggaaggtaggattgctgagttgtcccctctaatcattgtccctgtggattcaccatccagcagcctcatcttagaaatgcccatcctttccattcattcaatttggtttttattttcaagagaccagttacacagttacgtttttccctttatattcttcagctatgggggtcaggttttagaaaacacgtatgtacaaacatacattgccacctaattgatgacctaactcctggagggcctaaggactagatcagcaactagacatttagatataaattctgtgctgaaaacaatattcttgatcctctgcatgtttgtgtgtggcctgac

SEQ ID NO: 39432 - DNA, 1864 bp, Homo sapiens
gctatgacactaaacctaggcctgccttgattttaaaaaagatagcaacattcaccaccacaattaccatttattggcccttcattgtgtgcctaacattatgttgcacattgtattcatatttttctccatcactgtgtgagctcaacagctataagaagtggctatacatgcagcaaatacctttggtgccctctctgtctccttgcctactccaggaggtctcatgcaggccagatggcatgacagctgtgtccctttgcctgagagggtgccctcgcctcctgagaagatggtaaattgagggctaagctagaggtgctcagtccaggagtgatcctcaatctttgaggggtaggaatttctgggaaaatttcttgacttcctattccccatggtgggacaattctggggtaggttcccaggtctcccagagggtcttcaaaaagattgacagcagtggcctagtggtaacctcatggcagccactttattggtttgtctcctstccctcctgtctcacttaccattccctctcattgctctctgggatttctgcccaagcgtgttctcaatccttgtgtcatgatttgtccttgaaggaatctccaccaacatactgcacgattgtcctcccagaacaggagagaaagagagctttgggaggctgacatgcatgaggacgtgtagctggtgagtggccagcaggacatgaatcagcaccatcacttatgtttccatcagaatcagtgtgggcatatttttctagttagttaatcaaattaattaatgtgtagcttttttgaaaatgatttaagcctttagaacatatcctaatacttccttcttctatcaaatctatttgtcctgtgtcacattccattgagactcaggatttaaccagcaatataattagatacaaaatataacaaattaatcaatattgcaatgctatagctgaaagtgatgaaaggtagtatgcctctagcgctattcatactttacactagacttttccaattgcagtgccttaatttaaaggaagaactctgttagtagaatttcaggcatctaagtagtcaaggaaaccccctctccatgctgttcaatggacttttcctgagccccttacacatctttccatttgctaactctacctgctgatactgatgctttatctaatcatcaatgggattcctcttgaaatggaaggcaaagttcaaccctgaatgtgtgctggcctggctccttcgcagtgacaaaaacatgcaactgtctcttctttacctctctggctcatcagggaacatggaggaactgtttacgtgcctttgtttcccagcctgtgaaaggaagataacacttgctccaacatgcttttcagcgggtgatgtgaagataaatgtgataacgtctacaaagtcctccaaattctcgggatgaaatgtgctatgtaaatggaacacagccccgttatgattgaagtttaatgcagcagctctcaggcctatacagggaatgcagtctggctggaaggtaggattgctgagttgtcccctctaatcattgtccctgtggattcaccatccagcagcctcatcttagaaatgcccatcctttccattcattcaatttggtttttattttcaagagaccagttacacagttacgtttttccctttatattcttcagctatgggggtcaggttttagaaaacacgtatgtacaaacatacattgccacctaattgatgacctaactcctggagggcctaaggactagatcagcaactagacatttagatataaattctgtgctgaaaacaatattcttgatcctctgcatgtttgtgtgtggcctgac

SEQ ID NO: 39433 - DNA, 1864 bp, Homo sapiens
gctatgacactaaacctaggcctgccttgattttaaaaaagatagcaacattcaccaccacaattaccatttattggcccttcattgtgtgcctaacattatgttgcacattgtattcatatttttctccatcactgtgtgagctcaacagctataagaagtggctatacatgcagcaaatacctttggtgccctctctgtctccttgcctactccaggaggtctcatgcaggccagatggcatgacagctgtgtccctttgcctgagagggtgccctcgcctcctgagaagatggtaaattgagggctaagctagaggtgctcagtccaggagtgatcctcaatctttgaggggtaggaatttctgggaaaatttcttgacttcctattccccatggtgggacaattctggggtaggttcccaggtctcccagagggtcttcaaaaagattgacagcagtggcctagtggtaacctcatggcagccactttattggtttgtctcctctccctcctgtctcacttaccattccctctcattgctctctgggatttctgcccaagcgtgttctcaatccttgtgtcatgatttgtccttgaaggaatctccaccaacatactgcacgattgtcctcccagaacaggagagaaagagagctttgggaggctgacatgcatgaggacgtgtagctggtgagtggccagcaggacatgaatcagcaccatcacttatgtttccatcagaatcagtgtgggcatatttttctagttagttaatcaaattaattaatgtgtagcttttttgaaaatgatttaagcctttagaacatatcctaatacttccttcttctatcaaatctatttgtcctgtgtcacattccattgagactcaggatttaaccagcaatataattagatacaaaatataacaaattaatcaatattgcaatgctatagctgaaagtgatgaaaggtagtatgcctctagcgctattcatactttacactagacttttccaattgcagtgccttaatttaaaggaagaactctgttagtagaatttcaggcatctaagtagtcaaggaaaccccctctccatgctgttcaatggacttttcctgagccccttacacatctttccatttgctaactctacctgctgatactgatgctttatctaatcatcaatgggattcctcttgaaatggaaggcaaagttcaaccctgaatgtgtgctggcctggctccttcgcagtgacaaaaacatgcaactgtctcttctttacctctctggctcatcagggaacatggaggaactgtttacgtgcctttgtttcccagcctgtgaaaggaagataacacttgctccaacatgcttttcagcgggtgatgtgaagataaatgtgataacgtctacaaagtcctccaaattctcgggatgaaatgtgctatrtaaatggaacacagccccgttatgattgaagtttaatgcagcagctctcaggcctatacagggaatgcagtctggctggaaggtaggattgctgagttgtcccctctaatcattgtccctgtggattcaccatccagcagcctcatcttagaaatgcccatcctttccattcattcaatttggtttttattttcaagagaccagttacacagttacgtttttccctttatattcttcagctatgggggtcaggttttagaaaacacgtatgtacaaacatacattgccacctaattgatgacctaactcctggagggcctaaggactagatcagcaactagacatttagatataaattctgtgctgaaaacaatattcttgatcctctgcatgtttgtgtgtggcctgac

SEQ ID NO: 39434 - DNA, 1864 bp, Homo sapiens
gctatgacactaaacctaggcctgccttgattttaaaaaagatagcaacattcaccaccacaattaccatttattggcccttcattgtgtgcctaacattatgttgcacattgtattcatatttttctccatcactgtgtgagctcaacagctataagaagtggctatacatgcagcaaatacctttggtgccctctctgtctccttgcctactccaggaggtctcatgcaggccagatggcatgacagctgtgtccctttgcctgagagggtgccctcgcctcctgagaagatggtaaattgagggctaagctagaggtgctcagtccaggagtgatcctcaatctttgaggggtaggaatttctgggaaaatttcttgacttcctattccccatggtgggacaattctggggtaggttcccaggtctcccagagggtcttcaaaaagattgacagcagtggcctagtggtaacctcatggcagccactttattggtttgtctcctctccctcctgtctcacttaccattccctctcattgctctctgggatttctgcccaagcgtgttctcaatccttgtgtcatgatttgtccttgaaggaatctccaccaacatactgcacgattgtcctcccagaacaggagagaaagagagctttgggaggctgacatgcatgaggacgtgtagctggtgagtggccagcaggacatgaatcagcaccatcacttatgtttccatcagaatcagtgtgggcatatttttctagttagttaatcaaattaattaatgtgtagcttttttgaaaatgatttaagcctttagaacatatcctaatacttccttcttctatcaaatctatttgtcctgtgtcacattccattgagactcaggatttaaccagcaatataattagatacaaaatataacaaattaatcaatattgcaatgctatagctgaaagtgatgaaaggtagtatgcctctagcgctattcatactttacactagacttttccaattgcagtgccttaatttaaaggaagaactctgttagtagaatttcaggcatctaagtagtcaaggaaaccccctctccatgctgttcaatggacttttcctgagccccttacacatctttccatttgctaactctacctgctgatactgatgctttatctaatcatcaatgggattcctcttgaaatggaaggcaaagttcaaccctgaatgtgtgctggcctggctccttcgcagtgacaaaaacatgcaactgtctcttctttacctctctggctcatcagggaacatggaggaactgtttacgtgcctttgtttcccagcctgtgaaaggaagataacacttgctccaacatgcttttcagcgggtgatgtgaagataaatgtgataacgtctacaaagtcctccaaattctcgggatgaaatgtgctatgtaaatggaacacagccccgttatgattgaagtttratgcagcagctctcaggcctatacagggaatgcagtctggctggaaggtaggattgctgagttgtcccctctaatcattgtccctgtggattcaccatccagcagcctcatcttagaaatgcccatcctttccattcattcaatttggtttttattttcaagagaccagttacacagttacgtttttccctttatattcttcagctatgggggtcaggttttagaaaacacgtatgtacaaacatacattgccacctaattgatgacctaactcctggagggcctaaggactagatcagcaactagacatttagatataaattctgtgctgaaaacaatattcttgatcctctgcatgtttgtgtgtggcctgac

SEQ ID NO: 39435 - DNA, 659 bp, Homo sapiens
agaagtgggagaactgggcttcattctgggagcaatgggaagtcagtgaagtatggagtgtttgtgagagagctctggcttctttacggagaatgggcttgaagagggcaagaaagaaggcaggagggagagatgatggtggttggattagaacagtggcagtagaggcagagaaaagtagttatgcttccaagtcctcaggtaagacactgattaaaatggtgcctgggtcaggccaaggccaggctgagcctgcyctccaaaatggcactgacccacaatgagcagcacccactggtcactgtcatggtcagtcactaaattgcacccctccacccaactatctttaaacccagcccacatgtttccattttgtctaaaaaggcaagagagtctgtcccaccagtcatgagctcttggatgtctgagaacatgtgtaagtcacttctgcatcttcccaaaatatccaatacataatgggtgctaaatgaacaagtgaaagaccaataggaaaatgaatgaatcaatggcatcagaagcgaccttgtctctagcttgggtccagacacattagctggtaatgtcctgttgctcctatggcttgatgggaaggctgccaggaatacacccctcccctggttgccgaaatatgctatgca

SEQ ID NO: 39436 - DNA, 659 bp, Homo sapiens
agaagtgggagaactgggcttcattctgggagcaatgggaagtcagtgaagtatggagtgtttgtgagagagctctggcttctttacggagaatgggcttgaagagggcaagaaagaaggcaggagggagagatgatggtggttggattagaacagtggcagtagaggcagagaaaagtagttatgcttccaagtcctcaggtaagacactgattaaaatggtgcctgggtcaggccaaggccaggctgagcctgctctccaaaatggcactgacccacaatgagcagcacccactggtcactgtcatggtcagtcactaaattgcacccctccacccaactatctttaaacccagcccacatgtttccattttgtctaaaaaggcaagagagtctgtcccaccagtcatgagctcttggatgtctgagaacatgtgtaagtcacttstgcatcttcccaaaatatccaatacataatgggtgctaaatgaacaagtgaaagaccaataggaaaatgaatgaatcaatggcatcagaagcgaccttgtctctagcttgggtccagacacattagctggtaatgtcctgttgctcctatggcttgatgggaaggctgccaggaatacacccctcccctggttgccgaaatatgctatgca

SEQ ID NO: 39437 - DNA, 612 bp, Homo sapiens
acgtcaacactttccaattttttaaatctccaattagttgattattacaattcaattgcttacttaaaaaaaaaaactaatgaatctttttaagtctccttcacattgccaaatacactattaaataaggacaaaaaaccaaacaccgcatgttctccctcataggtgggaattgaacaatgagaacacatcgacacaggaaggggaacatcacacaccggggcctgttgtggggtggggagagtggggagggatagcattaggagatacacctaatgttaaatgacaagttaagaggtgcagcactccaacatggcacatgtatacatatgtaaaaaacctgcactctgtgcacatgtactctaaaacttaaagtataataaaaataaataaataaatacattgtattctaagtgattaataatacaatattaatgagttactttcacaacatttttttcatctcctttytcataacatttttcacaacatttttctcatctcgttctattattagctagtggctaataatagaacataaaacacaatatcattttcaaaaattaaagatacatgcaggagatttctgtttcctagctcagcatgtaagaa

SEQ ID NO: 39438 - DNA, 760 bp, Homo sapiens
cataagttatccattaaattatattgcctatatagtttatacagattcattggaataatattttaataattgttattttatccccctcactgtgctcccatccctggagttttatttgtttttaggattatttaaaaaattaatatgaaacaaacaaaaaagaaaacacacttaataactggtggaattagtttaagtttgtttcttttcttttcttttttttttacagaatttactttattacagaatttattgtgacattggagaggtaatgctgkgatacagcttcatatctgcccagatttcctctcattgtcaaaagtagctgtaaaatttggcaaaatataatatatttagtttttaaatgtatcaacatatttcatcttgaattctctattaaggatgacacctaattctgaaaatttatcatgtggaatttatgtgtcactcaaaagatttatttaatggttttgagtcaggaggtttcgttttggtcacaattctaatgccaacacacttgtgattttaggctatatcaactaatttttacaattctatttcctttcttattgatttttaaatgacaaaatttttgctagactatcttgtaatcttttgcagtaacaaaatggcacggctctacatattagagggaaaattgccttagatatggccagtatagtttttcacaggtattatgatattaagcaattccatttggtttatacttattatgttgtattattttcttgcctgtatg

SEQ ID NO: 39439 - DNA, 536 bp, Homo sapiens
ggctatttaatcatggtcctttacacagagatgtagcactgaatgaagaagagaatatgcagaggaacccaagagtcaaaaggaccttgcttttcttttgtttcagctttacttaatatactatgccttctattgcatatgcaacccataagttttttagctatttatagattagttatatcaccagaaaaaagacacaggataaaacatttcagtgccaaaattcagcttttctgagttcacttgttcactactaacakattttttttcctgtgtatttttaacttaagccatttaacttctcaagagattttgttgtctttatgtgttttaatttaaaagctgttaagagtttttcatttctttgtttgtatattccactaatagttttatcacatgttttgaatcatctatatatggacattagaatttacaaaacattgttatgtataaaattacttgagagtggattcttgctaatatactgtaacagatttttaaagagacactgtaaacatctaggtatattgaagcca

SEQ ID NO: 39440 - DNA, 536 bp, Homo sapiens
ggctatttaatcatggtcctttacacagagatgtagcactgaatgaagaagagaatatgcagaggaacccaagagtcaaaaggaccttgcttttcttttgtttcagctttacttaatatactatgccttctattgcatatgcaacccataagttttttagctatttatagattagttatatcaccagaaaaaagacacaggataaaacatttcagtgccaaaattcagcttttctgagttcacttgttcactactaacatattttttttcctgtgtatttttaacttaagccatttaacttctcaagagattttgttgtctttatgtgttttaatttaaaagctgttaagagtttttcatttctttgtttgtatattccactaatagttttatcacaygttttgaatcatctatatatggacattagaatttacaaaacattgttatgtataaaattacttgagagtggattcttgctaatatactgtaacagatttttaaagagacactgtaaacatctaggtatattgaagcca

SEQ ID NO: 39441 - DNA, 536 bp, Homo sapiens
ggctatttaatcatggtcctttacacagagatgtagcactgaatgaagaagagaatatgcagaggaacccaagagtcaaaaggaccttgcttttcttttgtttcagctttacttaatatactatgccttctattgcatatgcaacccataagttttttagctatttatagattagttatatcaccagaaaaaagacacaggataaaacatttcagtgccaaaattcagcttttctgagttcacttgttcactactaacatattttttttcctgtgtatttttaacttaagccatttaacttctcaagagattttgttgtctttatgtgttttaatttaaaagctgttaagagtttttcatttctttgtttgtatattccactaatagttttatcacatgttttgaatcatctatatatggacattagaatttacaaaacattgttatgtataaaattacttgagagtggattcttgctaatatactgtaacagatttttaaagagacactgtaaacatstaggtatattgaagcca

SEQ ID NO: 39442 - DNA, 536 bp, Homo sapiens
ttgatttttataaacaattatactgtgtagtactaaaagtaagaagagagcacaaggaatatagagggccaaggatcagcatgggcagtccacagaagtaggggtctctgtggagcctaaagtgaagagcaagagatggtgtggtttraagttaagagcagggacctggagcagttagacatgggtttgaaggtctaagagacccaggacttttctgcgctgtgtgatcttgagcaaacctcttaatttctcttaacctatagctcttcacctgtaaaatggaaattataattctcaaaaatagtgtgagtaataaatgaggtgtgaaatgtaaaggatccagtgcatagtaagtactcaacaaatggtaaccagtgctgttattataggcacaatatagaatcacaggtgataagaaattattataaattgtttagttaatcctgatgaattaaataacatgtccctaatatcagttttatcattgttagggtttatgggctgatttcttctagtaataatagtgctttacatac

SEQ ID NO: 39443 - DNA, 536 bp, Homo sapiens
ttgatttttataaacaattatactgtgtagtactaaaagtaagaagagagcacaaggaatatagagggccaaggatcagcatgggcagtccacagaagtaggggtctctgtggagcctaaagtgaagagcaagagatggtgtggtttgaagttaagagcagggacctggagcagttagacatgggtttgaaggtctaagagacccaggacttttctgcgctgtgtgatcttgagcaaacctcttaatttctcttaacctatagctcttcacctgtaaaatggaaattataattctcaaaaatagtgtgagtaataaatgaggtgtgaaatgtaaaggatccagtgcatagtaagtactcaacaaatggtaaccagtgctgttattataggcacaatatagaatcacaggtgataagaaattattawaaattgtttagttaatcctgatgaattaaataacatgtccctaatatcagttttatcattgttagggtttatgggctgatttcttctagtaataatagtgctttacatac

SEQ ID NO: 39444 - DNA, 448 bp, Homo sapiens
atgaaacaactaaggcacataaagactaagtagtttgccaaccattacagctaacacttgacagtcaggacagcaagcaatctgattccaaggttagacttttattcccaccgtgtgctgtctccgatgaaatttttaaaaattatgtggttaagaccaagcaagcagagaggagtgggatggcccactgtcactgctggcagcaggtgctggctctgagagcctcccatcataattmttccttatccaggaggcaacaaagagacaccccaagttcccattatccagagtactgccagcatgaagacttttccctctcctctctcacagaaggaggtactctgggcatatggaagacatatcattagggagacccattgctgggggccccaggaagaagttatatgaagaagcatggaataaagtcatctatagccatatgaatccc

SEQ ID NO: 39445 - DNA, 557 bp, Homo sapiens
ataactataaaaatttcactttcttaaaacacctcttttttttccatttcctgatacctgcaactcatttgcctgaaaacaagataatagagctactgacattcatattcatgaaaatgactcacaccaggtctgtttctgggagctgttttgataaggaaggaggcagaggagagagcaagagggcatcaagctacaaggaaaatgacctaagggatgtggcagaggtgggggacgaagtgatctggagtcaccttcatatctattgggaacaacatttctgaatttctgttgagactgctgagaaacatgagaatgktaaaaaaaaaaaaaaaaaaaaaaaaaaaaaagacatgtaaatctagaaaaaacagcttctagacaatgtggaaactgttggcagtttttaaaaatgctaggattattatttctattatgaagagaaaattgagtataatgaataaattcctggtttccatagcaagttcaacttcttcatgctgggtataaataataaatatattgttgttactgaaaatgttttcagttatgccaca

SEQ ID NO: 39446 - DNA, 510 bp, Homo sapiens
attgcccttcaccctctatcttgagactttgcaattttttttaacatacctatcacagcactgaacacactactttacatagaaaygttctgtttatacacctatcatctgagctagactgtgggttcctttaccacagagacctttcttctcaccactcttgagcttgggacttaatagatactcattaaatgttgaataaatgaattaatgaatattattgtttgtctacatgtgtgttcctcctacttttttatgaagtctttgaggctaggaataatggcttacttatatcttattcctgatagctaacttagtgcctggtatatagtaggcacccaataaatattttcattggatatacatggatgaatgaataaagtcttttgttagtatctccaacctgatatatcctttccctcctttgaaacctcaagcgcctggtgtttctcctgtggtactttctttagcttggacttctctcattgtctaatccccgccagttgatgg

SEQ ID NO: 39447 - DNA, 510 bp, Homo sapiens
attgcccttcaccctctatcttgagactttgcaattttttttaacatacctatcacagcactgaacacactactttacatagaaatgttctgtttatacacctatcatctgagctagactgtgggttcctttaccacagagacctttcttctcaccactcttgagcttgggacttaatagatactcattaaatgttgaataaatgaattaatgaatattattgtttgtctacatgtgtgttcctcctacttttttatgaagtctttgaggctaggaataatggcttacttatatcttattcctgatagctaacttagtgcctggtatatagtaggcrcccaataaatattttcattggatatacatggatgaatgaataaagtcttttgttagtatctccaacctgatatatcctttccctcctttgaaacctcaagcgcctggtgtttctcctgtggtactttctttagcttggacttctctcattgtctaatccccgccagttgatgg

SEQ ID NO: 39448 - DNA, 625 bp, Homo sapiens
agatacaaaaatgctgttcagtggcccgtcctggcggatggaggcaggggtctaacattaaatcacaactcagctggggcctgggtgccagtaaggctggggctgggggctttgccttctgggaagctccctggatgccaggctgtccttaggacttggtgacccaccccagcataacygtgcattcactctcacccttccaggggtgacgttcaacatgctcacttacctatccagcatgggacacccaagcccacaagaggctggtggggagggttgaactttttggggagcaggcccaggcagcggggtgggagtgcctaggacagcagctctttatcaatctgcagatggtgttggacattttaacaaccagtgtggctattctggtgattcccagctgggtctcaaccccgcccctcatcttgctcctcactttgccagtctctctgccctgttcccagcctccctcaagaacccaggcgagcaccatctctcttcttccactctggcactttcccccactagctcccacgtgcaagtgcgtcttaatcactgcagtcatgggatgagggagaagctcctcaccctttcctgggccttcgccgtcctaagggctggtccc

SEQ ID NO: 39449 - DNA, 731 bp, Homo sapiens
atttgtctttctgggactggcttatttcactgagcataatgtcctcagggtttatccatattgtagcatgtgtcagaatttcctttctttttaaggctgaataatattccattggctgtatctaccacattttgattatccattcatctgtggacagatacttggatcgcttcccccttcttggctattgcaaagaatgctggcatgaacacagakgcacagtgattaagttcttgaatgttctgctttccacccatgaggttagactgggcatggtttgggtggcacagagtggaggggctggcctagctggatgccccttccccatgagggtaggagaggccaagtgcacagaatcctctgccgcactgattgagccaggagtcctaagactgggcctttcagtcatcctgggacgggtggagcttttctctgcatctaaaatgggagccataaaccaggctgacttacaggcagtacttactggtctggttgtttacggccagcgttttttctgattggttgatgcctgtactgtgcctgttgttaaatatttgaatatcatcctgctataaaccagctacaggacttctaacctggctgtgtgtgagcgtctcctgcagggagagtgggggctgctgtttaaaagtttatactctgggcttcccagtagccaacccagtcaagagggcctgggaatttgcattgtaaagctctacagtagttccaat

SEQ ID NO: 39450 - DNA, 1335 bp, Homo sapiens
cagtggttgctcttgtgctgtttcgtgggaagagagaaactggagtcaggacacctgggttctagtctgctggcttcaggccctacagctttcaaactagggagttgaacccagccccttccagggctgacatcccatgatcagaggatgaaacccagcaggagaaggtccttcccatccttcagcaccttatcgttctttgcaggatggcggagaagctctggtggctgcttccatccattcaattcctctcttggccatctcagccatctagggccctaataatgatggagtctgttgtgtgcagaacccaaggattggcacagggagtaagttacagggtggcaaatccaggtctatctaaggaagagcttcctaataataagactgcccacacacacccatgcacacacagtctatgcccctgccttgctgagaatgtgctgagctccccatccctggagttatgcaagcagaagtaggaggacyacttctctccagccatctagcactgcgtgttggggaagtgatgaatcagagggtcccaaacatgccccagcagaatttcccaggggactggttagaaagcatattcccaacctctgcaattgtgaatcagtaggctggggagagccagcccaggaagctgcattttttacaaactcctctggtaatggtgagaacagccaggtctggggagccttggaggatcccactagaggttttctgagaggtgctgaggggtagccaatcttggatgtgaactttcagcccctccatggctgcctggagacatgacccacctggacccaagtcctcaggccaggaacagcagggagtgggaggcggttcaaggctaggcattgccccgctgcctgcctctccttggcccccactccctctgaaagcctctgccgggtccagcccccagctcaggagaagctgggcaggtgtgtgtttgagtttgtttgttctcgttcccctcctgcccaccccactcccctcactaagctgttctccatgtaattatccattttatcagggtgaaaggccctgcaattcacttgtcgaagtcctaacgaggcagtgtagatgctttcaagtccataaagaaaagggaaatcctgctagaattggcaacttaattcaccaagccagcctcgacagacctcattaagtccccgtgtattcatttcaggctaatggctgtcatgctgactgctgtttgatttgctgtaatagacttttatggcgttccaatttgctcaaacgtgtttgcctgtgtctgtgcccagaggtgctgctccagtacctccgttaggggcgcgtgcccgc

SEQ ID NO: 39451 - DNA, 504 bp, Homo sapiens
acttttttttttctcttaagatatgtcctgtagctctttccacaatggtccccagagggtctgcctcctttttgtctgccagtgtgtatcccatggaatgatggcaacaatcgagcattaaaccragtgttgagctcttccaaacacagggctctatgtgacagcgcaggtcacacatccacggagcccgccctgactgtagatgatggtgcagggagaaggcaattcccattctccttgtaatgcccccagaaaagtgtcttttttttttttatgtccagagatcactttcttcttttattgggaagcagacccagagttagagtctccacaacctatagtcagggacagtaagcaaaatctgttctcttttgttctgaacccccacaccccaccccgacccatcagtcccacacaagaaaacctaatgtccaccaaaaagaggggcagattttgatcatctggcccagtcctccatccctgggccctactgctgtcaaacta

SEQ ID NO: 39452 - DNA, 586 bp, Homo sapiens
cctcccgagctgggaccccggcccaggataaaaggagctccatgtccctagaaacgtctggtagcagcccagggaggggtgtcagccaaggaccgccgggaccctcccagctcccacagtctcccctggtgtttgcacctggcactctgccctcaggcaggctcaggacagtgmgggagagaacgtctaatcagggttgtccatgtgttcataggctgtggcaagattttggtagggtggccataaatgaggccactgatgtcaacacgttgaatgcttattgcagaagataggcggaatgcagaaactagctagaagacaataaaacttcccataacctcaccactcacacaacaccctggcttcactccacagtgctgtatgcgcacactcccctgcatacattcacacactaggaatccaaacaccatcccctgttgcttcctagggacatcccacagttgagccagtccccttttgggtatctatcataagttacgcagcagtgggcatccctgtggcttggtgtccacgtacagctatggcaatttcctcagctgaggttcaggaggtggaattgctgggc

SEQ ID NO: 39453 - DNA, 588 bp, Homo sapiens
tgtttctgacaagcaagcagtgagcgcatgccttttgccaaagggagttctgcagccatttagtccagcctttagaaaacgaggtcttccgaagagaacagagctacaccttccccgtcagaatccactgttataaccacttagattaaaatgccccatttctcacagtatcattttgtcacagggtcacacttctctattcaactcagtttcaggcttttcttctaagaggaaaaaaagacgactaagtggcctcctagattccactgtaaaaacagaaaaaagcaggttgacttgctttgaaatcaaacgacctctgtcttcagtctgtccccatctcagagggaccagggaaaccacaggaaccctgctcactgctcttcacgcaaggtcccaaaaaaacagcgcctgttttccaggcactgcaggaagaccctgctcctctacaaggttccactaaatagtcttcgaaaaccagaagcaggkaagtgtcagccagatgcacacaggttttttgttgttgttatttttaaggcaccctaggttgtatttccttgaggatcatcaagaataaaaaaggcaaaaaaa

SEQ ID NO: 39454 - DNA, 554 bp, Homo sapiens
ccgtggaagcaagtacagcttcattgacacagggcaggaaattgttaagtacaggcgaggaggtgtttggtaatggcacacaggaatgtcacagagctcagggacagctgtgcatggggaagccgttttccaggtatactcggcccatcaattattctttgctaacaaaggccagagggggacccaaagcttccctgygccacaggagagagagatcacagagccccatggtaccttcgaagagacagcaatcagagcctactcagaagagcagactcccagagtaataaggcactgccaccagaatgttccagagtgcactggaggaaagcccctcctgagaaattgctacctgggtaggtaatgtatgtgcctggcccagttcccctctccagaggctactaaaaaggtgaactctgagaattcattctattaaatgccctaatatgtcacagactgcccggacatgaatggtactgaaagtaaaaagagatcgcagaggacacaggacttgaaagatgaaagactgggctagagcagaggtttttgaacag

SEQ ID NO: 39455 - DNA, 644 bp, Homo sapiens
tttagcaagccatctgggagattctggtgcaagtttgagaaccactgttctacaggctcggaaagttttaatctttcctaggagagtgctagagccttgtcctgtttacttattaatagttgtccttggccaggcatggtggttcacccctgtaatccccgcactttgggaggctgaggcgggcggatcacctgaggtcgggagtttgagaccaccctgaccaacatggagaaaccccatctctactaaaaatacagaattagccaggcatggtggcagatgcctgtaatcccgctactcgagaggctgaggcaggagagttgcttgaaccgggaggcaaaggttgcagtgagccgagatcgcgccattgcactccagcctgggcaacaagagcgaaactctgtcttaaaaaaaaaaaaracaaaaaaaaagttgtccttggccaggccccagtggctcacacctgtaatcttagcactttgcaaggccaaagtgggaggatcacttgagccgaggagttcaagaccagcctgggcaacaaagcaagacccccatctctacaaaaaaatttaaaaaaattagctgaacgtggtggcatgcacctgtagccccagctgcttgggagctgaggtgggagaatcacc

SEQ ID NO: 39456 - DNA, 644 bp, Homo sapiens
tttagcaagccatctgggagattctggtgcaagtttgagaaccactgttctacaggctcggaaagttttaatctttcctaggagagtgctagagccttgtcctgtttacttattaatagttgtccttggccaggcatggtggttcacccctgtaatccccgcactttgggaggctgaggcgggcggatcacctgaggtcgggagtttgagaccaccctgaccaacatggagaaaccccatctctactaaaaatacagaattagccaggcatggtggcagatgcctgtaatcccgctactcgagaggctgaggcaggagagttgcttgaaccgggaggcaaaggttgcagtgagccgagatcgcgccattgcactccagcctgggcaacaagagcgaaactctgtcttaaaaaaaaaaaagamaaaaaaaaagttgtccttggccaggccccagtggctcacacctgtaatcttagcactttgcaaggccaaagtgggaggatcacttgagccgaggagttcaagaccagcctgggcaacaaagcaagacccccatctctacaaaaaaatttaaaaaaattagctgaacgtggtggcatgcacctgtagccccagctgcttgggagctgaggtgggagaatcacc

SEQ ID NO: 39457 - DNA, 591 bp, Homo sapiens
gggcatggtggcttatgcctgtgatcccagcactttgggaggctgaggcgggcagatcatgagatcaggagatcaagaccatcctgcccaacatggtgaaaccccatctctactaaaaatacagaaattagccaggtgtggtggcgggtgcctgtagtcccagctacttgggaggctgaggcaggagaattgcttgaacccaagaggtggagcttgcagtgagccgagattgtgccactgcactccagcctggcaaygaagtgagagtccgtctcaaaaaaaaaaaaagaaaagaaaagaaaaagaaatgggctgtggcttgcccaagaccacagtctaagtcaagggtatttgatccacaaatctccatgtgcagtgtccgctggctttgggtcccactctcaactctacccttgttaggtgggcactgcccccctcaggttgcccctccatccaaatgcctcatcctccaagaaaagctggccaccctccaagagaggaggcactagggaagaggcgggaggaacccacatttggttgactgtcacctccgtgctggtgggacaccgggtggggaagagcaagggctct

SEQ ID NO: 39458 - DNA, 629 bp, Homo sapiens
aaaacaacagcctcaactgcgagaagatgattttcttatggtcttaccaccagaactgatccatctgctttcaatttcttgcactttaaaattcacttgtatatttgtatgtgtgtgattcattcacattttggcccctgcaaaaagctttggttacctatcaaacacaatatgaaatgctgtcagtttattcatctgtcccttyatgtagagaattgagaaggaggctgtggaaagcagctataaactgctgtggaaaacagctatttctgaaaaattcctagtattgaatttcaaaaactcaaagcagcataagatcagcccagagtgcagtatttctctgtggtttaagaaccatattacgtagtacatatatgttcttttattaggttaaaatttcaatataactaaaaaaatttgctaatcctctcatttattctgtttctcttcatttttcaagtactacacattactgttatgtttctgttgctaaaatattctaggcaaagtttaagtaagaatattcctaagtaaccaaaggtttaatttttaatttactttaccagaaaatcgcaaaagaatagggttgacattatctatagttaaaaatgtgattgttagagaaaaag

SEQ ID NO: 39459 - DNA, 629 bp, Homo sapiens
aaaacaacagcctcaactgcgagaagatgattttcttatggtcttaccaccagaactgatccatctgctttcaatttcttgcactttaaaattcacttgtatatttgtatgtgtgtgattcattcacattttggcccctgcaaaaagctttggttacctatcaaacacaatatgaaatgctgtcagtttattcatctgtcccttcatgtagagaattgagaaggaggctgtggaaagcagctataaactgctgtggaaaacagctatttctgaaaaattcctagtattgaatttcaaaaactcaaagcagcataagatcagcccagagtgcagtatttctctgtggtttaagaaccatattacgtagtacatatatgttcttttattaggttaaaatttcaatataactaaaaaawtttgctaatcctctcatttattctgtttctcttcatttttcaagtactacacattactgttatgtttctgttgctaaaatattctaggcaaagtttaagtaagaatattcctaagtaaccaaaggtttaatttttaatttactttaccagaaaatcgcaaaagaatagggttgacattatctatagttaaaaatgtgattgttagagaaaaag

SEQ ID NO: 39460 - DNA, 553 bp, Homo sapiens
ataattttgccttatttttttcatttttagaattgtgtaattttattaagtccaaattaaataaagtatttgaggatctgcaaaatccaacatacactctaattcagttccaattaaaatagtgttatttttatgcatgaaaaggaacagtgtgttcatcttagttacttatctattaagatttggtctgtgtcattaagacttcttcaaagcaagggttgtaattatttcaactgatgaagcagatgccgcattaaaagaatgtgaaatttgtgtcattattttattgactcagagtttatgaagattcagcgagttattgcactgctcacaaatgtcttcttcctgcagttatgatagacatcaattagcaaggccaggacaaagtagagcaagtcatgatcattttaaattaaaacatcctaaatattctgcacttaaaaattccaactacaatccagkagaatgattttgagtccaaaaggtgacatcagattgtgctgagaatgaggattatgtatcgcctggtctctagggcctcatctgccttttc

SEQ ID NO: 39461 - DNA, 1235 bp, Homo sapiens
  misc_feature (1)...(1235): n = A,T,C or G
tgcattacgcactgcttttatttggagtttttcgaagagcatatatgtcaaagccttattatatcttaacatactatttctcagttcaccagccaccttaagaatcttataaataaacccagattcaggatagttccacagaattctcacatataagaaatgaaggaagtcattaattattacattaaaaccacccactttacaagtgaagagactcaaagaccagaaagatccccttatttttctaagttacagaaataatttgagtagggttagcatacggtattctattctggcttataaaatttaaaataccacttaccaaaacaaagtacagcattgaggtatgatagggtactttataaagaaaatagaacatcaaactgcctttaataccaaagccatgtccccactgtaatcaagacgctagtccagaggcctctctaaatcatgtatgcaaataatattttcttaatgccaaaaataacatattaagaggatattttcctataagatcttttaatcttaaagacaacacaaacaattattttattgttcatctttgttggcaagagaagtggagaaaaatgctgttaagccagtaaaacaggaatctcttagacacttctccctatgaaccaaaaaaagattgtcttagagcaaaatatatgttggctttaagtcctcaagtatttcatctgattttaattgcttttaatgctaaaaatttaaggcatcaatttcaggtccagaaatattttgtagatatatagaatcttgttttgacattttaagagttcagagagaagagagaagtcgaacaacagtcgtagaatataatgatagaataatagtagaaatgtatcattgaatgttgtaagaaattaaatatggttgttttgtggaagaacacaatgtgttctctatccaaattatcatgtagcaagaaatggaaatctcagctacctctatagcttggaaaaataaatacatgggttgagaaattcaaagcaattgaactcaygttggtgttgtccataaatatgaaataccacatctagaggggtaagactactttgcaatatagatcataggcttttatattttactcagtataattcatgaaaatcccttttctttagtttcagatctattataggcttaatannaagttaaaattcttaaaatacttctngcacttctttcacctacacaaattaaaatacttctanntt

SEQ ID NO: 39462 - DNA, 1006 bp, Homo sapiens
cataatgctattgcacgcttaatagactacaatatagcataaacataatttttacatgcactgggaaaccaaaaactgtgcgtgactggctttattgccttatttgcttcattgcagtgaacttgcagtatctccgaggtatgactgtaccaaatcaaagcactctttttgtaatcagccctcaaaattgtcagtccatgtttgtgcgttcttgcttttgttctgggaggttgttttaggaaatgtttagatctttgttttaagaaaaggtcagatgctaagcagattggaagctggggtagaaaaccacaagattctgaagttcattctgccagtaatataaaaggaaacccttagaggcaatgtcagcaggcagggcttagtaaagttcaccgaacttggagctcctcccctgcatatctgtccctcatctctctgatactgctccctagcggtgagggcggatggtcgaggttggtcccagcaacctcctggtatgtcaatgttttccttctcccttaggtacttaaaggatactatttaggcaggaggaaaagatacctttaaaaagagaagcttgctttctagtcatgtagatgctgagtctaataaaagtttcgattttttactttttattttttttgagacagagtctcgctctgttgcctaggctgcagtgcagtggcatgatcttggctcactgcaacccccacctccgggattcaagcaactctcctgcttcagcctcctgagtagctgggactacaggcgtgcgccaccatgcccagttaatttttggattttttgtagagacagggcttcaccatgttggccaggctgatttcaaactcccgcctcagcctcccaaagtgctgggattacaggcgtgagccactgcacctggyccatcagttttttattcttgttttgtctccattcttcattgagcgaaggggctataccctctcatttattctttagatagctttgttgccaactgcttttt

SEQ ID NO: 39463 - DNA, 591 bp, Homo sapiens
tggcgggcacctgtagtcccagctactcgggaggctgaggcaggagaatggtgtgaacccagaaggcggagcttgcagtgagccgagattgcgccactgcactccagcctgggtgacagagcaagactccgtgtcaaaaaaaaaaaaaaaaaaaawaaatatatatatatatatatatatatatatatatattcaggaatagaacactgaaaacagcaaataaatgtacaagcttttgaaaattgaattaatttttgtgaaagtcaaattaaaccaactgttctgagatcaatactacattgaatcaagcttatttataattgtatattaaattgtaactatgttaccactagatgtcacaaagattcaattttaaaagccttttgaggtagtcattttgaaatatatttttcttaaacagaaataagcctttctagtatttgcaaatataaggaataacttttaaatttttaaattgtaaaatagtccaaatatgcagaagagtacacagaataatataagcaatgtcttttatcccaatccagaattaacaaatattaccattttaccatatattggcggcttttttaa

SEQ ID NO: 39464 - DNA, 591 bp, Homo sapiens
tggcgggcacctgtagtcccagctactcgggaggctgaggcaggagaatggtgtgaacccagaaggcggagcttgcagtgagccgagattgcgccactgcactccagcctgggtgacagagcaagactccgtgtcaaaaaaaaaaaaaaaaaaaaaawatatatatatatatatatatatatatatatatattcaggaatagaacactgaaaacagcaaataaatgtacaagcttttgaaaattgaattaatttttgtgaaagtcaaattaaaccaactgttctgagatcaatactacattgaatcaagcttatttataattgtatattaaattgtaactatgttaccactagatgtcacaaagattcaattttaaaagccttttgaggtagtcattttgaaatatatttttcttaaacagaaataagcctttctagtatttgcaaatataaggaataacttttaaatttttaaattgtaaaatagtccaaatatgcagaagagtacacagaataatataagcaatgtcttttatcccaatccagaattaacaaatattaccattttaccatatattggcggcttttttaa

SEQ ID NO: 39465 - DNA, 1343 bp, Homo sapiens
cagaattcatgttgctctggtaggtgctcttatcaagccaatctctgatccttctcagtgcctcaaactagaccctattcagaaatattataacaagttagtgtgagtttattttggtgtaaaaaaaatttgaagtccatgcacagttttttcataatacacattttccatgaactttttgaagccccctcataaataattcaaaaatacatttgggaaaatttgagaaattatgtagggcctggtggtaattgggcatttggactggcagggtcatgtggtggctcaatgagaagccagaaagcaactctttcccattttctgggtgggggctccagcccctgagtggggataaggaggaaagcagcccttcatggaagctggctcaggagttcacccaggcttcctggagaaggggacagaagaggatgtctccttcccatgaactccacatttgagttcactggaaacataggctctgggaatggaggggaagagggcagaggaaaggctggcagctgaggtggggtataaagggaggggagtgtcagaggaggctgcgtccacgcctggaggtcagagggcaaatgcccccaatcacgctccatctgggttatcagctgcttgaggatccatgtccagaaactcggggaatcactgtgtccgttttccttgcctcgggactgtgcctcttgtctggagatgatgaggtttctttcagcctcccatgctctccaccaatgatcatgagtttccattcgagacacagaatctggctttgagaataagaaacagttccctccagcttttyttcaagagcctcaagtcaccttctgtaactccagatcacaagctggacccatccagggcagcaggcactcctgggctttgacctcctctgtctcgaggtgaaactcggtgagggttttacattccactgaactactgctggactgcagtggcacgtccctgatctctgcacagaatgtctttcatcccctggttaaacaagtctgtcaaaaacaagagaactttcaccacacgcataccatgacaccctcaccacctcccagggtgatccaggccgagcaaaacttgtgctcacctgcttctgcctcaagctccatggagtctgctgggttcaccaataaagcagctcacgcgaggctgaaggtcctcccccatttcccaggctgctgcagagcttcttgcagccaccatggccagctgggccgaaacactgagaccactgaccacggtctgcccagaaccacacccgtgcctggcaacagggcagactatcactggagaggcgtgggggcacagcgacaatagaatcacac

SEQ ID NO: 39466 - DNA, 667 bp, Homo sapiens
aaaaccaacattcagttcagaaagttaaaaatggaaaagaaacacaaggaaagcagagaaacagaaatgagatcaaaacgaattaaaatgtcttagaaactgtgaaggctttgatgcaaaaatccaaaaacaaaaaaaaatggcttctttcctttcttttaagagaggagcagaaatatacaattaaagatgagatcaaacagaaaaccaaagacatagaagagaactaagttcagagctgctttgtagagctcagtgctagaggtggagagagctggccatgcctgctgggaggggcggggcagcccaggaagtgggagtggggtcggcctggtgggggtygggaggtggggccctgaagctgctgctgggctacttttcgcccaagggtgaagatggaacagccctgggttgtctatacaggtcgaggcctccacctcatcccaccccacttactctcccgaggagggcatggataccatgccagggggcctgaagagggttgcagagccctggaggaggccagggccaggggctgccacgggaagtggaaggcagcgggccccactcctcccagagaggcttctgggaagcctgcacagagcctgggagtccagggctgcccctcctgctggagaatacactgttcagaactaaaggaacagcg

SEQ ID NO: 39467 - DNA, 1177 bp, Homo sapiens
cttctgtataacaatggttatttgaaagctctgtgaatatttcatatcatctaagaggcaagaaaaagactgtaatcaacttgcagcaaaacgtccctgaacagggaaaaaagactttctttgttagattgtattaattaggacagcccagcagccaagcgtgtgggcccgtaacaggcagacgtcagtgccacctcctggtgtctgcccttggcccagccattaatttctctgaaccttaagtgttttctcatccataacatggggattatgaaagtgtccaactcatggggtactgtgagaatgaaatgagataatgcaattaagcacttagcacagtgcttggtacacgttaaacagccaaatatgtcagttacctttattgaaaactaacataaactttttctttttttctgttgagagacagggtcttcctctgttgcccagagtggagcagtggtgcagtcatggctcactgcagcctctacctcctgggctcaggccatcatcccacttcagcctcctaagtagctgggaccacaggtgcatgtcaccrtgcccagctaatttttaaattttttgtagagacagtttcgctatgttgccaaggctggtcttgaactcctggcctcaagtgatgctctcgccttggcctcttgaagtgttgggattacgggcgtgagccacctcctggcttaaaataatcctttttaataatgtatttctttcttttttctctttttcttttcttttctttttttttttttttttgagacagtctcactctgttgccccatctggaatgcagtggctgatctcagcccactgcaacctccgcctcccgggttcaagcaattcttctgcctcagcctcctgagtagctgggacaacaggtgcgcgccatcacacccagctaatttttgtatttttggtagagacagggttttaccatgttggccaggctggtcttgaactcttgaccttaggtgatccgcccaccttggcctcccaaagtgctgggattacagggatgagccaccacgcccggctaatgtctgtctcttttctaaagcatttgtagaggaatcaacttgtgtggtaagaaggagaattttcataatccctttagaaaagtgtggaacatctgatgaacatgtgccctttgggggaagatgca

SEQ ID NO: 39468 - DNA, 1869 bp, Homo sapiens
ctaaatactaagttaaatatctgaagtatgcactgataacaatcatatttggtttctgaaaaatactgaatactacttgaaaagggctcaaaggatcttatatgaaaaaatatttgttccaagtgaatagattttttaaaaatcagattttttggctgggcgtggtggctcacgcctgtaatcccagcactttgggaggccgaggtgggcagatcaygaggtcaggagatcaagaccatcctggttaacatggtaaaaccctgtctctactaaaaaaaaaaaaaaaaaattagccgggcgtggtggcatgtgcctgtagtcccagatactcgggaggctgagacaggagaatcacttgaacccaggaggcagaggctgtagtgagacgagatcgctccactgtgctccagcctgggcaacagagcgagactccatctcaaaaaaaaaaaaaaaaaaaaaaaaaacagattttttttaaaaccagtaacaccagagtatttcctaaaatctaagacaaatttgtcttttaacatctccttttttcattaacaaagattgtcaataacattggtttatatgcaaatatgtgaatacttgcacatatattgaaaatcaagctaaagggacccttaatgtgccttggattgggactgggctgacttgtggctttcctggagtccatcactgggatgtgtgtggcaacccaaagctgagtccttctccctaccttgtgacacttttcacagttctgttgaatctgatactcttcctgtttcagcatttctgtcatttccatttccttgaggctactgtcatattcctcctgcaggtggatcttcttttccctattctggggtgaggtgacagagtcaaatcaggtcagcaaccagggaagccttataaacggggccccctcactggggactgatatgggctgtgggctctttgggcctgttgagtttcctcttgtaactagctttagcctgctagtagttacaaacccttcaactccacagctcgtctgagttgaagctccactcctctgagttagcccccaggatccccatgcttcagggatatctggctctaagagcaagtcaaataaaccaagaaattccccaggccagctccagaatcctgccttgtgtcttggctttcaaattactctgggaaagctgggccctccctaagtcccagtgcacatacacacctcttcttttgcttttgctgttttcctgtaatgataaagccagtgagccaggtattctattgggtcactgggccgaaccttcgccacctctgccagtgcctgggccaggcaatttccaaagcacctcttcaggtagttagtttccatcctggcagcctggaaaacatcaaaacaaagtcacactattttacaaacttaatctgatattaaaaatagacacattctaaccaattcagatttatttcaggataaatatgagatgcttctggatcacacctttcccaaaagaaccaacaaacacttacttgctgttatattcagtggaggattgtgccatgaaacaacctaggacctggcctcctcctgacggagtccatattcctgaagttgacacattttaattccaaaagagcccagcaaataataaaagctcagatctagccttaacattttctggaggcatttttcaatttgtccccctacttctcatattttagcttaaggaaggaaaaacaagtagacagatatccatatctatcttatacatatctatcttatggacataggaaaaaatatttcctagctctctccactgcaagggccttgaaaccaaaacacttcagtagcaatgagcacgctaagcatataaaccttgcttg

SEQ ID NO: 39469 - DNA, 1869 bp, Homo sapiens
ctaaatactaagttaaatatctgaagtatgcactgataacaatcatatttggtttctgaaaaatactgaatactacttgaaaagggctcaaaggatcttatatgaaaaaatatttgttccaagtgaatagattttttaaaaatcagattttttggctgggcgtggtggctcacgcctgtaatcccagcactttgggaggccgaggtgggcagatcatgaggtcaggagatcaagaccatcctggttaacatggtaaaaccctgtctctactaaaaaaaaaaaaaaaaaattagccgggcrtggtggcatgtgcctgtagtcccagatactcgggaggctgagacaggagaatcacttgaacccaggaggcagaggctgtagtgagacgagatcgctccactgtgctccagcctgggcaacagagcgagactccatctcaaaaaaaaaaaaaaaaaaaaaaaaaacagattttttttaaaaccagtaacaccagagtatttcctaaaatctaagacaaatttgtcttttaacatctccttttttcattaacaaagattgtcaataacattggtttatatgcaaatatgtgaatacttgcacatatattgaaaatcaagctaaagggacccttaatgtgccttggattgggactgggctgacttgtggctttcctggagtccatcactgggatgtgtgtggcaacccaaagctgagtccttctccctaccttgtgacacttttcacagttctgttgaatctgatactcttcctgtttcagcatttctgtcatttccatttccttgaggctactgtcatattcctcctgcaggtggatcttcttttccctattctggggtgaggtgacagagtcaaatcaggtcagcaaccagggaagccttataaacggggccccctcactggggactgatatgggctgtgggctctttgggcctgttgagtttcctcttgtaactagctttagcctgctagtagttacaaacccttcaactccacagctcgtctgagttgaagctccactcctctgagttagcccccaggatccccatgcttcagggatatctggctctaagagcaagtcaaataaaccaagaaattccccaggccagctccagaatcctgccttgtgtcttggctttcaaattactctgggaaagctgggccctccctaagtcccagtgcacatacacacctcttcttttgcttttgctgttttcctgtaatgataaagccagtgagccaggtattctattgggtcactgggccgaaccttcgccacctctgccagtgcctgggccaggcaatttccaaagcacctcttcaggtagttagtttccatcctggcagcctggaaaacatcaaaacaaagtcacactattttacaaacttaatctgatattaaaaatagacacattctaaccaattcagatttatttcaggataaatatgagatgcttctggatcacacctttcccaaaagaaccaacaaacacttacttgctgttatattcagtggaggattgtgccatgaaacaacctaggacctggcctcctcctgacggagtccatattcctgaagttgacacattttaattccaaaagagcccagcaaataataaaagctcagatctagccttaacattttctggaggcatttttcaatttgtccccctacttctcatattttagcttaaggaaggaaaaacaagtagacagatatccatatctatcttatacatatctatcttatggacataggaaaaaatatttcctagctctctccactgcaagggccttgaaaccaaaacacttcagtagcaatgagcacgctaagcatataaaccttgcttg

SEQ ID NO: 39470 - DNA, 1869 bp, Homo sapiens
ctaaatactaagttaaatatctgaagtatgcactgataacaatcatatttggtttctgaaaaatactgaatactacttgaaaagggctcaaaggatcttatatgaaaaaatatttgttccaagtgaatagattttttaaaaatcagattttttggctgggcgtggtggctcacgcctgtaatcccagcactttgggaggccgaggtgggcagatcatgaggtcaggagatcaagaccatcctggttaacatggtaaaaccctgtctctactaaaaaaaaaaaaaaaaaattagccgggcgtggtggcatgtgcctgtagtcccagatactcgggaggctgagacaggagaatcacttgaacccaggaggcagaggctgtagtgagacgagatcgctccactgtgctccagcctgggcaacagagcgagactccatctcaaaaaaaaaaaaaaaaaaaaaaaaaacagattttttttaaaaccagtaacaccagagtatttcctaaaatctaagacaaatttgtcttttaacatctccttttttcattaacaaagattgtcaataacattggtttatatgcaaatatgtgaatacttgcacatatattgaaaatcaagctaaagggacccttaatgtgccttggattgggactgggctgacttgtggctttcctggagtccatcactgggatgtgtgtggcaacccaaagctgagtccttctccctaccttgtgacacttttcacagttctgttgaatctgataytcttcctgtttcagcatttctgtcatttccatttccttgaggctactgtcatattcctcctgcaggtggatcttcttttccctattctggggtgaggtgacagagtcaaatcaggtcagcaaccagggaagccttataaacggggccccctcactggggactgatatgggctgtgggctctttgggcctgttgagtttcctcttgtaactagctttagcctgctagtagttacaaacccttcaactccacagctcgtctgagttgaagctccactcctctgagttagcccccaggatccccatgcttcagggatatctggctctaagagcaagtcaaataaaccaagaaattccccaggccagctccagaatcctgccttgtgtcttggctttcaaattactctgggaaagctgggccctccctaagtcccagtgcacatacacacctcttcttttgcttttgctgttttcctgtaatgataaagccagtgagccaggtattctattgggtcactgggccgaaccttcgccacctctgccagtgcctgggccaggcaatttccaaagcacctcttcaggtagttagtttccatcctggcagcctggaaaacatcaaaacaaagtcacactattttacaaacttaatctgatattaaaaatagacacattctaaccaattcagatttatttcaggataaatatgagatgcttctggatcacacctttcccaaaagaaccaacaaacacttacttgctgttatattcagtggaggattgtgccatgaaacaacctaggacctggcctcctcctgacggagtccatattcctgaagttgacacattttaattccaaaagagcccagcaaataataaaagctcagatctagccttaacattttctggaggcatttttcaatttgtccccctacttctcatattttagcttaaggaaggaaaaacaagtagacagatatccatatctatcttatacatatctatcttatggacataggaaaaaatatttcctagctctctccactgcaagggccttgaaaccaaaacacttcagtagcaatgagcacgctaagcatataaaccttgcttg

SEQ ID NO: 39471 - DNA, 1869 bp, Homo sapiens
ctaaatactaagttaaatatctgaagtatgcactgataacaatcatatttggtttctgaaaaatactgaatactacttgaaaagggctcaaaggatcttatatgaaaaaatatttgttccaagtgaatagattttttaaaaatcagattttttggctgggcgtggtggctcacgcctgtaatcccagcactttgggaggccgaggtgggcagatcatgaggtcaggagatcaagaccatcctggttaacatggtaaaaccctgtctctactaaaaaaaaaaaaaaaaaattagccgggcgtggtggcatgtgcctgtagtcccagatactcgggaggctgagacaggagaatcacttgaacccaggaggcagaggctgtagtgagacgagatcgctccactgtgctccagcctgggcaacagagcgagactccatctcaaaaaaaaaaaaaaaaaaaaaaaaaacagattttttttaaaaccagtaacaccagagtatttcctaaaatctaagacaaatttgtcttttaacatctccttttttcattaacaaagattgtcaataacattggtttatatgcaaatatgtgaatacttgcacatatattgaaaatcaagctaaagggacccttaatgtgccttggattgggactgggctgacttgtggctttcctggagtccatcactgggatgtgtgtggcaacccaaagctgagtccttctccctaccttgtgacacttttcacagttctgttgaatctgatactcttcctgtttcagcatttctgtcatttccatttccttgaggctactgtcatattcctcctgcaggtggatcttcttttccctattctggggtgaggtgacagagtcaaatcaggtcagcaaccagggaagccttataaacggggccccctcactggggactgatatgggctgtgggctctttgggcctgttgagtttcctcttgtaactagctttagcctgctagtagttacaaacccttcaactccacagctcgtctgagttgaagcyccactcctctgagttagcccccaggatccccatgcttcagggatatctggctctaagagcaagtcaaataaaccaagaaattccccaggccagctccagaatcctgccttgtgtcttggctttcaaattactctgggaaagctgggccctccctaagtcccagtgcacatacacacctcttcttttgcttttgctgttttcctgtaatgataaagccagtgagccaggtattctattgggtcactgggccgaaccttcgccacctctgccagtgcctgggccaggcaatttccaaagcacctcttcaggtagttagtttccatcctggcagcctggaaaacatcaaaacaaagtcacactattttacaaacttaatctgatattaaaaatagacacattctaaccaattcagatttatttcaggataaatatgagatgcttctggatcacacctttcccaaaagaaccaacaaacacttacttgctgttatattcagtggaggattgtgccatgaaacaacctaggacctggcctcctcctgacggagtccatattcctgaagttgacacattttaattccaaaagagcccagcaaataataaaagctcagatctagccttaacattttctggaggcatttttcaatttgtccccctacttctcatattttagcttaaggaaggaaaaacaagtagacagatatccatatctatcttatacatatctatcttatggacataggaaaaaatatttcctagctctctccactgcaagggccttgaaaccaaaacacttcagtagcaatgagcacgctaagcatataaaccttgcttg

SEQ ID NO: 39472 - DNA, 1869 bp, Homo sapiens
ctaaatactaagttaaatatctgaagtatgcactgataacaatcatatttggtttctgaaaaatactgaatactacttgaaaagggctcaaaggatcttatatgaaaaaatatttgttccaagtgaatagattttttaaaaatcagattttttggctgggcgtggtggctcacgcctgtaatcccagcactttgggaggccgaggtgggcagatcatgaggtcaggagatcaagaccatcctggttaacatggtaaaaccctgtctctactaaaaaaaaaaaaaaaaaattagccgggcgtggtggcatgtgcctgtagtcccagatactcgggaggctgagacaggagaatcacttgaacccaggaggcagaggctgtagtgagacgagatcgctccactgtgctccagcctgggcaacagagcgagactccatctcaaaaaaaaaaaaaaaaaaaaaaaaaacagattttttttaaaaccagtaacaccagagtatttcctaaaatctaagacaaatttgtcttttaacatctccttttttcattaacaaagattgtcaataacattggtttatatgcaaatatgtgaatacttgcacatatattgaaaatcaagctaaagggacccttaatgtgccttggattgggactgggctgacttgtggctttcctggagtccatcactgggatgtgtgtggcaacccaaagctgagtccttctccctaccttgtgacacttttcacagttctgttgaatctgatactcttcctgtttcagcatttctgtcatttccatttccttgaggctactgtcatattcctcctgcaggtggatcttcttttccctattctggggtgaggtgacagagtcaaatcaggtcagcaaccagggaagccttataaacggggccccctcactggggactgatatgggctgtgggctctttgggcctgttgagtttcctcttgtaactagctttagcctgctagtagttacaaacccttcaactccacagctcgtctgagttgaagctccactcctctgagttagcccccaggatccccatgcttcagggatatctggctctaagagcaagtcaaataaaccaagaaattccccaggccagctccagaatcctgccttgtgtcttggctttcaaattactctgggaaagctgggccctccctaagtcccagtgcacatacacacctcttcttttgcttttgctgttttcctgtaatgataaagccagtgagccaggtattctattgggtcactgggccgaaccttcgccacctctgccagtgcctgggccaggcaatttccaaagcacctcttcaggtagttagtttccatcctggcagcctggaaaacatcaaaacaaagtcacactattttacaaacttaatctgatattaaaaatagacacattctaaccaattcagatttatttcaggataaatatgagatgcttctggatcacacctttcccaaaagaaccaacaaacacttacttgctgttatattcagtggaggattgtgccatgaaacaacctaggacctggcctcctcctgacggagtccatattcctgaagttgacacattttaattccaaaagagcccagcaaataataaaagctcagatctagccttaacattttctggaggcatttttcaatttgtccccctacttctcatattttagcttaaggaaggaaaaacaagtagacagatatccatatctatcttawacatatctatcttatggacataggaaaaaatatttcctagctctctccactgcaagggccttgaaaccaaaacacttcagtagcaatgagcacgctaagcatataaaccttgcttg

SEQ ID NO: 39473 - DNA, 1869 bp, Homo sapiens
ctaaatactaagttaaatatctgaagtatgcactgataacaatcatatttggtttctgaaaaatactgaatactacttgaaaagggctcaaaggatcttatatgaaaaaatatttgttccaagtgaatagattttttaaaaatcagattttttggctgggcgtggtggctcacgcctgtaatcccagcactttgggaggccgaggtgggcagatcatgaggtcaggagatcaagaccatcctggttaacatggtaaaaccctgtctctactaaaaaaaaaaaaaaaaaattagccgggcgtggtggcatgtgcctgtagtcccagatactcgggaggctgagacaggagaatcacttgaacccaggaggcagaggctgtagtgagacgagatcgctccactgtgctccagcctgggcaacagagcgagactccatctcaaaaaaaaaaaaaaaaaaaaaaaaaacagattttttttaaaaccagtaacaccagagtatttcctaaaatctaagacaaatttgtcttttaacatctccttttttcattaacaaagattgtcaataacattggtttatatgcaaatatgtgaatacttgcacatatattgaaaatcaagctaaagggacccttaatgtgccttggattgggactgggctgacttgtggctttcctggagtccatcactgggatgtgtgtggcaacccaaagctgagtccttctccctaccttgtgacacttttcacagttctgttgaatctgatactcttcctgtttcagcatttctgtcatttccatttccttgaggctactgtcatattcctcctgcaggtggatcttcttttccctattctggggtgaggtgacagagtcaaatcaggtcagcaaccagggaagccttataaacggggccccctcactggggactgatatgggctgtgggctctttgggcctgttgagtttcctcttgtaactagctttagcctgctagtagttacaaacccttcaactccacagctcgtctgagttgaagctccactcctctgagttagcccccaggatccccatgcttcagggatatctggctctaagagcaagtcaaataaaccaagaaattccccaggccagctccagaatcctgccttgtgtcttggctttcaaattactctgggaaagctgggccctccctaagtcccagtgcacatacacacctcttcttttgcttttgctgttttcctgtaatgataaagccagtgagccaggtattctattgggtcactgggccgaaccttcgccacctctgccagtgcctgggccaggcaatttccaaagcacctcttcaggtagttagtttccatcctggcagcctggaaaacatcaaaacaaagtcacactattttacaaacttaatctgatattaaaaatagacacattctaaccaattcagatttatttcaggataaatatgagatgcttctggatcacacctttcccaaaagaaccaacaaacacttacttgctgttatattcagtggaggattgtgccatgaaacaacctaggacctggcctcctcctgacggagtccatattcctgaagttgacacattttaattccaaaagagcccagcaaataataaaagctcagatctagccttaacattttctggaggcatttttcaatttgtccccctacttctcatattttagcttaaggaaggaaaaacaagtagacagatatccatatctatcttatacatatctatcttatggacataggaaaaaayatttcctagctctctccactgcaagggccttgaaaccaaaacacttcagtagcaatgagcacgctaagcatataaaccttgcttg

SEQ ID NO: 39474 - DNA, 724 bp, Homo sapiens
ggaggatcacttgagcccaggaggttgtggctgcaatgcgttgagatctcaccactgcactccaacctgggtgacagagcgagaccctgtctaaaaaaaaaaaaaaagaaagaaagaaaagaagaagaaagaattctataaagggcattgttgggaaaattggttgaactgaatgtgaaatgtagattatgtgacataatttatccaagttaaatttcttaattttgaataatggaaatatgagtaagagaatgtccttgttctagggctgaataatggctcccaaatgtgtctatgtctgaatacctggaaactatgaatatgtcaccttaaatggcaaaagagactttgtaactgtgattaaattaaggatcttgagatagggggattatcctggattatctgagtaggaacaatgtaatcacaggtgtcactataagagggacacagtacggtcagacagggaaggtgatgacagagccaagggagaaaaagcgatgtgattcagggccttgagccaagrgtatcctctagaagctggaaaagacaagaaaatggattctccccagagcctcctgaggaacctgccctgctgacactttggttttagctctataagattcattttggacttctgaccccaagacctgtaagggaattaaaaaaaaattgagtggggtagtgatggagggtggggacagaggtgggtggtgtctcctgccaa

SEQ ID NO: 39475 - DNA, 629 bp, Homo sapiens
tgaatacatttgcagattccaacagcattaaaaagtgcctatctctaaaacagagtttatttcacttttcctagaagttttttatcctcttcactttttttttttttttttaagagatggggtcttaccatgttgcccaggctggtcttkaactcctgggctccagccgtcctcctgaagttctgggattacaaatatgatccatgatacctggcctcctcttcacttctttagtataataaagtggcttcactgttgtccaaatgctccaatttatagtgtgggagtcattcttaactcttctgtggttgccatgcttctagaccaatacagtgagcctaatactcactcctctttctctcatgttctgaagccgcaagtgattggtttcttaactagtcattttcctgctgtcactgtcttcagctccttgtcaaaatataaaagatcagcttaatacattatttagaatcatgtggggccttcacagctactttccacatgaaatgctttaaaaggggttataccgattgcaatcaatggccatccactctttacctagtttttctcatttcgacacatctcttttagttgtcccccttctgagcacttagctagattctgagtgc

SEQ ID NO: 39476 - DNA, 1273 bp, Homo sapiens
tcttatttttatgtaacttaatatcttcaatctattttatttgttcctactttatagacattgctaatgtacagatgaatcttttttctaattaaaaagaagtttgatatttatcagttaatgctattttgactcaattttaaatattttactagatatatgtatgaacaaaatgcacacagtttatatagaccttgtatcttttaacaaaaatgattttcaaactaggtgagatcccctcataacttttatttctattttagttaacaaaaacgttacttgacaaactaagtaaatgttttctctctaacattttaaaatgcctactctcctaaatatctgtttttttttttttcaattttcataacattatgagagtggaaaacaagaagtagaagagaagaaagagctagagaagattttagccttagcatgccatggggaaaagtccatgattcctcatatgttcagaggttgaagtgaaccttcaaacacgggaaattttatgagattattttaggttttgtaattatatatcccatttatttttatcttgttggtttataataggaaacgttatcattatccataactgtttcattagaaataggtactctgcccaatgatacattggaggtgtaggaaaattaaaattgtgaaagactttaaactgaccgaaaagatcatgacagttttctctaagtcactcttccaggctatctcattctttcattatttttgagatatttcacaactccgtaagtgtaggcactgataacattgcaaatgwttctttcccatagaaatatgaataattttatcagtaaaactgaattaactattgccgtgcagataagcccattttgcatctatttgcaaatttattgtagcttgactcttttacactcttaaaatttgttgagtattttaggagctttaaaatgtgtgggctataagtgtttatgtttattatgttgaaaatagaaataagaaatcttaaaacgtttattggttcattttaaggtaacagtaatgaacacatcacatgatagcagaaataacacttcaatgttatgggtagacaggcatgagtggagcaagagagggctctctccccacacacgagaaatgttgggtgatggtttggcaattaccacattgcttctctaaaagtgataaattggcagtcagcacctgggagacgacagctcttgatggcctacatctgttatattaaagttttaattaaagcaggttcccaaagagaagcaac

SEQ ID NO: 39477 - DNA, 1273 bp, Homo sapiens
tcttatttttatgtaacttaatatcttcaatctattttatttgttcctactttatagacattgctaatgtacagatgaatcttttttctaattaaaaagaagtttgatatttatcagttaatgctattttgactcaattttaaatattttactagatatatgtatgaacaaaatgcacacagtttatatagaccttgtatcttttaacaaaaatgattttcaaactaggtgagatcccctcataacttttatttctattttagttaacaaaaacgttacttgacaaactaagtaaatgttttctctctaacattttaaaatgcctactctcctaaatatctgtttttttttttttcaattttcataacattatgagagtggaaaacaagaagtagaagagaagaaagagctagagaagattttagccttagcatgccatggggaaaagtccatgattcctcatatgttcagaggttgaagtgaaccttcaaacacgggaaattttatgagattattttaggttttgtaattatatatcccatttatttttatcttgttggtttataataggaaacgttatcattatccataactgtttcattagaaataggtactctgcccaatgatacattggaggtgtaggaaaattaaaattgtgaaagactttaaactgaccgaaaagatcatgacagttttctctaagtcactcttccaggctatctcattctttcattatttttgagatatttcacaactccgtaagtgtaggcactgataacattgcaaatgtttctttcccatagaaatatgaataattttatcagtaaaactgaattaactattgmcgtgcagataagcccattttgcatctatttgcaaatttattgtagcttgactcttttacactcttaaaatttgttgagtattttaggagctttaaaatgtgtgggctataagtgtttatgtttattatgttgaaaatagaaataagaaatcttaaaacgtttattggttcattttaaggtaacagtaatgaacacatcacatgatagcagaaataacacttcaatgttatgggtagacaggcatgagtggagcaagagagggctctctccccacacacgagaaatgttgggtgatggtttggcaattaccacattgcttctctaaaagtgataaattggcagtcagcacctgggagacgacagctcttgatggcctacatctgttatattaaagttttaattaaagcaggttcccaaagagaagcaac

SEQ ID NO: 39478 - DNA, 582 bp, Homo sapiens
gaaagcactccagctcccaatcagagaaacacactctgcttccacagaagtaatagacccaaaaggagtgtgtgcctgggaaggagaaaaaagaagactacctataaggttataaacttgacatccagataataccaatttctatttgttgagctctctgcaatgacagatagaatatattgggattttcatgtaaatgattgcaatcaatacaagaacatgggtagatgatacyccattttgtaaattaattagctaaggatcagaaaagataagtagctttattgtgttccaacattaaaaagcaacagacctgtaacatgatattttttgtttccggtttgaatggtctttcaattttactctgttccttcccctccaactcctttgatacagggatgaaggagagtttttcaaaaatgatgatagaagctgagtatgtttatggtttcaaaaaaacatcaaatagtggaattagaaaatataggggcaatattgtagaacataatcagagtgctggagatcactaatcctagtagaaagattgcatttttttagaaaattaagaactattgtttgaga

SEQ ID NO: 39479 - DNA, 565 bp, Homo sapiens
caactattgaatatatcaatctacagttcaaggtagaggtyagggatggtgacatgcatttgggattcattagtgctaaaacaatatgtaaagtcatgctgctacatgataaggccacccatagaacaagcataaatagaggacagagaaaatcacagacctagcattaaggatctccaacagttatcatttaaaaagatgtgcaaaagtggtgattgcaaattatttttgcaaacaaaccaaatgactttcattgagcatgagaagagacattcaaaatgacagaaaacaaaacaaaaccaggagagtgttttgtcttgaaaattcagtaaaacaagtatttgtaggacaagctaataaactttaatgaatgctcctgaatattcaaatgagatgaggactataaattaactgtcaaatttggctacataaaagtgcttgataacgttgacaagagtcctttcaaaagagtgatggggataaaataagtgaattaatgaattaattaaattatgtgagggacttatttacctcaatgtgagttccaatgttgctcctacttgcc

SEQ ID NO: 39480 - DNA, 565 bp, Homo sapiens
caactattgaatatatcaatctacagttcaaggtagaggtcagggatggtgacatgcatttgggattcattagtgctaaaacaatatgtaaagtcatgctgctacatgataaggccaccyatagaacaagcataaatagaggacagagaaaatcacagacctagcattaaggatctccaacagttatcatttaaaaagatgtgcaaaagtggtgattgcaaattatttttgcaaacaaaccaaatgactttcattgagcatgagaagagacattcaaaatgacagaaaacaaaacaaaaccaggagagtgttttgtcttgaaaattcagtaaaacaagtatttgtaggacaagctaataaactttaatgaatgctcctgaatattcaaatgagatgaggactataaattaactgtcaaatttggctacataaaagtgcttgataacgttgacaagagtcctttcaaaagagtgatggggataaaataagtgaattaatgaattaattaaattatgtgagggacttatttacctcaatgtgagttccaatgttgctcctacttgcc

SEQ ID NO: 39481 - DNA, 588 bp, Homo sapiens
cagacttatgaaagttatttgaaggatatgttcacatgtgtatcctaaaaaaatcacaggtagttgctgaaatatttcactgtatttgcttcaattttaggataggcaaggaaatcttctttwaaaaagtgacacttgaatataaacctgagtataagctcacttgtccgagctcagcaagtttaataaacatgagaagtagtgagaaagagagagaagagggagcaagatgagagtggtgagtgaggcagggagcaatcagacaggctgtatatagatcattgtaaggacttcgacttttaccctgagtaaaagagaaagccattggtaggttttgtgcaaagagtgacatgatctgacatatattcaataatcattttgcagaggattcttttttcttaggtttatgaaactatcaatttatacagttaaatttccaaatgcacatgagttcccaaaattcctgataccaattatatatctcaaatttatataatctacccacagtttctaggatttatataaccaaaagtattacataatttttatacagcacaaaagatatagttttacaaaaattattctaca

SEQ ID NO: 39482 - DNA, 570 bp, Homo sapiens
atgtttttactgagggcagaccctgttaagaacaagacacttctctggcatatttcaaaatatttcctttaccctcttttttttttttttttttttttggkggaagaacatcgcaatttttctctagtagtcattataagtaccttgcagagttactggaggtaaaactcataaaactgtgggagccccactatgagtgatccccgctggaattttaactctgagttttccacactgagtctccagcaatttgtcagttacagttcaggttttattacctggcactggttccaacagaggttgtcacttgtcggttcctgctgtagtaaattgtgattatttgtatttgggtgttggtttctccagtttgggaggtagtggtttgccctgtgatctcacttcttttattaagaagagttgttaatttttcaggttgtttagcttttcaccctttcttaggatgaagtggcaacttccaagcttcttacatcacaacagaaataaaaagaggatctataatttttatgattccctacttctttctccatctacaatatacaaatggtaaat

SEQ ID NO: 39483 - DNA, 521 bp, Homo sapiens
tgtattaacctgtttgcttcactttttaaaatgaataatcctccattgtgatagtactrgcacaaattgctgggttttctcatatttttaaatatattttattaggtataatagcattttaaaacttgcttatggcagatgttgtctctgacacgtaccctaggcggatgatgtcagcgctcttctgacagcagccatgcccccatctgctctgccctcttgttacaagcctcaagtgctcaatggtgtgagaagcccaggagccactgcagatgctctctcttcaggtccatctagcccatcaagcctttctgcagccagcagtcttgacaacttatctgggagtttttcagaactgtcttcagtagttagttcaagtggaacagagggtgcttccagtttggagaaaaaggagggtgagacgttctacaaaaataactttctaactggtattgtagccccgtatttgtcatttgggatgctaaaaagtcatttttaaccttaaatacaaggtattagta

SEQ ID NO: 39484 - DNA, 444 bp, Homo sapiens
tgttgcagatgcctcagtcargcatttgtcacagtctttattctgtaaaacactctccatatgctcttcataatccttaaagattattgcagttcagccacttctgtaagtgtttattagcattggcatgttggtagtagtcctgttcttcagaccatagctttgaaccagaatagtgctcttcatctccagagacaaacttccatgcactaacccagcagtaaaggatttggcccctacatgggaaaacagcagtgttggagatattgttgtagagattaaaggagagagttgtgctacaaatacaccaaaggaattagaaaattctgtttaaaattccatttaaaaagcttttataagaataaagatagaaaaatagatatgattatcttgatcattgacatttggaaaacacacaaattcattgctgaggtaaacaatcta

SEQ ID NO: 39485 - DNA, 560 bp, Homo sapiens
actctattaacaatttaccttctggaaaacatttcccccttgcctcaagttggaagctttttgtgttatcaattagctttgtagattcccaaaattatattgactgatttgcttgtatctttcctatgaaaaccttyctaccaaagtctctgccttcatgggtgttacataccacttcttgaactcaggtacatgggtctcagaggctgcaagtcaaaggtctgcaatcacatacaagtcaaaccagagtgggcctcagagtcctcttccccagaaggccacaagagcatgcttttttgctagagagaactcagaggtacacatctctgcaagtctagtagaggaacttaggtgctgttaaagccatgaaataaaacttatttctattatagtttttatccttttgctaaaggatttaaagcaaaagaatttaaaaagatcaagtaaagaagaatacaattataaaactaccataaaatattacattaatctaaaagtctttctaggtctcaaggtatggtatttaacactgcagaagtggacagaaatattttatgcat

SEQ ID NO: 39486 - DNA, 951 bp, Homo sapiens
ggaggtcaaatatagtgaaataccattatcaaaaatgtttcaaatttaaatttatgatataataatttatgagcttgttaatgygttaagtaataagacttaatggcagatccaaaaagaccaaaaattcaaagaagtgttgtgggtgaaagatatttggggataatccagagcacccgttgtgtgagatgaaaatagcaatggtttctatcagtgacaggagccagtcctgctaagtctgcaggggtttgttgcctacaatcacaatggaagaaaatgctaaattccagcatgaggtcagtgaagggaaaagaaaaaaaggtgtaattttttttccatccaagttcacagacccctgggttaagaacagctggtgtagaggaaggcagtggagaggaaactctggaactagccagtttgtttggaagcgcttcgtatatgggcctcttcagtcatctttttggatgttattgatttggccctgtatggagagcagtgatacacgtcagattcacaattctcaaagcataactgctgatcttccctccacccccagacctgccacacccgaagccttcttcagctccatggatggctctcttcttccaattgcccaacaaaaaccctggcgttgccttgaagcaccccacattgaatccattggaaaatcctactggctctgccttcctgactctgcccaccgctgcctgcctccactgctcccaaccttgtctgagccacagtgacttctcacctggttactgcaatggccccatctactcccccagcttcctccttgtccccctgaagttcatttatttttatttttatttttaaattaagtagagacatagtctcactatggtgtccaggctggtcttgaactcctgagctcaagtgatcctcccgtctcagcctcccaaagtgctaggattacaggcatgagccacc

SEQ ID NO: 39487 - DNA, 609 bp, Homo sapiens
ggttttatgggccacataaacttggggaatggggccttcatcccctcaagcatttatcctttggattacaaacaatccgattacagtatatatactgtattagtctgttctcatgctcctaataaagatatacttgagactggataatttataaaggaaagaggtttaattgactcacagttccacattgctgcggaggcctcacattcacggtggaaggcgaaggaggagcaaaaccacatcttacatggtgacaggcaagacagcatatgctggggaactgccctttataaaactatccgatctcgtgagacccatttgccatcgcgagaacaccacaggcaagaaasgcctccatgattcaatcacctcccaccggcatccctcccacaacatgtccttatgaggatttcaagattacattctaaaaatattgtcttgtaagcaggtaaaatattattataagttgctgcttagtaaaaatctagataagtttagcaacaacccgggtcctccacctcatctgaggccagtccctttccccgccccttcttctaagccatccttccctctactgtacaatgaagagtcactttccatgaacattaa

SEQ ID NO: 39488 - DNA, 671 bp, Homo sapiens
tgcataatgtacaaattgccatttaaaccttttctaagtacacagttctgttgcattaagtactttccrattggaaatgcacagatcttcagtgtacaattcgatgagttttggcaaatacatatacctgtgacactaatatatctttcaagatattgaacatttttgttactctgaaaagtacttttattgtccctatgtccgtcaagcataaaatttaaataataacttacttttctccattatatgatctttttcattaaatagcatgtaaaaagatttgtaagtatagaaaaataacacaaaaagaatcatccacaaggcaaatcataacccatactgatacatcaaatccttaagtaagccaatgacacagcaagaaataaaatacagaagtaaagaagtttaagaaaaaaattattttatttttagagacagtatcttgctctgttggtcaggctggagtgcattggtacaatcacagctcattgtagccttgaactactcggctcaagcgatccttccacctcatcctcccaaatagctgagactacaggcatgcacaactatacccagctaatttttacctttttttttttttatgtagagatggagtcttgctgtgttctccagcctggtctcaaacttctggccttgagcttcctcctgcc

SEQ ID NO: 39489 - DNA, 671 bp, Homo sapiens
tgcataatgtacaaattgccatttaaaccttttctaagtacacagttctgttgcattaagtactttccgattggaaatgcacagatcttcagtgtacaattcgatgagttttggcaaatacatatacctgtgacactaayatatctttcaagatattgaacatttttgttactctgaaaagtacttttattgtccctatgtccgtcaagcataaaatttaaataataacttacttttctccattatatgatctttttcattaaatagcatgtaaaaagatttgtaagtatagaaaaataacacaaaaagaatcatccacaaggcaaatcataacccatactgatacatcaaatccttaagtaagccaatgacacagcaagaaataaaatacagaagtaaagaagtttaagaaaaaaattattttatttttagagacagtatcttgctctgttggtcaggctggagtgcattggtacaatcacagctcattgtagccttgaactactcggctcaagcgatccttccacctcatcctcccaaatagctgagactacaggcatgcacaactatacccagctaatttttacctttttttttttttatgtagagatggagtcttgctgtgttctccagcctggtctcaaacttctggccttgagcttcctcctgcc

SEQ ID NO: 39490 - DNA, 671 bp, Homo sapiens
tgcataatgtacaaattgccatttaaaccttttctaagtacacagttctgttgcattaagtactttccgattggaaatgcacagatcttcagtgtacaattcgatgagttttggcaaatacatatacctgtgacactaatatatctttcaagatattgaacatttttgttactctgaaaagtacttttattgtccctatgtccstcaagcataaaatttaaataataacttacttttctccattatatgatctttttcattaaatagcatgtaaaaagatttgtaagtatagaaaaataacacaaaaagaatcatccacaaggcaaatcataacccatactgatacatcaaatccttaagtaagccaatgacacagcaagaaataaaatacagaagtaaagaagtttaagaaaaaaattattttatttttagagacagtatcttgctctgttggtcaggctggagtgcattggtacaatcacagctcattgtagccttgaactactcggctcaagcgatccttccacctcatcctcccaaatagctgagactacaggcatgcacaactatacccagctaatttttacctttttttttttttatgtagagatggagtcttgctgtgttctccagcctggtctcaaacttctggccttgagcttcctcctgcc

SEQ ID NO: 39491 - DNA, 1991 bp, Homo sapiens
gctgctgattttagaaacaaggtagaccaggtaagtctgactgtttacaaatactccaatctagcctgatcttcaggcctccagctgctagacggctccagtgaagggatcttgactattttagggtacccccggtcacttgaaaagctatctttctctggaagcagatggctcagagtctgttgtgtgagtgagggtgaaggcrgcctccaaacttaatgccagatctggctagttttagcatcagaacaccaatggagagtaggtcctgtgcctttaaaaagttggcttccaaggggtaaggaagacagatgtcttcgtcatctggatttagtaaatcaagtgcctaccattttaggtgatccccttcttgagcatgcacttttggagcatatcaaaacctggggttcattgtgagggcagatagatgaggaaattggatgcacacctgttcagtctttcaacatgggggtatatcctctgtgtgagggggttctgaaggcctgtgagattgagactggcctttactggtgctgatggaggctcctgctactgcaaactgggctgctccgtggagtcattgttaagtggagctgtacagactgcagggctaagcacagggtttggtgtagatgatgcggtgccggctctgcgtgcaaccaggtttgctatagttcagctgcaatgagtgctgctgatggagttttgcttgacactgcatgcatgtggccagccagatggtaaattttctgcttcaatgttcattaaacccagctcatggttgatgcacagctgagtcattccctttgccaatggctgagacagtgcctctgacttagcggtctgcatggctcactgccaggtgtgcagatctcaggaggaagtgtggatcaataccaggcagcctgagttattcagctggaaatgatcttgtggactgcctctacattgacaaaatggacatcagaatattcaataaatgtatacccaaaggaaataaatgatggaagcccttttccccctcagattctacttcatttgacaaccttgaaagacattttctgagagatttggctttgggttatacagatattttttaatataaacttagtactggagcagtttcagcagaaaacaggggatggtccaaaaacatgtaatggttggtggagaacaccaggtaaattttctctaggaaaaatattctgtgtcatctttgaagagaaaaagaaacctctttatccatttgaaaggatatttccccaatatatttatatgaaattaagtgaggtagataaattggccttcctatatcttaagggaaatcctcaaaatgaagagataggcacagaactatatcacaaatacctataatattataaatcataaacacttaaaacttttatggcctctactatggggacaatcaagactgtgcttcttgagctaagagaatagcagattctggacaggctccaagtattgccaattacttaaagtcacccaccctttgaggggatttgggagaatcttcttgtgcttcagtcctgtggagtaagaagtgattgcagcatgggtcgaataatgattcacatgcactattagcagagtgcaaagttaacaagggacagactatgttggttttttttttaatgtatcaacttgagcaggctgcagtctccagtctttcagtcaacactactaggtgttgtgataagattttgcagatgtaattaaagtacctaatcagttgactttgaataaggaagataattctggataatccaggtgggcctgacataaccagccgaaagccttagaagcagaactgaggctttcccaagagaacaaataattctcccatatacaacagctttagcttcgacccatggagttctatttggagttcttgtgagttcctttcctgaccacttgccctatgaatttcagacttgattagcccatcacacaattgtgtaagataattcctg

SEQ ID NO: 39492 - DNA, 1129 bp, Homo sapiens
tatgtatgttatatctcaataaaataattttgaaaacatgaataaaaaaagacattcgctttcaggacagcctcatattctagtttcactcttcaaaatctgcttgcagctggtttcaattcactgatagaagtaatactgcctactagacagggtattggagaatgtggagaaatagggaatgagcccagaacagaggaaggatattgatattattacccaaagttaatatagttgaacagagacatctcagtgcttaggttgaaaaagagggataagaaaaagaataaggcataaaagaaggagataggttgaatacaggagtactggctagaaagttaggagggctatggaatcaatgttctgcttcagaatcatgggcctagctagataactagtatagtttttattcccacaagtcagtgaagtaatgtgagaaagtcacaccgaactgacagatacaccattgaacatttggctgcatctcacatggtagtatggtccagttatagggaaatagttgactggcatatcaacatgtcctccttctcctgaatctagcaaattctctcatgtgtccagttgaagtcttcctttctccagttgtattaggtttctagggctgccatagcaaaataccacaaagtcacttaaacaacagaaatgctttgtatcacagttgtggaggtcagaaattgaaaatcaggtgtcagcagggccatgctctctctgacagcactggggaaaatctgattgagacctctctcctagtttctggtagtttcctggcttggggcaacataattccaatattcacatggcatttttcctgtgcgcatttgtttcagtgtccacatttttcctttctatatggacacagacataatggaccagagtctaccctaataacctagtcttaagttgataatcatcaaacaccctttttccaaataaggtcacacttaacagktattgggagtaaagatttcagcatcttttttggggatacaattcaacacataacactagtcctctgtcttaatactgacactgcaatgtccttgaaattttaccttaattaagtggccaagaccaagtcttccttcctagaatctcctttgtgtcatgc

SEQ ID NO: 39493 - DNA, 511 bp, Homo sapiens
cagccttcttggcaatactctgaaatatcaccccaataacttaggtttaaaaagagcattttatatgtttaattccatagcaatgacaataaattggagcaataaaacagagagtgtccaaaaatgattgaaacagaccaacagatgtttggagatagagaaaagcaactaaatcatttggctgactattgtctttgaatgctggttattgtttttggattattattgtctttgaatgtcttcacttttgttctttcggttaaaaggtcactgagtaatgtaaaatgttcaaatctggctttcaatggataccatacatacacaattttcaagttttttcaaacataaagtttttctctggagaaattttctaaaawttgtcttttcatccaggatacttaagaaacattaaagtgcacagtggcataactaataagccactcattactcatacaagtctattgcttgggcaatcagggtaccaggtattataaaattgctttgttgggga

SEQ ID NO: 39494 - DNA, 1281 bp, Homo sapiens
tgcatacctaagataaagtttaatttataaattaggcacagagagagatgaacagtaataactaacaataaaataaaaaagtataacaatatactgaaatagcatttatgtgaatgtgtttcttttttttctttctctcgctctcaaaataggttaatatttttggaccacagttgacctgaggtaactgaaactgctgaaaacaaaaccatggataagggaggactcttgtattatcacagattatatcaaaactatggctctaggctttttggaagagtttaacaagtggagcttgaaggtaaagcaggctaccgaaaaaaattatacaaatctctctttcttctcacttcccagaagtcctgacccttcaatcctgtgacataaatactgcattgaatccctaaggcatgaatggaagtaaaatctaacaaaatcagtgaataggagttcataggtactccatcagaaagagcaaagccataagcacaaggaatgagtgtcctacggagaccctccggtgctgcagcagagaggggcatcaggaggcatttctgagcacagaaacttcctggtgtctttaggctaagacacataatccaactgtgtgaaagacagtcataagaatcatcctcccaatagcttttctgactcttctgcagaactctgttgttccattttcatcggcttcttcaggtgctcagaaaagaaaagaccctgtttttcatggagaaaaacattgggcaaattgattcaatcaagaactttcttagtatataagatgaaactggtggaacacatgaactctgaacctgtttcttacctaaatccattcatgtttagttcatttactttatataaatttaaatacctgcttttccccagacactgtgctatgcactggtgatgaggcagttaggtttataacttrtctccctaaaaatcatttgctaatattaataaccctttgttatttagacaagctgatgaattcacttccctttacccccagtacattccctattagataaaacggactgtctttttgttcccaataaaatcactgtactgtagtgaaaacaaagctattattttaaaatgttctatgttgtatcattgggtaactgtgtgacactgagcagttcctttagccattcagggactattatcatcaaatattaaatcttgagactattaaccttaaagagacactaaaaatatttattaaaagattatgtaaatgaaaattctttaaccaactgtagtgactaagtatatgta

SEQ ID NO: 39495 - DNA, 1281 bp, Homo sapiens
tgcatacctaagataaagtttaatttataaattaggcacagagagagatgaacagtaataactaacaataaaataaaaaagtataacaatatactgaaatagcatttatgtgaatgtgtttcttttttttctttctctcgctctcaaaataggttaatatttttggaccacagttgacctgaggtaactgaaactgctgaaaacaaaaccatggataagggaggactcttgtattatcacagattatatcaaaactatggctctaggctttttggaagagtttaacaagtggagcttgaaggtaaagcaggctaccgaaaaaaattatacaaatctctctttcttctcacttcccagaagtcctgacccttcaatcctgtgacataaatactgcattgaatccctaaggcatgaatggaagtaaaatctaacaaaatcagtgaataggagttcataggtactccatcagaaagagcaaagccataagcacaaggaatgagtgtcctacggagaccctccggtgctgcagcagagaggggcatcaggaggcatttctgagcacagaaacttcctggtgtctttaggctaagacacataatccaactgtgtgaaagacagtcataagaatcatcctcccaatagcttttctgactcttctgcagaactctgttgttccattttcatcggcttcttcaggtgctcagaaaagaaaagaccctgtttttcatggagaaaaacattgggcaaattgattcaatcaagaactttcttagtatataagatgaaactggtggaacacatgaactctgaacctgtttcttacctaaatccattcatgtttagttcatttactttatataaatttaaatacctgcttttccccagacactgtgctatgcactggtgatgaggcagttaggtttataacttatctccctaaaaatyatttgctaatattaataaccctttgttatttagacaagctgatgaattcacttccctttacccccagtacattccctattagataaaacggactgtctttttgttcccaataaaatcactgtactgtagtgaaaacaaagctattattttaaaatgttctatgttgtatcattgggtaactgtgtgacactgagcagttcctttagccattcagggactattatcatcaaatattaaatcttgagactattaaccttaaagagacactaaaaatatttattaaaagattatgtaaatgaaaattctttaaccaactgtagtgactaagtatatgta

SEQ ID NO: 39496 - DNA, 2733 bp, Homo sapiens
  misc_feature (1)...(2733): n = A,T,C or G
atgaatatttatagtgtccttctaaggaactgttatccactcccaccccaggatagactgtcctgacctctaggagtctctttaatgagtccgcagtggggaagacatgatactttccggtttatgcacacatataggttggcagtgtggaatttatgaatgcttcattaggaaaggccactgccaatataggattagttttgaaaagagttgtctaagcagccttcttttaccaagcatgcaaatatgaactagttaactttattaggataatacttatagacagtaatataaggattacaagttgcatagtcaaaatcatcataaatagtctaagtaatacagtgatagggcctgtgtcagatgtcattcatggaggtaaagatatttttatgaagtggagaattgtggaatacttgttacatttccttggtaaagtgtaagtccttcaaaggtaaaaccaattcttactcatctttgtatttctaacacagtacctagcacttgtttgttgaatgaataaatgagtgaatgaacctgatcccttagatttttttgaaatgaagaggttaaattgtttcctggaaatagaaaatgtacgtgcaaacccatccttgctgctccactttgactgagaaggatgccttaggatcccttctccagtaatcttttaattgagcaggtgagagaggtcttaaaatgtttactgaatggctggatatggaattacagcagtggaccacaaagctcccttcctccccactcattttttaattcctttgtggagaggagggataaatggtagaacaaaacattccagagcattgtgactaaatgagctatcaccagaagaaatcaaacaaaggagcatttaggcacaaattgaagaatgccaccagggctgattctgcatttgagacatcccgctaaaactggaacaygcttatttttgtgttgccgtaaggataatctgttttaaagaaagtgttcccatacacacccctaccactaggttataaattctgcattagactcaaggtttctggttaccttgtttaaacaagcttataactaaatattaagatgtttctccaatagagcatgtttgaattttacagctggcagggagcctatggcttaggaaattgagtggcttctccaattttgtgccagagatagggctagggatttggtttttctaattctccaaatagtgtctttccaccgcacggtgttgtagaaagccattaaaaaaaaaaatgatcctggagcgttttgatcccagaatgtttttaaaaattgatgcatactctaagtcagtaagtcaggaattataaactgtggcatgtggaacaaaatccagcctggttttgtatataaagttttattggaacacattcacacccattcatttacatatcatctacagtgctgcaatggcaaaatgagtgattgcatcagagaccacgtgacctgcaaagcctaaaatacgtattatttggacctttatagaaaaagttggctagcccttagtataaagtaaggatgaaaagttaccttaaaaattaacattaccaatttgtaataaattggaagtaaaataggatttctgagaaagctaaaagttagcttgttgttgagaggtataaatactctatataaaaaactaaaacacctgcttgcattaaacaaacaaaaaaaaagccctgggtttctaaggaatctctgagcacttagactcacagattttgagtcgacatcacgtgccacttctgtacttaaaaannnnnnnnnnnnnnnnnnnnnnnnnnnnnnnnnnnnnnnnnnnnnnnnnnnnnnnnnnnnnnnnnnnnnnnnnnnnnnnnnnnnnnnnnnnnnnnnnnnngctcattgatgccaatgctgctggtccagtgcttctggccccagggccacactttgagagccactgatttatagatttttattacttatttcaagacatttatattaggtgtggtatggctgatagcacttaggagacatcaaactatatacaccttctcatctttgtttcaaaattaccagccattttttttcagtttacagtagttccaaatgactccatcatgtagcataatcgtttgtattttgttgtgacgaagatggtcatgttagtggaaagcagcactttactagaaatgctgaaatatttcatttatttcataaaaggaaagctttacatattgcaaatgattctcaaggttgctttttgcactgtataattccaaatgttgatgtggttgctatgactttaggaaagttctttaattgaataacatcaatttgatcatatattttaatctaaacaaataacttcttaatgttttgcctttccttttgcattacctttccaactagctctcttgatgacagggcttttctctgtagagttaaaaaaaatcaggtttattgaggtatcatttgcatgcagtgaaattcactgtacagttctgtacgttttgacaaatgcgtatggttgtgtagccaccaccataagaaacagaaaaattcctttgcctcggaaaattccttagtgctgctatgtggtcagccttttgcctcacctctcacctctcacccttggcagctgctaatgtgtgttctggtgtaccttgcctttccagaaggtcatataaatggaataatacaataggcagccctctgagttttgctttttcctttgttgtaatg

SEQ ID NO: 39497 - DNA, 2733 bp, Homo sapiens
  misc_feature (1)...(2733): n = A,T,C or G
atgaatatttatagtgtccttctaaggaactgttatccactcccaccccaggatagactgtcctgacctctaggagtctctttaatgagtccgcagtggggaagacatgatactttccggtttatgcacacatataggttggcagtgtggaatttatgaatgcttcattaggaaaggccactgccaatataggattagttttgaaaagagttgtctaagcagccttcttttaccaagcatgcaaatatgaactagttaactttattaggataatacttatagacagtaatataaggattacaagttgcatagtcaaaatcatcataaatagtctaagtaatacagtgatagggcctgtgtcagatgtcattcatggaggtaaagatatttttatgaagtggagaattgtggaatacttgttacatttccttggtaaagtgtaagtccttcaaaggtaaaaccaattcttactcatctttgtatttctaacacagtacctagcacttgtttgttgaatgaataaatgagtgaatgaacctgatcccttagatttttttgaaatgaagaggttaaattgtttcctggaaatagaaaatgtacgtgcaaacccatccttgctgctccactttgactgagaaggatgccttaggatcccttctccagtaatcttttaattgagcaggtgagagaggtcttaaaatgtttactgaatggctggatatggaattacagcagtggaccacaaagctcccttcctccccactcattttttaattcctttgtggagaggagggataaatggtagaacaaaacattccagagcattgtgactaaatgagctatcaccagaagaaatcaaacaaaggagcatttaggcacaaattgaagaatgccaccagggctgattctgcatttgagacatcccgctaaaactggaacatgcttatttttgtgttgccgtaaggataatctgttttaaagaaagtgttcccatacacacccctaccactaggttataaattctgcattagactcaaggtttctggttaccttgtttaaacaagcttataactaaatattaagatgtttctccaatagagcatgtttgaattttacagctggcagggagcctatggcttaggaaattgagtggcttctccaattttgtgccagagatagggctagggatttggtttttctaattctccaaatagtgtctttccaccgcacggtgttgtagaaagccattaaaaaaaaaaatgatcctggagcgttttgatcccagaatgtttttaaaaattgatgcatactctaagtcagtaagtcaggaattataaactgtggcatgtggaacaaaatccagcctggttttgtatataaagttttattggaacacattcacacccattcatttacatatcatctacagtgctgcaatggcaaaatgagtgattgcatcagagaccacgtgacctgcaaagcctaaaataygtattatttggacctttatagaaaaagttggctagcccttagtataaagtaaggatgaaaagttaccttaaaaattaacattaccaatttgtaataaattggaagtaaaataggatttctgagaaagctaaaagttagcttgttgttgagaggtataaatactctatataaaaaactaaaacacctgcttgcattaaacaaacaaaaaaaaagccctgggtttctaaggaatctctgagcacttagactcacagattttgagtcgacatcacgtgccacttctgtacttaaaaannnnnnnnnnnnnnnnnnnnnnnnnnnnnnnnnnnnnnnnnnnnnnnnnnnnnnnnnnnnnnnnnnnnnnnnnnnnnnnnnnnnnnnnnnnnnnnnnnnngctcattgatgccaatgctgctggtccagtgcttctggccccagggccacactttgagagccactgatttatagatttttattacttatttcaagacatttatattaggtgtggtatggctgatagcacttaggagacatcaaactatatacaccttctcatctttgtttcaaaattaccagccattttttttcagtttacagtagttccaaatgactccatcatgtagcataatcgtttgtattttgttgtgacgaagatggtcatgttagtggaaagcagcactttactagaaatgctgaaatatttcatttatttcataaaaggaaagctttacatattgcaaatgattctcaaggttgctttttgcactgtataattccaaatgttgatgtggttgctatgactttaggaaagttctttaattgaataacatcaatttgatcatatattttaatctaaacaaataacttcttaatgttttgcctttccttttgcattacctttccaactagctctcttgatgacagggcttttctctgtagagttaaaaaaaatcaggtttattgaggtatcatttgcatgcagtgaaattcactgtacagttctgtacgttttgacaaatgcgtatggttgtgtagccaccaccataagaaacagaaaaattcctttgcctcggaaaattccttagtgctgctatgtggtcagccttttgcctcacctctcacctctcacccttggcagctgctaatgtgtgttctggtgtaccttgcctttccagaaggtcatataaatggaataatacaataggcagccctctgagttttgctttttcctttgttgtaatg

SEQ ID NO: 39498 - DNA, 584 bp, Homo sapiens
cgttggtccatttttgctttggtggcctatgcttgtgggtattgctcaagaaagatagatgtactttaaaaaatcattttctgattggaacagtasaagtttattgtggaaaacaataatataaataaaaatatttcataatctcccaaataacaaaactctactcaccatcttggtgtattttttttttaattctctttctctctgttggcattatacaaattatatctatctatatatttatatgtataaatacataaataaaaatataaaatatatacataaacatgcatacatatatacgtgtatgtctgtatgtacatacatatgcacatatatacatgcatatagttttattctattctaatattttagttatgctcacttatatatttcaaatatattatttctattttcctacttatttctaagtatgtgttttcatggctgcaaaagagtctatcatatgaatgtactatacacacatacaaattcattatatatacacacatatacagtcacgtatcacttaatgacagtgatacattctgagaaatgcatcattaggcaattttgtcattgtg

SEQ ID NO: 39499 - DNA, 984 bp, Homo sapiens
agcttgctaaggaagctgggcctaggggccatgtcatccggtttttgtgttgtatgcagagaatctgttggtcttgggaggacacagaaatactgaccaggggattrtttcctattttaatacccaccatttgagattggttaatggcctatgatgctgtctggattttctttctaacttggcttgttggttaaaataaggagaaaaagaagggagttccgactcacagaaattctgtttgagagcttactttgtgcagtagctttctaattttgggccagaggatagaaaaatacgcaaaagtgcacatacccttagacctatcaataatcatgttacctctgatacacatttactgtaccttgaaactagtctagctaatgcacactggttcttgaacatcattgaaatgactctgctggtaagtaataggccccaaaattatgtcatctgatgtgtgcactctcactttaggtaatactttgtaaaagtagaccaggaaaggaaatcatggaaagtgttcgatttggtagttcatggttcaagcaaaagatttttcagtgaaggaaacctacttaacatgttgggaagagtaatccaccagtttacttggcatggcctcctttgaaaacatacatctctaatctcttagggattttaggttcatgatcactgagaaatgaatttgaatatgttacttactcatgaaatccacatgtcaccaatttgctctataatgtgtaaatcaccctttactttcttctttcttgaaagtttttattgctaaattttgccagtatattattcactatactactttagtttttgtattcctgttcctgcttctttacaaaatgtctccaaactgaaagaagaacatgaatccatagcattcccatagctgcctcatgctttcctggctccctgcctcccattccttctgcctggaatacgttccctgcccttccccacctccttgggtca

SEQ ID NO: 39500 - DNA, 545 bp, Homo sapiens
taaaaatgaaatgtgagagggaactgtcagggtggcggaaacaccatcaagtagaaaaacatatagrtagctgttaggggccttgaggtagtctaagaagactgagaggcaggaaaatgatgcttctctggaagaatgtgcggaagacacaggacaggacacattgcaagagaaggaatggatctcataaatttaaacagcaatgaaaccatcagtatcaactcagatgtcctgtctctccactgttacccctctgctacatcctgaatctttctctgtattgttaccttgttgcaccaactgtatttatctagctaacatgcttcatatttcaccttaaatgcccatagactaggtcagctcccctaccacaaacaactcaatgccatgaatatgcggcacgatactactggtcataattagttgtatcattatttcataatgtcagcctctgggcttcctgtaagaggacaaagattgtgcttatcctgcatcactgcaactcccaaccagagtggtcaataaatatttactgcatgaattaa

SEQ ID NO: 39501 - DNA, 545 bp, Homo sapiens
taaaaatgaaatgtgagagggaactgtcagggtggcggaaacaccatcaagtagaaaaacatataggtagctgttaggggccttgaggtagtctaagaagactgagaggcaggaaaatgatgcttctctggaagaatgtgcggaagacacakgacaggacacattgcaagagaaggaatggatctcataaatttaaacagcaatgaaaccatcagtatcaactcagatgtcctgtctctccactgttacccctctgctacatcctgaatctttctctgtattgttaccttgttgcaccaactgtatttatctagctaacatgcttcatatttcaccttaaatgcccatagactaggtcagctcccctaccacaaacaactcaatgccatgaatatgcggcacgatactactggtcataattagttgtatcattatttcataatgtcagcctctgggcttcctgtaagaggacaaagattgtgcttatcctgcatcactgcaactcccaaccagagtggtcaataaatatttactgcatgaattaa

SEQ ID NO: 39502 - DNA, 1295 bp, Homo sapiens
atatttgtccaaagaaacaaaatactacaaatgtagctattactgtttcagtctcttctccctcccagagataagtaattttctgaggttgatatatttaataaatatatttcttccttagatttttatcataaaaaaagaaaataggggcatgggatatacaggtatatgcatttgtcaaaacagatcaaactgtacatttattatctgagcattttattatatgtacattatatctcaaagaaaatataagttgtattagggtcagtaggataattaaaaatgtggttttacaacttttattatcagagctagcagagaatacaggctctgaatgtgaacatacagcatttgctaaatactttggcaatatgtgtcaaggagaaacattgcttcagtggccaaatcctatgagtatttttatattactttgcagcaactgaaagaatttaaagatataaggggtctatcctattgggtgctgctgggttagaaacattttaagatcagataatccaaaacaaatatattatattattccatttgaaggagtgagcaataagttttataatttttgtatcggatagatacttttttaaaaaagaaacaacactacatttttcttcactttttctgtagaccatgggatattttgtgttgctttggtgattgtaaaaaaaaagtctttaatctaaaaaatagaaacagggtaaatacatttaaaattcttttttaaaggctcaggcttatttatgcgagttattttaattatacttaaaaatgcactcactctaacatacatatatttgaataattcttttaacagaagttttactgtgaaatggactgtgcttaattgaatgttttctaggtgctaggaaaaataatttgatgaatatcaccaactctttaccaacaagaattcatgatatagcctgccaagcatgtattatcaaagtttctgtagctgtagctttaacaatgtcagttattatatgatttttatatgtaactccagtaatgcaagttattaaaatataagaatatatagcttgayagctaatatgaacaaatttacttgaataacctgaagataccttcaattaaaatgtaatagctttgagtatggattgtttgatttaattcaagtgccagcaagccacatcctatttaggaaagtcttttaaacgtttcctgaaaaagcactattaaaggattaagtaatgaatctggtggaactctttttggtagtgctctgatatcaagactttttttctttgttttttaatgggaaa

SEQ ID NO: 39503 - DNA, 659 bp, Homo sapiens
atccatcaaggcactgctgaaatatgctaatgaagcccaaagataggagcacagagcagttaaatggggcgttgcagatgctctccgtacccccgtgacagggtgatgccatttactctccagatttagtataggaaagagagcaatgctgacgtggtgtcgtggtggaagatagaatggaggctccacctaataaaaagaaagggcaaagttcagggtatatattctagaagaagatgggaaaacttggtttttggtgaaggggttggttttcttaattctctttggctcactttctagccagtccacacaagaaccagatatgtggcatactgcagatagggcaacatttttaagttccagaatgtgacctcccaccatgtgccaaagcaagttatttgttaccatgtcagtctgcagcactgtttgtttccaatggtacatgagctaataccttggctttatttatttatttatttaagttacaaccttttggatacttatgacatgctgggcatactactgaattattttatatgtattaatctaatcagattcttacaaatagccgacraagaagcaaagttatcacatatattttatagatgaagtttgagaggctaaattcatgtccaaaattatgtaaccagtaagtggca

SEQ ID NO: 39504 - DNA, 1055 bp, Homo sapiens
tgaactttaaaggcatttctttcctctccaaatttctaattctttacaaattttattcactctcctaaatgagtcaactcataccaacctttctagttcaggatcaaactgtaggatcaccagaattttcttctaccccacagtaagccaaacccccatgaaccatgaaaaggtccatgacatccatcacccacagctaactctacaccttgactctaatctgaattgttagaaagcccaggaagttcaagaagcctccacccttacacttctaaatcaccttcttttctaatcctcaacctattacagcgtccagaaaagagaaatctcaattctctcagattcaagaactttatcagcgttgctagtaatcgcagtttggcatttacaactatgggtcctgaaactgggtaataatctaaaaattcctacattatacgtgcagacagcaaattagtatattctatgtcctgggcccaagcgatatgcctaactgggcaatcagcataggctcaaaaaatgtgcagggagctcacaattcagtttactgtcgttgactataaaattctaaaccaaagtattttcatgataaaattataaaccaaagtattttcacacatgcctgcctcttggatgatgtaaattcttcccctagactttttactagaccactatcggggttctcttccactgcagcggccacccaataactcgttttaaagactgcctcttgcggctgcactagcaaatcgccaaaccccgcatgccccacggccgctgctgagactctgcagccccaaatcggccatcccctcctcccccacgtccccgcgctgctcgtcccccmacgccgggcgccaaccttgctccatcccagagagggtttggggctccccgggtcagagcgctccgcaggcgcagctccgcgaacgccagcgagagcggtccctgggccagcacctacctcccacctcctcctccaggagcggcccgggtcgacgctcgcccgcaccctgcaacggccccaacagccgcgcggagcctcccgccgaaca

SEQ ID NO: 39505 - DNA, 531 bp, Homo sapiens
ccagctgggtcattataaaacctcacaccaggagttgtgatagcttcactcttatgcagaccttcatattccaatctcattaaggcttttcttctgacatcctcatagagttcttttattggatcaagtaggtcttttagtactatgtgattaattttgttctgcaataaaaaatgaacactctttagcagaatcatttattaaccaactcaacaaacacttagcatgcacctaagtgccaagcattgtgctagaagataaccagacagcacacatattctaaataaaatgtcatttgaaaaacattctgtaaattctttagaagcccatatttttccaagagcagggaaaatggggcaaatgggacacagagcatgaaaattccattttattagctttatatttcctgcgtctgaaatatatctcctgttgccctagctattgtggaaacaaagttaccttgttgccacaaataagacacgctctgtgtttggkgtgtgtgtgtgtgtgtgtgtgtgtgtgtgtgtgtgt

SEQ ID NO: 39506 - DNA, 575 bp, Homo sapiens
gatagtagaggccattcatgacaaagcctcaaatggaaatgatgaaacatgttattagaaactagaggaaagcccatccttgttataaagtggtaaaaaacttggctgaattgtgtttatgttctagtgttttgtggaatgtagaacttgtaagtgatgaaactggatacttagtggaggaaatttctaggcaaagtgttgaaggagtggcttacttcttcccgatcacttatagaaaaaggtaagagagaaataagttgaagatggaatcattaagcaaaaaggaaccagaacttaaatatttgaaaatttctgaactgttaatgttacraaaaaatttttaaaaagcatgttcagaagagaacactaagggtgtggtgaactaaccacttgaaaaggagattcgtgtaagtgtgaaccatggacttcatcagccatctcaacagaaaccaggaacagagatggggcaattctagcagaaatgccagctgagactaaaggaaagagagaaaataggatacaattaaggaagaccatcagacttcttagaacttcaggactacaggactcaacca

SEQ ID NO: 39507 - DNA, 575 bp, Homo sapiens
gatagtagaggccattcatgacaaagcctcaaatggaaatgatgaaacatgttattagaaactagaggaaagcccatccttgttataaagtggtaaaaaacttggctgaattgtgtttatgttctagtgttttgtggaatgtagaacttgtaagtgatgaaactggatacttagtggaggaaatttctaggcaaagtgttgaaggagtggcttacttcttcccgatcacttatagaaaaaggtaagagagaaataagttgaagatggaatcattaagcaaaaaggaaccagaacttaaatatttgaaaatttctgaactgttaatgttacgaaaaaatttttaaaaagcatgttcagaagagaacactaagggtgtggtgaactaaccacttgaaaaggagattcgtgtaagtgtgaaccatggayttcatcagccatctcaacagaaaccaggaacagagatggggcaattctagcagaaatgccagctgagactaaaggaaagagagaaaataggatacaattaaggaagaccatcagacttcttagaacttcaggactacaggactcaacca

SEQ ID NO: 39508 - DNA, 529 bp, Homo sapiens
ggtgaaaccctgtctccactaaaaatacaaaaattaaccgggcgtagtgacaggcgcctgtaataccagctactcaggaggctaaggcaggagagtcacttgagcccgggaggcggaggatgcagtgagacaagatcacgccaccgcactttggcctgggcaacagtgagactccgtatcaaaaaaaaaaaattaytttagaaatgtttagaaatatatatgtctattttagaaaatgtggaaaatagagaaagaagaaaaataaaaataaccacctttccacctctgagcaagggtaaaccactactgatagtcaatgtaagttcttttttttttttttttttttttgagatggagtctcactctgttgcccagtttggagtgcagtggtgtaatcttggctcactgcaaccctgcctcccgggttcaattaattgtcttgcctcagcctcccaagtagctgggattacaggcatgtgccaccaaatctggctaatttttatatttttagtagagacagggtttcacc

SEQ ID NO: 39509 - DNA, 550 bp, Homo sapiens
cccattttgggtggaagctttaacactcagtgttcaatataaattaaggtatgttcttgtccttctgcctcagtgtcacaacagagcctccatcagcctagttactggatgatcataagaygccaagagatggagcttccagctaatctgtgaggcctgttaacatgcataagaaatgaacttgggttgttttaacttgtgtcatacttgttgtcacactatgacacaacctatccagacacatgtccctttgacttgctttttcagtctccttgtcaccattcacctcctatttcaatccaaactccaggagacctttgctatcttgctttcttttgggcagcagaatcttcctttccctttagaatcttttctatatctgttcttgtgtcctattcctctttgctgaaggtggtgatgccctttattcccaagaatgtcccttttatctgtttcctttgttccagacagctggcagctttacacagccatgaaagtcttttcagcaaatgactaaaaagcatgtcctagggaaacatctacctccctc

SEQ ID NO: 39510 - DNA, 535 bp, Homo sapiens
tctcataaacttgacagttttgacaaatcttttacttagtataatactaaaactacaaagagcttaaaaaaaaaaaaaaagatgtgcctacagttgtaccatcccaaccatattctgacaactttttattttttgagggggatggagtctcgccctatcgcccaggctggagtgcaatggcgtgatctcggcttactgcaacctccacttcctgggttcaagcrattctcctgcctcggcctccagagtagctgggattgcaggcgtgtgcctccacacccagctaatttttgtattttcagtatagacgggtttcaccatgttggccaggctcgtctcgaactcctgacctcgtgatccacccaccttggcctcccaaagtgctggggttacaggcgtgagccactgcgcccggcaactttttgttcttataatatgcctgaagatttttgtatagtttaatcatggaatatgatctgccccaccctgccccacctatactattacatcatatttttcttgttgctagagtcct

SEQ ID NO: 39511 - DNA, 564 bp, Homo sapiens
gtatgctttttagaaatgaaaataaccactacctactcagaatctttagataaaaaatgttgtcaggccacaagcagaggggcttcccygcctctgaccttcttcacacgggggtttgttgaaggtgctggtgagacccgcttacagagccatccttttgggaggctacccacaccccagatttctagtcaagggggaaccagagaccatccaccttgaggcaaaactaaaatgaaccgctggttagactctggcagtcacagcatttacagggctctgaaggtggcagaaaagctagtgatggttggaaaaatgggagcccttagagactgagagggaaacaaggggctgggtgacagtggctgtgtctttgggagcctttcccatgccaaccatctgcttcctgtgtttccatttcctgccctggaataagaacggaatggaaactctcagccagatccctaacagggaagggtgcgtgggacaggggccagccacaggcaattctcaatttaccccacacccggagttagctttttgtttcctgagaagtcaagtgtttaa

SEQ ID NO: 39512 - DNA, 669 bp, Homo sapiens
tgtctttgagggaaaccccaattctctttcatttgctcagaaatgccttcctggaggctgacagctgtagctaatgttgagtcctagagccgagggagtcattagatactagggggccatccggaagaggagacttcctctgggtaaatgcacagagcaaaatctrggaccatcatggctggattaagatctttagcagtactcaacctctaaagattatgctacaagtatttcttgccccacacaaatcatcatagataacataaaataaaacaatctaaatcctaaaaataagtatgtccttatcaaaatatcaatgatgttacttatgaaaatggaaaaaaaaatctacaattcatatggaacccaggagactccaaatagccaaagcaagtttgaacaaaaagaacaaaactgaaggcatcacactacctgacttcaaaatttactacaaagctgtagtatggttctggcataaaaagagacacatagatcactggaacagaatagagaactcagatataaatcgacacatttgtagccaactcatttcgacaaaggtgccaggagcaaacactaaggatcatccctttaatgaatggtgctgggaaaactgtatgcagaaaaatgaaaccagaccccatctctccccatacacaaaaatcaaat

SEQ ID NO: 39513 - DNA, 669 bp, Homo sapiens
tgtctttgagggaaaccccaattctctttcatttgctcagaaatgccttcctggaggctgacagctgtagctaatgttgagtcctagagccgagggagtcattagatactagggggccatccggaagaggagacttcctctgggtaaatgcacagagcaaaatctgggaccatcayggctggattaagatctttagcagtactcaacctctaaagattatgctacaagtatttcttgccccacacaaatcatcatagataacataaaataaaacaatctaaatcctaaaaataagtatgtccttatcaaaatatcaatgatgttacttatgaaaatggaaaaaaaaatctacaattcatatggaacccaggagactccaaatagccaaagcaagtttgaacaaaaagaacaaaactgaaggcatcacactacctgacttcaaaatttactacaaagctgtagtatggttctggcataaaaagagacacatagatcactggaacagaatagagaactcagatataaatcgacacatttgtagccaactcatttcgacaaaggtgccaggagcaaacactaaggatcatccctttaatgaatggtgctgggaaaactgtatgcagaaaaatgaaaccagaccccatctctccccatacacaaaaatcaaat

SEQ ID NO: 39514 - DNA, 669 bp, Homo sapiens
tgtctttgagggaaaccccaattctctttcatttgctcagaaatgccttcctggaggctgacagctgtagctaatgttgagtcctagagccgagggagtcattagatactagggggccatccggaagaggagacttcctctgggtaaatgcacagagcaaaatctgggaccatcatggctggattaagatctttagcagtactcaacctctaaagattatgctacaagtatttcttgccccacacaaatcatcatagataacataaaataaaacaatctaaatcctaaaaataagtatgtccttatcaaaatatcaatgatgttacttatgaaaatggaaaaaaaaatctacaattcatatggaacccaggagactccaaatagccaaagcaagtttgaacaaaaagaacaaaactgaaggcatcacactacctgacttcaaaatttactacaaagctgtagtatggtwctggcataaaaagagacacatagatcactggaacagaatagagaactcagatataaatcgacacatttgtagccaactcatttcgacaaaggtgccaggagcaaacactaaggatcatccctttaatgaatggtgctgggaaaactgtatgcagaaaaatgaaaccagaccccatctctccccatacacaaaaatcaaat

SEQ ID NO: 39515 - DNA, 516 bp, Homo sapiens
cacaaaagcaggaggctttgtttgaacaagatcctgggtgatggaggctctttcagatggcacctgaggaggagccccttytcttgcgctgtatgccccacgtgcatcttggcagagtagttgccagctgagtgcctttgattctgctattctctagcagttaactttcaactcctctcacctggcccaaccctagtctctactcccagttttgaaaaggaaaagactagtggaggattggtagtgggaggactgggaaaggttgcacgccgagcactacactaccactgccctgtgcctgttcctgaccctgccgcttagcactctgctttctcgcaggagcctggcccagccctgcttcatctgcccactctgaagagcaggattgtggttctgcccccaagcatttcatttctcttttggttctcacatccaattaaatgtgtttcactttgtagtttgtaggtataagagggttttttgtttgagaaagagtcttgctctgtagcccaggtt

SEQ ID NO: 39516 - DNA, 516 bp, Homo sapiens
cacaaaagcaggaggctttgtttgaacaagatcctgggtgatggaggctctttcagatggcacctgaggaggagccccttctcttgcgctgtatgccccacgtgyatcttggcagagtagttgccagctgagtgcctttgattctgctattctctagcagttaactttcaactcctctcacctggcccaaccctagtctctactcccagttttgaaaaggaaaagactagtggaggattggtagtgggaggactgggaaaggttgcacgccgagcactacactaccactgccctgtgcctgttcctgaccctgccgcttagcactctgctttctcgcaggagcctggcccagccctgcttcatctgcccactctgaagagcaggattgtggttctgcccccaagcatttcatttctcttttggttctcacatccaattaaatgtgtttcactttgtagtttgtaggtataagagggttttttgtttgagaaagagtcttgctctgtagcccaggtt

SEQ ID NO: 39517 - DNA, 533 bp, Homo sapiens
atggctggtaatatttagaattccagcccctcttattctaacttggtggctggtagcttttcatttgttttacggggacagtttagctttaaactataaactaaattccttccgaaggctagttcagactacgcccagggatgaacaaggactgtttagaggttagaagcaagatgggctcagttaagtctgatatctttcactgtcataattttctcagttatagttttgcaaaggtggtttccattatgtgggacaaattattcattcatgcgctcaataaatagtaagtacttgaggtgtgtcaggaattgggttaggtgakagaggcagattgaactatgtagaagaatttattcctgccccatgtgagctgacattgaactaaaagggagaaatggtttgaatacacaaaccgtgatgatgcacaggcatttttagggctgttcacaaatattctggctctcctccaggcacatgctaagattgtatttccccacctgctttgaaatttgaagagaccatatgacttg

SEQ ID NO: 39518 - DNA, 549 bp, Homo sapiens
tgggctgggggaggtccccaaaagccagtgggacctcgaccccacctggtgtccaggctcttgacaagatcacgagaaggaattaaaagatgagtctgaaaatagtgaaattacagagatttactgtacagggcaaagtacacactcaagaaaggcgagtgtagacatactcgagagagatgtgctgagatttctatcattgtgrctttctttaaccaaggggtagaatattcatgaaaattcctggaaaaaggtagagatttctaggaactgtgatgtcacccatgtttaccccaaatataggtttccccagaactgtcatggggtgggtaggttgctgattttgtatattaatgagtgtgtaatgaggtcctaggtgaaacctaagtcaaatccagtgctgtgttgggtccagccagtctcagccagcttgatccacaccctgtttttcaggttctgatcaacccatagcctaaagtcatgtgaaactgctgcctggaatttttttttttgttcacctgtgaccaccctgtattattcctgtctcaa

SEQ ID NO: 39519 - DNA, 549 bp, Homo sapiens
tgggctgggggaggtccccaaaagccagtgggacctcgaccccacctggtgtccaggctcttgacaagatcacgagaaggaattaaaagatgagtctgaaaatagtgaaattacagagatttactgtacagggcaaagtacacactcaagaaaggcgagtgtagacatactcgagagagatgtgctgagatttctatcattgtggctttctttaaccaaggggtagaatattcatgaaaattcctggaaaaaggtagagatttctaggaactgtgatgtcacccatgtttaccccaaatataggtttccccagaactgtcatggggtgggtaggttgctgattttgtatattaatgagtgtgtaatgaggtcctaggtgaaacctaagtcaaatccagtgctgtgttgggtccagccagtctcagcyagcttgatccacaccctgtttttcaggttctgatcaacccatagcctaaagtcatgtgaaactgctgcctggaatttttttttttgttcacctgtgaccaccctgtattattcctgtctcaa

SEQ ID NO: 39520 - DNA, 1268 bp, Homo sapiens
tttatctaacttaatgcttacaaacagtgagtcagcctttgggctgacagatctctcaaacctactgcgaggtgccagaagctcttatggctctcaagtgacacatccatttgttgattacaaaagtcgttgccttttgttctcactcatactagctactaagatacaaacacccagacatgcacatccacgcayacacacagagaagcacatgcacacacagaactcacaatctcaagcaacaataaagatgacttaattgagttaatgcctttactcctgtgttctcaataacattacccaataactcctcttcagttgtccctgatgcacccaaatatttcagtcattgttgaagatctcaggatggctgccatttatgccaggatggagaaagaagccttattacagtgagaaaatctcaaatctcagtctttgggcaaacggaaacagaaaccagcaattgggctgcacacatttcccaggagggacaaagtctatgtaaggtcatttttggtctctgcttgcctccactttaggaaaaatgccgctgccaaaccctttgactctatcaatgcctcagctttcagagttgatagctaaacctatatctctaattatctttttataagtctcctctttcacatgtatctccaacccaggcagcatggtgaaacatacagttcataataagggaatgtggactcccttgagcatttcagggtgaaggcgcactgtgggtgttaaaagggaaaatatttaaagatcagtggtggttttctgctaacagaagtgtcaagtttttaaaggggacatgtggcactaataaaagagcatttcatgaataaaataagacagacaaaaccaaaaatagaaataatatctataacatgctatataatgacttttgcattggccaattacctattgcctcccacagcaaacaaaatctgaaaaagagcagacatagatacacaatctcccatttttgctggaaaaaatgctcttttcatcagaactttggcctacttcttatatatcttgccaatgtttgcttgatcattcgtttattccttgaataaattcccagtcaagcctagttctccttacctggccttcacctgttaaagccctggacagactgactctatttgcttctctaactttcataacttttcaggatgctcttgaccctgagtcataaatatacatacgtgtaacttaagagttatttataggccagcagtcatcaaagggacaaatatgca

SEQ ID NO: 39521 - DNA, 1268 bp, Homo sapiens
tttatctaacttaatgcttacaaacagtgagtcagcctttgggctgacagatctctcaaacctactgcgaggtgccagaagctcttatggctctcaagtgacacatccatttgttgattacaaaagtcgttgccttttgttctcactcatactagctactaagatacaaacacccagacatgcacatccacgcatacacacagagaagcacatgcacacacagaactcacaatctcaagcaacaataaagatgacttaattgagttaatgcctttactcctgtgttctcaataacattacccaataactcctcttcagttgtccctgatgcacccaaatatttcagtcattgttgaagatctcaggatggctgccatttatgccaggatggagaaagaagccttattacagtgagaaaatctcaaatctcagtctttgggcaaacggaaacagaaaccagcaattgggctgcacacatttcccaggagggacaaagtctatgtaaggtcatttttggtctctgcttgcctccactttaggaaaaatgccgctgccaaaccctttgactctatcaatgcctcagctttcagagttgatagctaaacctatatctctaattatctttttataagtctcctctttcacatgtatctccaacccaggcagcatggtgaaacatacagttcataataagggaatgtggactcccttgagcatttcagggtgaaggcgcactgtgggtgttaaaagggaaaatatttaaagatcagtggtggttttctgctaacagaagtgtcaagtttttaaaggggacatgtggcactaataaaagagcatttcatgaataaaataagacagacaaaaccaaaaatagaaataatatctataacatgctatataatgacttttgcattggccaattacctattgcctcccacagcaaacaaaatctgaaaaagagcagacatagatacacaatctcccatttttgctggaaaaaatgctcttttcatcagaactttggcctacttcttatatatcttgccaatgtttgcttgatcattcgtttattccttgaataaattcccagtcaagcctagttctccttacctggccttcacctrttaaagccctggacagactgactctatttgcttctctaactttcataacttttcaggatgctcttgaccctgagtcataaatatacatacgtgtaacttaagagttatttataggccagcagtcatcaaagggacaaatatgca

SEQ ID NO: 39522 - DNA, 633 bp, Homo sapiens
tggaaacttcttttctcattcattactctcctttctatccatcacccccctctggcttctcttccctttttgaccacctagattctgagatactttacttcaacaattctgttagaaatattctcrattctttttcctctagtttctttcatcatacagcactagtcaacctctcttagaaatattctccattctgtaatcccagcactttgggaggctgaggcgggcgaatcacgaggtcaggagatcgagaccagcctggctaatatggtgaaaccccgtctctactaaaaatacaaaaattagtcaggcatcatagcaggcgcctgtagtcccagctattcgggaggctgaggcaggagagtcacttgaacccaggaggcggaggttgcaatgagccgagatcgtgccactgcacttcagcccgggtgacagagcgagactccacctcaaaaataaaaaaaaaaagaaatagaaatattctcaattctttttcctctagcttctttcatcatacagcattagtaagctccaacctggataagcccgtattgcagcctccatgacttctcctcaacagtcaaatattgatagagaatgccacaacattcagctgctttgtttcaatcaaat

SEQ ID NO: 39523 - DNA, 683 bp, Homo sapiens
  misc_feature (1)...(683): n = A,T,C or G
gcttaatttgggtgaagtaaattattctctcatataacactgaccgagatatttgctataaaatattttatatatttgatataaaatgctatttcgagccacataagtgatttttctttcctcctccccttccttcctttcctctckcccttcccttccttcctcccatcctttctttttctttttcctttctttttaagttttattttccatttctttcttcactgtcttcctttcttctttcattctttctatttttatcttttctctttccttccattctttccttctttcttcnctttacaccctccctcccaccctctctttttatctttttccaaaatctcaaaccttctcatatttgatcttccattttcacaaaggccagtcaaaaaacctaaagtgaagttgggtagaggtaaagcagtaggatatagcgaggtctgtggacacttggagtcagtgtgcccagcctaaaggctttaaattgtaagaagttttataatgctctgggaggtgtattcagcctgctttattcagtttgtagtgccatgctaaagctttgaaactttaaacaactctttgtcttgatttcctatacctcccatctaccaatggattcatttatattcttctaggactttcatggttttgcttattgaggatagcttgataagagatta

SEQ ID NO: 39524 - DNA, 399 bp, Homo sapiens
aataagcctcatgtgtttmtaccaacattatatgaaattaaaagatgctaatagaagtattttcacatttttacttaggttatgaataatctgaagtcaatagtcatgaatatgttttataattttagaactttgcaactttgtgaggtttagaagagtgaatgtagtgctgcatagatgtgctacaattacctgtctatattgaagaagagaaaccaattcttggccacaattagttttaaatgaatactgccacaccagtgggcaaagtgaaacccaccagattgattttctttgccctgaattcttcataatacaatactcatacctatatgctcttgagaagtttggcaggacacacctgaattaacatacctcagtgcttctctttgatggcta

SEQ ID NO: 39525 - DNA, 399 bp, Homo sapiens
aataagcctcatgtgtttctaccaacattatatgaaattaaaagatgctaatagaagtattttcacatttttacttaggttatgaataatctgaagtcaatagtcatgaatatgttttataattttagaactttgcaactttgtgaggtttagaagagtgaatrtagtgctgcatagatgtgctacaattacctgtctatattgaagaagagaaaccaattcttggccacaattagttttaaatgaatactgccacaccagtgggcaaagtgaaacccaccagattgattttctttgccctgaattcttcataatacaatactcatacctatatgctcttgagaagtttggcaggacacacctgaattaacatacctcagtgcttctctttgatggcta

SEQ ID NO: 39526 - DNA, 399 bp, Homo sapiens
aataagcctcatgtgtttctaccaacattatatgaaattaaaagatgctaatagaagtattttcacatttttacttaggttatgaataatctgaagtcaatagtcatgaatatgttttataattttagaactttgcaactttgtgaggtttagaagagtgaatgtagtgctgcatagatgtgctacaattamctgtctatattgaagaagagaaaccaattcttggccacaattagttttaaatgaatactgccacaccagtgggcaaagtgaaacccaccagattgattttctttgccctgaattcttcataatacaatactcatacctatatgctcttgagaagtttggcaggacacacctgaattaacatacctcagtgcttctctttgatggcta

SEQ ID NO: 39527 - DNA, 869 bp, Homo sapiens
atgcaggggttgttttggagagcctggccaaggggtctcttgcagggcctgaagtccaacatttaagggagcaggaaaaaagaagaaggaggtttcctcttctcatattgctgcctcttcccatcacctctccttgaacctcaagaaaagggctgggcacaatggctcgtgtctgtaatcccagtgtgttgggaggctgaggcaggaggatcacttgaggccaggagtttgagactagcctgggcaacatagtgaaacccctccatttctactttaaatttttcttttacaggcggagtgcggtgactctcgcctataatcccagaattttgagaggccaaggtgggcagctcacttgagctcagatgttcgagaccagcctgggcaacatggcaaaaccccatctctacaaaaaatacaaaaattagccaggcatggtggtgtgcacctgtagtcccagatacctggaggctgaggtggaaggatcacttgagcctgggaggcagaggttgcagtgagccaagatcrcatcgctgcactccagcctgagtgacagtgagactctgtctcaaaaaaggaaaaaagaaaagaaattaaaattaaataaattttaaaaatctttttttctttctttctttcttttttttttcaaagaagtctcctaagagccaggctattagcactatcctccctttcaagtgctatacagtgatcaggtgaaactggagaacatctgagttgggagagaattctaagatctcaagtgtaaaagcttaatttcactgactaaaaactgaagtccagaaaaggaaagaggtttttggcaaggggacacagccaactagtggcagagctggcaatagaaccca

SEQ ID NO: 39528 - DNA, 869 bp, Homo sapiens
atgcaggggttgttttggagagcctggccaaggggtctcttgcagggcctgaagtccaacatttaagggagcaggaaaaaagaagaaggaggtttcctcttctcatattgctgcctcttcccatcacctctccttgaacctcaagaaaagggctgggcacaatggctcgtgtctgtaatcccagtgtgttgggaggctgaggcaggaggatcacttgaggccaggagtttgagactagcctgggcaacatagtgaaacccctccatttctactttaaatttttcttttacaggcggagtgcggtgactctcgcctataatcccagaattttgagaggccaaggtgggcagctcacttgagctcagatgttcgagaccagcctgggcaacatggcaaaaccccatctctacaaaaaatacaaaaattagccaggcatggtggtgtgcacctgtagtcccagatacctggaggctgaggtggaaggatcacttgagcctgggaggcagaggttgcagtgagccaagatcgcatcgctgcactccagcctgagtgacagtgagactctgtctcaaaaaaggaaaaaagaaaagaaattaaaattaaataaattttaaaaatctttttttctttctttctttcttttttttttcaaagaagtctcctaagagccaggctattagcactatcctccctttcaagtgctatacagtgatcaggtgaaactggagaacatctgagttgggagagaattctaagatctcaagtgtaaaagcttaatttcactgactaaaaactgaagtccagaaaaggaaagaggtttttggcaaggggacacagccaactrgtggcagagctggcaatagaaccca

SEQ ID NO: 39529 - DNA, 743 bp, Homo sapiens
  misc_feature (1)...(743): n = A,T,C or G
ctatgggaatatgttctgatatattcnttcttaggtgatttcgtcatcgtgtgaacataatagcgtgtacttaacaaacctagatggtgtagcctacaacactcctaggctatataatataacctattgctcctggctataaacctgtacatgttactgtattgaatrctgtaggtaagtctaacacagtggtatttgtgtatctaaacatagagaagatacagtaaaaatacgatattataatcttataagaccattattgtatatgcagtccatcattgaccaaaatgtcgctaagtggctcatgaccataattctatgttatttgcaatggaaagttttccaaactctgttaattattttatcaattccctcaaaaactggatcaaatgccattagaaactaatgatttgtcataaattaccttgccttcctaacccaaaccttttcagtttcctatactgcagagtattgttttaaaaatggactgtgctttgtatgctttattcacaatagcaattccaggtgcatatgaagataaaggtgactaattaggttgctgcttattctcaaggaagtaattagacatcattagggtattattttttaaattagggtttgctttcatgtggaatttagataggactctgtctttgtagaaacattcttgaaactcattcatttgttcaaaaagaaaaattaaatgtcattattaagatctacctttctgaaaacatagccaa

SEQ ID NO: 39530 - DNA, 521 bp, Homo sapiens
tgtttaagccagaaacagtattttgttatgggggcgtgagctgactaatacatatggtaagagtacatttagttttgtaagaaactgccatggctgacatggttgttcacgcctgtaatsccagcactttgggaggcagaggcgggcagatcacttgaggtcaggagttcgagaccagtctggccaacatgatgaaaccctgtctctactaaaaatacaaaaaattagccaggtatagtggtgggtgcctgtaatcccagctactcgggaggctgagacaggagaattgcttgaacccaggaggcagaggttgcagggagtctagatcataccattgcactccagcctgggcaacaggagcgaaactccatctcaaaaaaaaagaaaaaaagaaactgccaaactgtcttccaaagtggctgttccattttgcattcccaccagcaatgaacgtgagttcctgttgttcctcatccttgccagcatttggtgttgccagtgttttgaattttggcccttct

SEQ ID NO: 39531 - DNA, 796 bp, Homo sapiens
caatttatgtaaaatttcgcttaggaaacattgttttggcaggttagtagtatggtgtgcatttcccagaaaattcagtgccgtgagtattacctttagttaagcatcttagaaatagtagctctttatggctaagtcagaaatactaccctcaaattctatgtgaccctagttatactgttgagcctttctgtgcctctgtgccttcatccttgaatcggggataatatacttacctcctaaggttattgtaaggattaaatgcatgtagtataaataaagagctgagaacaatgcatggcgtaaagtgataggtattattatatgcttttgttggctgttgattgaaggtgttcgctgttttgggggtgtcctttaatagagtaacttggtactgtggaaatagcatgattgtgagcaaaagaatcagatggtggtggctgcagactttgctgttcccttcttgactgttggttatagccaatgcagggtaagttataaagtcaagagcagagccgttttcacaatggacattgctttgtgatgtctgtgagcttgaatgtgagaatgattattttaattctctatgtaaggactttaaagtattggctattcggtagcttgaaaactctgtaatctcaatgctttaaactgagagtggaaaatcaataaagcaaaagcatgaggccacgcagtgtagaatgagtgtcttttcaccacgtagggaaatctgtagtcctaagaaaagagggagtgagaattctggcgaaargattgtgcctctgcacaaagtgca

SEQ ID NO: 39532 - DNA, 1133 bp, Homo sapiens
cattcggagccatcaaatcaattataacagccgctgctgtcttacaccgacaaccagtgattgataacaaaacctgtctgctttcagttctcatctgatagcaacgacccagtccctgccttctcttactggcatttgtcataaaccaatagcaattccaccatgcagaaaggtgcaggcggctctcttcagtccatctggtctcattttattttcaaattttaaaaaatataactattaagcaagattaatgccaaaagtttatttcttgaagtatctaacattacctgtaagtaatcccataatacagaatctctaaacaaaaatttaacaccacagaagactcctattatttaactcaatttctaaagtgagtcactaaaactttgaaagagaaaattttacattctgaaatctgtgacttttatatttagtaagaaaaatcatattttctttcaggttattccagatatgatgtcatgttttaaatagaatgtttacaaaatattataataagacttcttgaaaaacagaatttttttttactattaagcaatgtcattacaaaaatgaaataaaaacaatgcaatattataagcaaatattagtagcactgaatattaattgcatatagaagactggttttacagatatgaaaatataaaattattggcaaagctattagttgcagactaaaaccagtacactttagatattttgtgacgttaaataaacacctggtcatttgaaggaaaagaaaacaacactgatctaatttgcagaatttgaagaacattttgaaagtccgtaacaccttactatgcaatcttcaatggcaaaaaatatttaataaaaaatctggatacatttgacatcgtgttaggtggtgtgctaaaataaatgggaaagaatgatcttgcaggtatctttcacagtacaaacaaaacaaaggcaattcaaaagaccataaggcatttatatgagagggagaagagaagggaatgaaagtaacatatatcaggtgtctattttctataagatggtaactgatgctttacagacatgatttcattggctgctcaaacccatgaggtagatttttttttyccccaacttataaaaataaaggcacg

SEQ ID NO: 39533 - DNA, 644 bp, Homo sapiens
ttgacggtctggagccttctgtcaggggctggaattcaacagctgtcttcccttcaygccataaatgatccaggtcattcaatcagattaatccagctgggggagaagtcattggtgagtaaaacaccgatgtatgtgcaggcttggctggggttaagtaatgtgacaagagttgcatgaggcattggattactcaagctctcattcttagccccacatgtatcagtcaggagtagccagggtctgctgtgataacaaccccaatctcagtggtttaacataataaaaatttattcctcactttatgctatcattgatagacaggtggactctgttcattctagtcacttaggaacccagacagatagaggcctcatttcaacacatgcttccaagaaatgtggcaaattcttaaagcttctgcctggaagtgctgtgtgcaactttttcttttctctctctctttttttttttttttgagatggagtctcgctctgttgcccaggctggagtacagtggcatgatctcggctcactgcaacctctgcttcccaggttcaagcaattctcctgtctcagcctcctgagtaggtgggactacaggtgcacgccaccatgccaggctaatttttgtatttttagta

SEQ ID NO: 39534 - DNA, 644 bp, Homo sapiens
ttgacggtctggagccttctgtcaggggctggaattcaacagctgtcttcccttcatgccataaatgatccaggtcattcaatcagattaatccagctgggggagaagtcattggtgagtaaaacaccgatgtatgtgcaggcttggctggggttaagtaatgtgacaagagttgcatgaggcattggattactcaagctctcattcttagccccacatgtatcagtcaggagtagccagggtctgctgtgataacaaccccaatctcagtggtttaacataataaaaatttattcctcactttatgctatcattgatagacaggtggactctgttcattctagtcacttaggaacccagacagatagaggccwcatttcaacacatgcttccaagaaatgtggcaaattcttaaagcttctgcctggaagtgctgtgtgcaactttttcttttctctctctctttttttttttttttgagatggagtctcgctctgttgcccaggctggagtacagtggcatgatctcggctcactgcaacctctgcttcccaggttcaagcaattctcctgtctcagcctcctgagtaggtgggactacaggtgcacgccaccatgccaggctaatttttgtatttttagta

SEQ ID NO: 39535 - DNA, 471 bp, Homo sapiens
atcttagcactttggaagccgaaggcagaaggatgcttagaacaggagtttgagatcagcccgtgcaacatagtgagaactcatctcgattttgtttgttygtttgtttgtttttgagacacagtttcactctgttgcccaagctggagtgcagtggcgtgatcttggcacacctctgcctcccgggttcaagtgattctcctgcctcagcctcccaagtagctgggattacaggcagccaccaccatgcccagctaatttttgtatttttagtagagacaaggtttcaccatgttgggcagactggtcttgaactcttgacctcaggtaatctgactgcctcggcctcccaaagtgctgggattacaggcatgagccaccgtgtctggccccatctctatttttaaaaaaagaaaaagaaaaagaacttggaagcaggaggaaggagtggaggatagaaactgcaataca

SEQ ID NO: 39536 - DNA, 799 bp, Homo sapiens
tgcatgggagagttggggaaagaaggaacaagggagtcttcactttagtggctgtccttggtcaagcatcatcaccaaagacagggcatgacatttttcttcactctcttcccaagtccccagcacccctcagattgcctaggtatrggtctctttaagagcatttcaaagtcaggttccaagctgaggaggccagctgtgtcacagaaataaactgctaattacacgcaaaccctctgtaaacactgaaataaattacctttcccctacttttcattgtttccccaccccccaccccccaccggtcactggaggagggagctgagctgtagtgaggcaggacaagcagaggctgcagcagccatagtccctgcggacagcagctcactctgagagcagaacctgtgctgcatctcccgacagcctggcagtctggaagccatggcatctttggtgggttccgacagccactctgtgaaatcaatccatcagtggatatttaccgaatacttagccatgtctaggggactggggttgatgccaggagacagaacatttaataaggaaaagggatgtaaacacctagaagacgatgaatgatacaggagaatctgggaaggagtgctaataacatttaggtctgggggagaaggctcagggaagcatctcctctcttttgaatttctcagggatagtcagagaaggctctgtggagaaggcgacatcagagttttggaggtaattccaagagtgtacactcaaggttggcaatgatgcaaatggaaagtgtaaagtggct

SEQ ID NO: 39537 - DNA, 588 bp, Homo sapiens
tttgaactaagaaatattacttatagtagaggaaactggaaagaatagtggttgttatatataagtaaggtaggtaagatacaagctaaaggctggcatgtgatcacaaaggaaaacaggagatactcctaacaccaaaacctaaatatatacaatattgatycagaacatgctctcagccttgcttagtttgaacttaaacatgattctatacgaagcttcccatctcttttttttttttttttttaattgtgacagggtctcgctccatcacccaggctggagtacactggtaacctcaaactcctaggctcaagcaatcctcccacctcagcctcttaagcagctaggactacaggtggttgcccccacacctggctaattttcttattttttgtagatcagtgtctcactatacttcccaggttagacttgaattgctggcctcaagtgatcctcccaccttattctcccagagtacctggcatgagacactgtgcctggccccaagttttaaatatttaatagtaacatgattcattagtttcttatgcatccttctaatgtttatgcaaatataaatatgat

SEQ ID NO: 39538 - DNA, 605 bp, Homo sapiens
tattgattgggataatatatgtggcctgttctatacacacacacacatayacacacacacaaacacacacacgcacagcaaaaagaataaagaaatgttcacataaatgaactctgatctattaagcacagaagcttttcattttaacttttaaaatattttctattatatatgattcagttacctaagagtatactagatataatttagctacttctttatgattctggagacagaactatgaacctctgttactacatttgtgctacaatagtgatttcttccagggctgttagaaggagtgaagactacggcttacactaaatgacccacagactgtaacactgtctggtagtaagcagatctcttatgaaaaggtatatgaaactgtgacatttggccatttttgatctacagtccaatttcatatgatataaccaataatccttgaggttagggcttcagaaccttcttctccgatgtcactgctcccagtctcccggggtggaatgtctgcttgccccatgctgcttctaatatttgtcaccacttctagtgcccacctcatctctgatgctatttttctttttttaaaaaaatctttt

SEQ ID NO: 39539 - DNA, 868 bp, Homo sapiens
ttgttgaaaaatatataatactcaacaagatatgtttaactcttactcaaaaaagaaacaaaaggcatatgggatgacacatattagactctttaatctagtctgagatcataatattcaaattatttttagggatatttgccatattttataagtagaaatatttatgtctaataaatctgtaaactttttttataaaaagtaatgtcactttaatcagttaactctaaatgatctgtcctcactgaggactaattttgactgtgtgatatttttaaaaaataattttcaacttataaatttactagatagcttccaatattcttttccataacagttgtcaaagttactagtaacagaaactttctaactagaagaagttttttctcactatttttcaagtatgtatgtcatttggaagaggttacggagtaatgaataccagagaactagaaagaaaaaaaaaattcaggaatataggaattttattggaataataaaccagtataggaagaagtagatctcaaagtgaattctattttctaacaaaatgaattttaagataagtatgtttaatggcagattgactttaaatcaagaagaagagaagagaagaaatgtcgatatattaaaagaaaaaattagacccgaagagcaacttaggaaaaagttagaagtgaaacaacaacttgaacagactctcagaatacaagatatagaattgaaaagtgtaacaagtaatttraatcaggtaaatcaatctctggcaaaaattttatatttctgactttatttcatcagtattacttttaacatccctttgatttagtatgtgttattcaggtctaaatcaaagaaaagtattgtc

SEQ ID NO: 39540 - DNA, 512 bp, Homo sapiens
gtgtaaacccaatttttgtatgtagtcaaattgattaatcttttattttatgcttttgagcttgttgtaattcagggaaagtttttttttttttttcaattctgaggctcttaaaaattctctagtcgtttctcttttactttcatgaattcgttgtctccaaataaatgtttgaactttggggaatttatgctctatagtatttgaagttttgaktcaatggttcttcaactgatacctacttataaaaaccctttcattgtataaacgtacaagttgttctttaatttcagaggaactatgatatgccattttattgagtgctagttaaatttttattttgttttatttaggtttctcacactcatgaaagtgaaaatgatctctttcatgaaaattgcatgttgaaaaaggaaattgccatgctaaaactggaagtagccacactgaaacatcaacaccaggtgaaggaaaataaatactttgaggacattaagattttacaagaaaag

SEQ ID NO: 39541 - DNA, 523 bp, Homo sapiens
ttgtgtcaatatatctgctggcatttttagaattaataatagtagtagtagctaacatgtactgtgagtttattttaacccagagtctctacataggttatcttaccttttttttttttggagggggggagggggtggagggagtctcactctgttgccagcgctggagtgtggaatgcagcgatgcaatctcggctcactgcaacctccatctcctgggttcaagattctcctgccttagcctcctgagtagctgggactccaggcacgtgccaccacacccrgctatcttaccatttttaaagaacatcatgattactgtccattctgtaaatgagcagtcttaaggtgccatgaggtttagtaacgtccacacttgctaataagtggtagaaatcagctttgaacttggccttgtgactgcagggtccacaggttaacttccacacccctttttctcccagtcgctgaagtcgtactgatcttagacaagcatcctaactttctctaggaccgaagctgg

SEQ ID NO: 39542 - DNA, 644 bp, Homo sapiens
ttcttaattcaaatgaatttgggaaggcagaagaacactctcaggattggagaagctgacaacaaaaataaaaaggagtcaacaataaagaagaacctcaagatacagttagtaaatgttaataggaggaaaaaagcctagggaacatttygagagtcaaaatagatcttgatctctaagcactgcattaaaaaaagaaaaactttatgttatatcagctaatcatctatataatggatttttttccctcaaagtttccctaacagtctattgaagggagagaggataggaagtgaagtggcaaaaagtgttatcgaatattggatctgatgatttctgaagcaagtgacatcttgagagatcagtggccgatgcagtgagtcttatgttttatagggccacatctcttaaaagccactcactttatatagggccacacctcagaagccactcacctcgtcgatttgaatcaattgcagcacctgtaatgtggtgtttacctactttctagctagtctgacaaaatgtttaaggaaaacatcaaactgtgtcgtgagtctaaaggcaaacctttttgttacactccattgtcaatttctctttcttttatcttccttctttcttttttaactgctgcagaactc

SEQ ID NO: 39543 - DNA, 1755 bp, Homo sapiens
tatattatttatttgtttgtctgtgttacattatttaatccccacaaaaacccaatgatgtatatgttttagtgtcataattatttcatacataagtatggaggcttacagaccttaaggcatttgcccaaggttacagtacgtggtagaaactagagttgactctctgtgattcagctcttactcagtgtgactggtctttcatgtagtcatttattgccttcctagaacatacattcacagggtaacaggttttttgtgggttttttttcacttacttgacccccctatattttctatgactaggtcataaaaagtccccttgtgaaaacaattaaaggttaaatcagtggatgtatatggccctttggattctaatagaaagggctagatggtaaaatcttattaaatcttatgtcctttccctttgcaccattttccaaaaaggataaaacagagcaagcatgctttacaaagagaatgaactccttcaccaagccaactatgtgcaaatcttctcaagtatttgagaagcatcaattcttagtgaactaactaaaatgtatctcttcattaaggaagattttatcacaaactttactatgtaataattatttcatgcagctttagtcatagttctgcttttatataaaagtaattcttttgttatataaaaatttacyttggaatactttgcagcctgaactttccaccagatcctatcaatctaaataagtgatggttgactgtaactggggaatacaaagaaaacaatttggcataaattaccagtaaatattgttgatcaaccagaaattaagatagtaatgttctacttattcatgtaacattcaaacaaaattcaaaagattcctggctatcactgaagaagttaaatattgttttccaaaattacctgtctagatttctccagcctggatcaccttttctaacagcaatatgaagaaatgacacggagagtgcaagattgttccagaggcttctttcttcaaaagagacaaaacaatccctccaaatgttttgtcattttcccataaatagctataaatcctatttttgtttccttaactctcttttggacaagcagcaaaagtcatcaaagaacagattaagttctacaaactgggtggttgctatttttcattttatctactattgaatatttcacttggatattaatattcatactcatgatcttcttgcttgtggtaatggctagtataggggagaaggaaaaaaataaaggacataattctagcaaatattcactgactacctctaatgtgccaggtattaatctaaggactttatatgcaccaatccacagaatcctcacattaacctttcaggtagatactattattgtctccattttacaagcaaggaaatggcaaaagcaaggggacctcaggcctagagagctgacctccagagcactgtacctaacccctatattaatgagttctgagtttcatattctgattatattttagataatttgaaccaactctattcaaaaacaatggtttgtgtgcaaacatacaggaaatcattcccacactgcaattacttatttagaaataaaaataacctaaccctatatggaaaattatctctttgttggaattcctatcaaatttattaagcctcagtaaatatcaaaacagcaatattaaaattgtctttgaattcaatgtcaattctttaattttcttgttaaaactaaaaacatgc

SEQ ID NO: 39544 - DNA, 581 bp, Homo sapiens
cattcagcaaagtgtgcaataagcactataatgatctttgctttacagataaggaaattgagrcataaaagagataacttgtccaaattatacatagctatcaagtagcaaagctgaaataatacctcatttctatgtaactttgaagtttgttttcttaactgctatactttgaggcctgaagaatttgtcttttgcaagatcatgcagattatgaacaatgaaacaacaatttgaatacagatatttggactccaaagccaatgcttttcaccaccataataccttgctccaggaaaattatgtttgctgatataaaataatacatgtggaagctgtatgtgatgcctacaattgcgcttttgggttatcacacctgcatttttcaatgtagaaaccacagagtctatttatttgtaatttgtagccaagacttatattctactttcatgtaaaatcatcattttaataacataacttgtttatttttccaatattaggagggtgaggggaagcttaagagactgaaacatacctgcaatatttttctataaaatgtgtaattccataacaattagaaa

SEQ ID NO: 39545 - DNA, 581 bp, Homo sapiens
cattcagcaaagtgtgcaataagcactataatgatctttgctttacagataaggaaattgagacataaaagagataacttgtccaaattatacatagctatcaagtagcaaagctgaaataatacctcatttctatgtaactttgaagtttgttttcttaactgctatactttgaggcctgaagaatttgtcttttgcaagatcatgcagattatgaacaatgaaacaacaatttgaatacagatatttggactccaaagccaatgcttttcaccaccataataccttgctccaggaaaattatgtttgctgatataaaataatacatgtggaagctgtatgtgatgcctacaattgcrcttttgggttatcacacctgcatttttcaatgtagaaaccacagagtctatttatttgtaatttgtagccaagacttatattctactttcatgtaaaatcatcattttaataacataacttgtttatttttccaatattaggagggtgaggggaagcttaagagactgaaacatacctgcaatatttttctataaaatgtgtaattccataacaattagaaa

SEQ ID NO: 39546 - DNA, 621 bp, Homo sapiens
tgcacacatgcacacaagcatacatgtgtgtgcacacatacatgcaacractgcaaacactcgctagttcaggcaatgatagtgctcttcaggtggcccctcagtagtggcatgttcagcggatggagtcatttctgatttgggttggaataaacagaaataggaaataagcaagggcgtgtgtgagagtaatggcataggtaatagttgccttagaaaaagatttggtcaaacaatcctagaattatggagaaaaactgtagtagaataattttcacaatcaaaattatatcacgtttttgtcacagtgatgtgtttgccttacttttatttctgagatgttagttgaataaaaaaaaaagacttacattagcactcataggctatacctctgggaataagtgtactttggcctgctagttctgaactgaactagcatcatttgcatcacgagcctggcagcctagaggccagccctgtttctaaagttctgttcatggtcattgcacaggggactcttcctgactccattcttcctctatttgatacttactttttagttggtctcttgcttgcggttcaaaaataacttttgtctttatctattgactttcattctct

SEQ ID NO: 39547 - DNA, 681 bp, Homo sapiens
catggacacagggagaggaacatcacacaccagggcctgtcaaggggtggagggctagggaagagatagcattaggagaaatacctaatgtagatgatgggttgatgggtgcagcaaaccaccattgcacgtgtatacctatgtaacaaaccttcacattctgcaaacgtacctcagaacttaaaagtataataaaacaaaatttccattctgtatgtctgtacaaaaaccacaacataaaatgattttaataatttagaccataaagtacatgtagattgcattgctttgctaattgtaggaatttaaaaatatttttatacaaaagtgatgactgattaattggagtatttactatcttctttattttaccaagtgctagagtgacttctagggaaaataaattattctttgtaggagggatgggaaaatgagatcagcctcttgaattacctaccagacattatgctaggtatttcatacatattattgcaaaaagtctcatatcacactaggtattgatatctttttatagattaaaaataaaataactgagacctggggatgttaaggagtcaacaagaatactaaattatatatccagagttcaaaaagaagtcaagctgactgtaaaaatcatgygctttccaccatagcacatttatagttatattaaagcta

SEQ ID NO: 39548 - DNA, 567 bp, Homo sapiens
gcacaagttctcttctcttgtctgccaccatgtaagatgtgcctttcaccttctgccgtgattttgcrgcctccccagccacgtggaatttaagtccattaaacctcttttataaattgcccagtctcagggatgtctttatcagcagcatgaaaacagactaatacagtaaccaaataaatacacataaaatttcctttgaaatttttttccgaggcttaccatacggttactaacagcatcacaaaatacttttggatatagaaagatgttcacatcaatcaatcaatcaaattttattattataaaaaacctgaacattaatggtttcacctacaaaaggcatacatatttatgtctttatcaaatttctccttggcagagaaaatcctctgaaagatgaaggtaaaatgctatatgctttaggtaaccatcatgaacaaatttctgattagtagactttatgctccacctccaccctggataaagtaaaaaatagaaaataaaaagaaattctttccctctccaaaagctacaatactgagaaactgttaaggacatgttaat

SEQ ID NO: 39549 - DNA, 567 bp, Homo sapiens
gcacaagttctcttctcttgtctgccaccatgtaagatgtgcctttcaccttctgccgtgattttgcggcctccccagccacgtggaatttaagtccattaaacctcttttataaattgcccagtctcagggatgtctttatcagcagcatgaaaacagactaatacagtaaccaaataaatacacataaaatttcctttgaaatttttttccgaggcttaccatayggttactaacagcatcacaaaatacttttggatatagaaagatgttcacatcaatcaatcaatcaaattttattattataaaaaacctgaacattaatggtttcacctacaaaaggcatacatatttatgtctttatcaaatttctccttggcagagaaaatcctctgaaagatgaaggtaaaatgctatatgctttaggtaaccatcatgaacaaatttctgattagtagactttatgctccacctccaccctggataaagtaaaaaatagaaaataaaaagaaattctttccctctccaaaagctacaatactgagaaactgttaaggacatgttaat

SEQ ID NO: 39550 - DNA, 1143 bp, Homo sapiens
gagaaaagatcttccaccatcccacttatcttactaaagtggaggtttggaatgttaagaacaatccatgctgcagaaagtagtcctggattgtgccagttaatggcacatgggaaacatggaaaaaccacacagaatccctatacagtcacctgtagagcctcttgtttacataataagctttacttagagagacagccgagctggttggtctcacaaaagggaggatgattcttttattagaattatcacttttttttgcagtgcatttattcattcatcatatgtctgttacagatgtgtctagatgaaaggaggaacttaattaagatttattgaataaacactgtgagaaaagctattgtactgccatgctgctttgcagagaaatttgattcttgcttccctccttattcaatgaaaactccacatgaaagtatcaatttgttcttggcttccttgatatgcgttttgaaagacagttgctgaaccacaatgcaagtgtatttccctctggtttttattctatattatgcactatcacgttgtctattttatttcaccatgagaaattctcaaagattaaggtaaagtgaatgtgaagactcaaatggaactccactctgactgagcaggccagttcaggtgtttcccggtcctaggactttgcagatatggaaacacttctctggagaacccattatcctctttaactcaaaagcctaaaacattctgatgtgaaccgtatgctcccaaagcattgtgaatacctgtatcaattgtaattgttattgcaattaagaaaaaatatttagacaactatattatacatttcttaaaataagggatggtatattctgcttatactcaagaagtctgtactgaatgaattgccatctgtttttaatagacttgctcaactcccaagttatccaggaggacttcyttatttcacccttacctgaatcaatatctctttccatatactgctagcggtacttttctatattatgtgactatctctatgtgtttctgttgtgaaaggaaaatacattctgggaccccaaaatcactaagctaaagggaaaagttcagctgggaactgcttgggcaaacttgcctcccattctcttcaaggtcacc

SEQ ID NO: 39551 - DNA, 551 bp, Homo sapiens
tgggtgctcggtaaatacttgaattgactacgttcctctggaaaaatatttccatttcatgtatcagtgaacaagtggtcattctttcagttttaaattaaaataatatttttattaatataacttcttatcgcaagacttttatctgacagtcacattttaatttttttaaaattttaattagagacagggtcttgctgtgttgcccaggcttacctcaaactgggctcaagttatcctccckcattggcctcccaaagtggtaggatcacaggcatgagccaccatgcccagtcaacacattttgatttttttttttttttttttttttgagacagagtcttgctctgtcatctgggcaggagtgcggtggcatgatcttggctcactgcaacctccgcctcccaggttcaagctattctcctgcctcagcctcccaaatagctggaactacaggcatgagccactgtgcccggcccaacacattttgatttctacattgatttgattcatgcttacaaatagtgtttagacgatagtgctgtagtgat

SEQ ID NO: 39552 - DNA, 1165 bp, Homo sapiens
  misc_feature (1)...(1165): n = A,T,C or G
ttcccttagagttccccagaggaccacctaagtacatttcaatgactactttacaaataagaggggaaagtcaccctttcaagttttcactgcctgcatccatactcgttacttccttcactttaagtgaagatattttctcgtctctctaaaatgagcctctctgggtmtgttcttaagattaatcctgtcacctcacaactatctaagaatctattattattatgaatacagacagtattaataattagtaattaataattactaatactgacagtattattactaatacagacagtaatctattactgtctgtatcttcaacttctctactgattctttttttctcaagcaagacatgctcacctcttattcatcttgaaaaaaactctctcttgctacaatgcactgtttttatcctaaaatctcctctcatcccttcccctttaaaaccaaacaatgtgtacctcatcattcaaaatttctcactcttggccgggcgtggtgcctcaggcctgcaatcccagcactttgggaggctgagacaggtggatcacctgaggtcaggagttcaaaaccagcctggccaagatgatgaaatcccctctctactaaaaatacaaaaataagctgggcatggcggcacatgcctgtaaccccagctgctttggaggctgaggcacgagaattgcttgaactcgggaagtggaagttgcagtgagccaagatcacaccactgcactccagcctgggtgacagagcaagactccatctcagtcaatcaatttctcactctccattcatccttaactcactacaacctggtttctgcctccataccattcctttgaaactgctttcaccagtaataatttctcgagtctccaaaagggattcagtcctagtactgcttgacctctcagttttatctatcatcactccttgcttcaagaattctcctccactggttcattaaaaaaaaaaaaaaaaaaaaaaaaaaaaaaagccactatcacctgcttcccaannnnnnnnnnnnnnnnnnnnnnnnnnnnnnnnnnnnnnnnnnnnnnnnnnnnnnnnnnnnnnnnnnnnnnnnnnnnnnnnnnnnnnnnnnnnnnnnnnnnaaaacaaaaagtcatactttacatatccctattctagc

SEQ ID NO: 39553 - DNA, 1165 bp, Homo sapiens
  misc_feature (1)...(1165): n = A,T,C or G
ttcccttagagttccccagaggaccacctaagtacatttcaatgactactttacaaataagaggggaaagtcaccctttcaagttttcactgcctgcatccatactcgttacttccttcactttaagtgaagatattttctcgtctctctaaaatgagcctctctgggtatgttcttaagattaatcctgtcacctcacaactatctaagaatctattattattatgaatacagacagtattaataattagtaattaataattactaatactgacagtattattactaatacagacagtaatctattactgtctgtatcttcaacttctctactgattctttttttctcaagcaagacatgctcacctcttattcatcttgaaaaaaactctctcttgctacaatgcactgtttttatcctaaaatctcctctcatcccttcccctttaaaaccaaacaatgtgtacctcatcattcaaaatttctcactcttggccgggcgtggtgcctcaggcctgcaatcccagcactttgggaggctgagacaggtggatcacctgaggtcaggagttcaaaaccagcctggccaagatgatgaaatcccctctctactaaaaatacaaaaataagctgggcatggcggcacatgcctgtaaccccagctgctttggaggctgaggcacgagaattgcttgaactcgggaagtggaagttgcagtgagccaagatcacaccactgcactccagcctgggtgacagagcaagactccatctcagtcaatcaatttctcactctccattcatccttaactcactacaacctggyttctgcctccataccattcctttgaaactgctttcaccagtaataatttctcgagtctccaaaagggattcagtcctagtactgcttgacctctcagttttatctatcatcactccttgcttcaagaattctcctccactggttcattaaaaaaaaaaaaaaaaaaaaaaaaaaaaaaagccactatcacctgcttcccaannnnnnnnnnnnnnnnnnnnnnnnnnnnnnnnnnnnnnnnnnnnnnnnnnnnnnnnnnnnnnnnnnnnnnnnnnnnnnnnnnnnnnnnnnnnnnnnnnnnaaaacaaaaagtcatactttacatatccctattctagc

SEQ ID NO: 39554 - DNA, 379 bp, Homo sapiens
cgcccagcctgaaaatttattaagataaccatctcctcacttgtaacagtctgaccaaaatttaaattagaaggacttgcccttcagaagtttatatgccttttcgacagggcgtggtagctcacacctgtaatcccagcactttgagaggcagaggcaggcagatctcttgaggtcaggagttcgagaccagcctgggcaacttggtgagacacctgcccccaccaccacctccatttytacaaaaaattagccggacatggtggggcaggttgtgatggtgcctctgtactccagcctgggcgatgaattgaaatcctgtctcaaaattttttttaatcattaaaaaaaaaaaaaaagaagtttacataccttttca

SEQ ID NO: 39555 - DNA, 1894 bp, Homo sapiens
atacattttaagctttgtttctcttccattgcagagcatcataggacacattcatgtcccctgacaagctctcatcatgcaccttcatggcctgacccagttaattagcatagtaggcagtagcagtactcctgagagccatttatataccaggacaggcaggagtaagttaactctacacagaagagaccgcaaaccacataaacagatgcatcaactaaatacaaaatatactcaaataaactaaatataaaatatactcccaactctgcttttcctgaaacagatcaccaaaacatccacagccactccaacgccgctccaggaggggaaatatgaactcagacggaaaacaagagtcttaattttgattaaagtattttatttttgcaacatgaaaaaatgtaaccatgtaaaaatatcactaaggcctcttccagggtctttaaaggagttcatgcaagtaagggacctgtaagtttaaattcattaactgcatagaaaatccacttctagaaggataaaaatcctggttttacctttttcttggtgtaggcaccatcaatagacagcattacctgttgctgggtatttttgcattaaatatgcaatatttattgagtactgactaggcaccagactctagggatacaatagtgctgaaatgaataccgtccctgccccygggagcttaagctttagctaagagagagacatcaatcaaagagttatttagatgaatgtcccaggaaggttccttctatggggcaggtctgttacacccaaaccaaactaattattgagatgtgctgacagggaagggggaaggccaggaatgcaaggagtccctcagcagcggcagacccctcagaaggtctcctctgaccttgtggttctcctagggttcagaatctggccaccgtgttccacacgtgtcccagtctgctctgcagctatattcaatctattcctctggcacttcaggcttagaattgctagcatgtgaggctgtaccagcacggcctctttagctggggaacccaggacccaaagtctagcagaggaaacactgggcgcttgtctggggaagctaaaagaggatcctgaagtaagaagtggttagtgcagctgacctcctctcccctaactaaaaacagggaagttttgtgagaaccctcaatgaaccctcaatgatcgaagaactctccgatctcccattttaccctgttttttcctacccttcgcagaatcagcctactgacatattttttatcttattttttcagccaaacatcttgaaatagttacctacacccatttcctccacttctcacttccaatttcctactgctccacagcagtctagcttctgccagtgaaactgcaggtaccaggtgttagaggatgtcactgccctaccagtatcccctgcccttactacttcagtgaaccccaggcttccaggcgctggtacctgcattcattcacctgagggatttctctcacagccggggtctgttctgctgcccaagcagcaggctggaaatgtcagtgaattaatgccctctaagaacagccctcaaccaatgacctgaaagagctccctcaccccgtgagacgaggaacgatgaggtgggtgttctgcactgactccctgaactttcccgttgggattaagctataattgcccagggtggctgctggcttaattcaccctttactggccgtcccctccctgttcatccccctctcccacacacaccagtgttcttcatctttcaaatagactaatcctcgtctcagggtccacttttaggaaaactcaaactaagcaccaagatcatcagtgacttcctgactgtttcggtcttggtgaatccatcagttagcaagt

SEQ ID NO: 39556 - DNA, 1894 bp, Homo sapiens
atacattttaagctttgtttctcttccattgcagagcatcataggacacattcatgtcccctgacaagctctcatcatgcaccttcatggcctgacccagttaattagcatagtaggcagtagcagtactcctgagagccatttatataccaggacaggcaggagtaagttaactctacacagaagagaccgcaaaccacataaacagatgcatcaactaaatacaaaatatactcaaataaactaaatataaaatatactcccaactctgcttttcctgaaacagatcaccaaaacatccacagccactccaacgccgctccaggaggggaaatatgaactcagacggaaaacaagagtcttaattttgattaaagtattttatttttgcaacatgaaaaaatgtaaccatgtaaaaatatcactaaggcctcttccagggtctttaaaggagttcatgcaagtaagggacctgtaagtttaaattcattaactgcatagaaaatccacttctagaaggataaaaatcctggttttacctttttcttggtgtaggcaccatcaatagacagcattacctgttgctgggtatttttgcattaaatatgcaatatttattgagtactgactaggcaccagactctagggatacaatagtgctgaaatgaataccgtccctgcccccgggagcttaagctttagctaagagagagacatcaatcaaagagttatttagatgaatgtcccaggaaggttccttctatggggcaggtctgttacacccaaaccraactaattattgagatgtgctgacagggaagggggaaggccaggaatgcaaggagtccctcagcagcggcagacccctcagaaggtctcctctgaccttgtggttctcctagggttcagaatctggccaccgtgttccacacgtgtcccagtctgctctgcagctatattcaatctattcctctggcacttcaggcttagaattgctagcatgtgaggctgtaccagcacggcctctttagctggggaacccaggacccaaagtctagcagaggaaacactgggcgcttgtctggggaagctaaaagaggatcctgaagtaagaagtggttagtgcagctgacctcctctcccctaactaaaaacagggaagttttgtgagaaccctcaatgaaccctcaatgatcgaagaactctccgatctcccattttaccctgttttttcctacccttcgcagaatcagcctactgacatattttttatcttattttttcagccaaacatcttgaaatagttacctacacccatttcctccacttctcacttccaatttcctactgctccacagcagtctagcttctgccagtgaaactgcaggtaccaggtgttagaggatgtcactgccctaccagtatcccctgcccttactacttcagtgaaccccaggcttccaggcgctggtacctgcattcattcacctgagggatttctctcacagccggggtctgttctgctgcccaagcagcaggctggaaatgtcagtgaattaatgccctctaagaacagccctcaaccaatgacctgaaagagctccctcaccccgtgagacgaggaacgatgaggtgggtgttctgcactgactccctgaactttcccgttgggattaagctataattgcccagggtggctgctggcttaattcaccctttactggccgtcccctccctgttcatccccctctcccacacacaccagtgttcttcatctttcaaatagactaatcctcgtctcagggtccacttttaggaaaactcaaactaagcaccaagatcatcagtgacttcctgactgtttcggtcttggtgaatccatcagttagcaagt

SEQ ID NO: 39557 - DNA, 1894 bp, Homo sapiens
atacattttaagctttgtttctcttccattgcagagcatcataggacacattcatgtcccctgacaagctctcatcatgcaccttcatggcctgacccagttaattagcatagtaggcagtagcagtactcctgagagccatttatataccaggacaggcaggagtaagttaactctacacagaagagaccgcaaaccacataaacagatgcatcaactaaatacaaaatatactcaaataaactaaatataaaatatactcccaactctgcttttcctgaaacagatcaccaaaacatccacagccactccaacgccgctccaggaggggaaatatgaactcagacggaaaacaagagtcttaattttgattaaagtattttatttttgcaacatgaaaaaatgtaaccatgtaaaaatatcactaaggcctcttccagggtctttaaaggagttcatgcaagtaagggacctgtaagtttaaattcattaactgcatagaaaatccacttctagaaggataaaaatcctggttttacctttttcttggtgtaggcaccatcaatagacagcattacctgttgctgggtatttttgcattaaatatgcaatatttattgagtactgactaggcaccagactctagggatacaatagtgctgaaatgaataccgtccctgcccccgggagcttaagctttagctaagagagagacatcaatcaaagagttatttagatgaatgtcccaggaaggttccttctatggggcaggtctgttacacccaaaccaaactaattattgagatgtgctgacagggaagggggaaggccaggaatgcaaggagtccctcagcagcggcagacccctcagaaggtctcctctgaccttgtggttctcctagggttcagaatctggccaccgtgttccacacgtgtcccagtctgctctgcagctatattcaatctattcctctggcacttcaggcttagaattgctagcatgtgaggctgtaccagcacggcctctttagctggggaacccaggacccaaagtctagcagaggaaacactgggcgcttgtctggggaagctaaaagaggatcctgaagtaagaagtggttagtgcagctgacctcctctcccctaactaaaaacagggaagttttgtgagaaccctcaatgaaccctcaatgatcgaagaactctccgatctcccattttaccctgttttttcctacccttcgcagaatcagcctactgacatattttttatcttattttttcagccaaacatcttgaaatagttacctacacccatttcctccacttctcacttccaatttcctactgctccacagcagtctagcttctgccagtgaaactgcaggtaccaggtgttagaggatgtcactgccctaccagtatcccctgcccttactacttcagtgaaccccaggcttccaggcgctggtacctgcattcattcacctgagggatttctctcacagccggggtctgttctgctgcccaagcagcaggctggaaatgtcagtgaattaatgccctctaagaacagccctcaaccaatgacctgaaagagctccctcacccygtgagacgaggaacgatgaggtgggtgttctgcactgactccctgaactttcccgttgggattaagctataattgcccagggtggctgctggcttaattcaccctttactggccgtcccctccctgttcatccccctctcccacacacaccagtgttcttcatctttcaaatagactaatcctcgtctcagggtccacttttaggaaaactcaaactaagcaccaagatcatcagtgacttcctgactgtttcggtcttggtgaatccatcagttagcaagt

SEQ ID NO: 39558 - DNA, 546 bp, Homo sapiens
gcctcggcctcccaaagtgttggcattgcaggcgtgagccaccgcgcccggccaggaatgacttcttaaaccaggatttgattttggttgaactttgctttcagaactagaactacctgctatccaagacttgttaaccacgttttcatgggcaaattacaaaaccctttcaaccccagtttcctcttctataaactagtggtaatattattatctccagaattaatcttaggagtaaatgaaattatgtaaaggcatttagtctcataaccgggctcctagaaagcactcaggaatgttagttctctatccatttcccctgtttatctttgtgtttgatgaattataggatgatatgaaatgatctgaaatgaactgtaatataaacatcaataaaacaccaataaaaaattttattctcacatctggatgctatactaggccttcacctcctscaaaagttacagttttattaatattcatttattatttattattatagtcaaagacccagagaagcattccaggaacaaagcagcaggtaag

SEQ ID NO: 39559 - DNA, 1116 bp, Homo sapiens
cattcagggaactgaaaagggttcactctagccaggtatgcagtgtgcaagggtggagagtggcaaaagatgaagaggacatggcaaagaatggagggacttagtcaaagctgaccctggcattggggctaatgttcctagccagttgctmttacagagaaagtaaagaggaaataaatttaaaatttactgtttaacagccctgcaggtagacattgtctccattttatatagtgcagctgagactcagagaatttaagacatttgaccaatatacagctagttagtggcagagctgggattcaaagacagacctgtctgatgccaaaaatctgtgctcttccctttttgtcactccagcagacttcagaaagctctacccagtgatctcttagatcaggatggaaagaattctgactaagaacagacaccttctcaacttgatgctttttctgttgaggcagtattaatcatgggtgagcttgggacccagcatggaagtaaaagagcttagagcagagctttctttggagctgtgcctcctgttccctgagtctcaaagaaaaactcctccaggtgctccagaggccttgacattagccagattcaaggatgagctcttcccaggtgctaaccctcagatcaggactgcattgccaaggagagccgctggcctgcggagtcccatgtgaagcctgtcaagggggacccctggacatcagaatatatgacttggctcatcccctcacctagaacctgttgtgatggccacttccaagatattatcattggaaagaaagaatgctgatccccagttaaaggggggaaatccttgccctagtgcaatcccatcttgtccagcagttgagagaatagtgtgtcaggccgtgcctccccatccctaagcagccatagggactgaggcttttaatttgctgtcacagctccaggcatttttctgagccaggaaagtcatgcctggcaggatgttaaggagaatattaccatctgaatgtgaactctggattagtcagtctccctaaattcaagatctagtattttctagggtaaatatggtaccttcacattttctaagctggcatgagtgaatggcta

SEQ ID NO: 39560 - DNA, 688 bp, Homo sapiens
aaatgcattccgggaaaaraggaggagagtattcacagccaggaattgaggaccatcacactaggttcttaacatgtcaaaattacagacttcttagctactagaactaataataagtgagaactaagtaagtttagcaaggtggcagaacacaaagtcaatattttaaaatcaattatatttctatatacaagcaaccaacaattggaaactggaattttacaaacacttcttaaaagtacataaaaacatcaaatacttaggctggatgcagtggctcacgcctgtaatcctagcactttgggaggccgaggcgggcggatcacctgatgtcaggagttcgaggccagcctgaccaacatggagaaatcctgtctctactaaaaacacaaaaattagccaggtgtggtggcgcatcctgcaatcccagctactcaggaggctgatgcgggagaatcacttgagcccgggaggcggaggtggtggtgagccaagatcgcaccattgcactccagcctgggcaacaagagcgaaaatccgtctcaaacaaaacaaaacaaaaaagccacatcaaatacttagtgatacacttaattaaatatgtgcaagatgtatgtgttagttatctattgctgagtaacaaattatcctaaacttagtggcttaaaatgaacattgactatctcag

SEQ ID NO: 39561 - DNA, 529 bp, Homo sapiens
accttaattacttcctagaggtcctatctccagacacagtcacactgggggggtagggaaacctgcaaactcatatcaaggtgctacattcgcactcaaatgcttaattttttttttttttttgaaacggagtctcgctctgtcaccacagtggagtgcaatggcgygatcttggctcactgcaaccttcgcctcccgggttcaagcgattcttctgcctcagcctcccgagtagctgagactacaggcgcacaccaccatgcccagctaagttttgtatttttagtagagacagggtttcatcaggatgcccaggatgatctcaaactcttgacctcgtgatcctcccacctcggcctcccgaagtgctaggattacaggtgtgagccaccacacccagcctaatttttttttttttttgagacagcctcactctgtcacccaggctggcatgcagtggcatgaacacagctcattgcagccttgacctcctgggctccagcctcagtcccccaagtagctgggacca

SEQ ID NO: 39562 - DNA, 533 bp, Homo sapiens
gaaaggaaacacctccgttaaatgatgctctttaaaactgactaataactaatactcatttcagatgagggctctgctataaaaaggtctatatcccatgatgtatttcttgtaccagtgctataggttaaaaacctttggttttakgggaattcatttcctattaagtatttcttttaaaacaaaatatgtgctcttgtttaaaagggccaatcgttttagttttccatcatctgagttaaaatgtcttgggactttttatccccccaaaatataaaatttcccaagaaattaaactgaagttaaaaaaaaataccccaacaaccttgcagatcagacatatggaaaaatgttaatatatctttttaaaatttaccaagaaaaaattgctaccgggatttttaaaatgtgacaaatagatacttcactgcataaatgactacaataacatctatttctatcttcaaaaaaagtgatttttcttctataagaagtccacttccattagcaaagtaaaattcttctaaccttaa

SEQ ID NO: 39563 - DNA, 533 bp, Homo sapiens
gaaaggaaacacctccgttaaatgatgctctttaaaactgactaataactaatactcatttcagatgagggctctgctataaaaaggtctatatcccatgatgtatttcttgtaccagtgctataggttaaaaacctttggttttatgggaattcatttcctattaagtatttcttttaaaacaaaatatgtgctcttgtttaaaagggccaatcgttttagttttccatcatctgagttaaaatgtcttgggactttttatccccccaaaatataaaatttcccaagaaattaaactgaagttaaaaaaaaawaccccaacaaccttgcagatcagacatatggaaaaatgttaatatatctttttaaaatttaccaagaaaaaattgctaccgggatttttaaaatgtgacaaatagatacttcactgcataaatgactacaataacatctatttctatcttcaaaaaaagtgatttttcttctataagaagtccacttccattagcaaagtaaaattcttctaaccttaa

SEQ ID NO: 39564 - DNA, 594 bp, Homo sapiens
ttattggatcatatatctaaaaagcccacggtataggtcatttttatgtgattctgtggctcaatgatgaaaccaagagaaaatatatatttcttctttgagccatgacagagaacctgatacagaactagtcataaacaactggaaaattgggcaaattatctgcaacaaacaacagtttttatttggttggggaggttatttttttatttcaatgagtttttggggaacaggtggtgtttggttacatgaataagttctttagtagtgatttccgggattttggtgcacccatcacccaagcactgtacactgtacccagtgtgtagtgttttatccctcaccccaccatcccactctttcccgagtccccaaagttcattatatcattcttacacctttgcatcctcatwgcttacctcccacttatgagtgagagcatacaatgtttggttttccattcctgagttacttcacttagaataatggtctctaattccacctaggtgctgcaaatgccattatttcattccttttagactgagtagtattccatagtgtgtaataatatatatatatatatatatatatata

SEQ ID NO: 39565 - DNA, 594 bp, Homo sapiens
ttattggatcatatatctaaaaagcccacggtataggtcatttttatgtgattctgtggctcaatgatgaaaccaagagaaaatatatatttcttctttgagccatgacagagaacctgatacagaactagtcataaacaactggaaaattgggcaaattatctgcaacaaacaacagtttttatttggttggggaggttatttttttatttcaatgagtttttggggaacaggtggtgtttggttacatgaataagttctttagtagtgatttccgggattttggtgcacccatcacccaagcactgtacactgtacccagtgtgtagtgttttatccctcaccccaccatcccactctttcccgagtccccaaagttcattatatcattcttacacctttgcatcctcatakcttacctcccacttatgagtgagagcatacaatgtttggttttccattcctgagttacttcacttagaataatggtctctaattccacctaggtgctgcaaatgccattatttcattccttttagactgagtagtattccatagtgtgtaataatatatatatatatatatatatatata

SEQ ID NO: 39566 - DNA, 594 bp, Homo sapiens
ttattggatcatatatctaaaaagcccacggtataggtcatttttatgtgattctgtggctcaatgatgaaaccaagagaaaatatatatttcttctttgagccatgacagagaacctgatacagaactagtcataaacaactggaaaattgggcaaattatctgcaacaaacaacagtttttatttggttggggaggttatttttttatttcaatgagtttttggggaacaggtggtgtttggttacatgaataagttctttagtagtgatttccgggattttggtgcacccatcacccaagcactgtacactgtacccagtgtgtagtgttttatccctcaccccaccatcccactctttcccgagtccccaaagttcattatatcattcttacacctttgcatcctcatagsttacctcccacttatgagtgagagcatacaatgtttggttttccattcctgagttacttcacttagaataatggtctctaattccacctaggtgctgcaaatgccattatttcattccttttagactgagtagtattccatagtgtgtaataatatatatatatatatatatatatata

SEQ ID NO: 39567 - DNA, 594 bp, Homo sapiens
ttattggatcatatatctaaaaagcccacggtataggtcatttttatgtgattctgtggctcaatgatgaaaccaagagaaaatatatatttcttctttgagccatgacagagaacctgatacagaactagtcataaacaactggaaaattgggcaaattatctgcaacaaacaacagtttttatttggttggggaggttatttttttatttcaatgagtttttggggaacaggtggtgtttggttacatgaataagttctttagtagtgatttccgggattttggtgcacccatcacccaagcactgtacactgtacccagtgtgtagtgttttatccctcaccccaccatcccactctttcccgagtccccaaagttcattatatcattcttacacctttgcatcctcatagcytacctcccacttatgagtgagagcatacaatgtttggttttccattcctgagttacttcacttagaataatggtctctaattccacctaggtgctgcaaatgccattatttcattccttttagactgagtagtattccatagtgtgtaataatatatatatatatatatatatatata

SEQ ID NO: 39568 - DNA, 594 bp, Homo sapiens
ttattggatcatatatctaaaaagcccacggtataggtcatttttatgtgattctgtggctcaatgatgaaaccaagagaaaatatatatttcttctttgagccatgacagagaacctgatacagaactagtcataaacaactggaaaattgggcaaattatctgcaacaaacaacagtttttatttggttggggaggttatttttttatttcaatgagtttttggggaacaggtggtgtttggttacatgaataagttctttagtagtgatttccgggattttggtgcacccatcacccaagcactgtacactgtacccagtgtgtagtgttttatccctcaccccaccatcccactctttcccgagtccccaaagttcattatatcattcttacacctttgcatcctcatagctwacctcccacttatgagtgagagcatacaatgtttggttttccattcctgagttacttcacttagaataatggtctctaattccacctaggtgctgcaaatgccattatttcattccttttagactgagtagtattccatagtgtgtaataatatatatatatatatatatatatata

SEQ ID NO: 39569 - DNA, 594 bp, Homo sapiens
ttattggatcatatatctaaaaagcccacggtataggtcatttttatgtgattctgtggctcaatgatgaaaccaagagaaaatatatatttcttctttgagccatgacagagaacctgatacagaactagtcataaacaactggaaaattgggcaaattatctgcaacaaacaacagtttttatttggttggggaggttatttttttatttcaatgagtttttggggaacaggtggtgtttggttacatgaataagttctttagtagtgatttccgggattttggtgcacccatcacccaagcactgtacactgtacccagtgtgtagtgttttatccctcaccccaccatcccactctttcccgagtccccaaagttcattatatcattcttacacctttgcatcctcatagcttwcctcccacttatgagtgagagcatacaatgtttggttttccattcctgagttacttcacttagaataatggtctctaattccacctaggtgctgcaaatgccattatttcattccttttagactgagtagtattccatagtgtgtaataatatatatatatatatatatatatata

SEQ ID NO: 39570 - DNA, 659 bp, Homo sapiens
agatctatttagagattcagactgggaaagtttttctttgggggcaatcactcagaaaataaaacaacaaggggtaaagtcctggttccccttccttcactatcttctacccccaaatctgcccataaccagtcaataacccctcagatgcacgctaatggcagtcacccagaacgtacatctgctgtgtttatgagacttgctttgacatagaactgccaagtctagaattattcacttcagtgctatcacagactgctccatcccagggcaggagcattggggaagttccytatttgaagaagaaaaataaaagactactcatttgcattttttagtccagcttcttttattaaaacacaaactaccggaccatgtaaaggtgttaagttctattttgaactttattgggaaactgtatgacaggctcaggtagaagtgcagctacctacaattcagactctgaaacaatcaagacaagtcacagggaatttaatggggactgggcagccacagatgggcagaggatcactgcttaggccatcggggtctcagagaacagttcagcaagaacccagaatgtaaaggtacacctccctgttacttttaaaatttctttctaataaggattataaaacaagtacctcagataacaatgc

SEQ ID NO: 39571 - DNA, 670 bp, Homo sapiens
tttttgaatgtcctctatgatataggcacattataattgtgatcttatttaatctttgcagcaattctatgagaaaagcatcagtagctacatttatagatgagaaaacttctccaggggattcatatacctactcaaggtcacatggcaagtacatagagtaaatagatagaattagaatttacattcaggattgcctcccttggaaggactgggttccttctactatgccaagcaacctcttcaaaaaatataagcagtcaatgttctatttaagattaagagttcatttctgccttttatatataggagggaaaatacattaattagcttccttgttctactgccataccgcctatatgtttaaatgaaaataaggtaaaatccttttgtgtcctctctacttggaaaactacagccttcattctgagactagaacacacccttatgttatttgtattgtagttttccactctgttctttgtgtttattgtccctcgttgcttgtctccttttgtgctggaattatttagtatactaatcattgaaacatyatatatatcattgactgtcttctgatttttttagttaattttttttgggggaatagttgttttataaattaaaatgtgtatctttaccttactagtgtgaatattataatattaca

SEQ ID NO: 39572 - DNA, 664 bp, Homo sapiens
cataacattttacagttttattactataacaagtttcagaagcaactaaggtgttattaatactaacattcaaacttccatgttacagactttataaagaaatgtggtgaaggggctgcagagtggtattttggtcttgtcaccaaccaagaaaatggaaaagaagtatactgaaagctgctaaatgcagcaaacaccacccctggaagggaactggaaggggccatgtatcaagtaggggttccttcagttgagtgtgacagaaaaccgaaaataggggccatgcacggtggctcatgcctgtaatccctgcactttgggaggctgaggcaggaggattgcttgascccaggagttagagacaagccctggtatatctaactcatctctgcaaaaaataaaaagaatcagctgagtgtagtggcatgcacctgcagtcccaattacttggaaggctgaggcaggaggattgcttgaggcaggaggtcgaggctgcagtgagccgtgatcgcgccactgcactccagcctgcatcacagagcaaaatcccgtccaatgccaaatagttacgtcttattcaagatagatgcattttctttctttccataaaaggagcccccagggtagatagtacgcttaggtacagtagctccacaatggtcag

SEQ ID NO: 39573 - DNA, 679 bp, Homo sapiens
ggtgggaattgaacaatgagaacacttggacacagggcaggcaacatcacacaccggggcctgtcatggagttgggggtagggggagggatagcattaagggaaatacctaatgtaaatgatgagttaatgggtgcagcaaaccaacatggcacatgtatacctatgtaacaaacctgcacattgtgcacatgtaccctagaacttaaagtatatatataaaaaaagaattttaaaaaaagagagaaataaaataagtggatcccaagcttgacagacagaaagcgtggtcacagragcagctcagatcagcagatgggactagatacacacatattcgtgcacatgtagatgcagcacacgcacacacatacacacacacatgcaccatccacgtacacgagctgaggaacaggatgaagaaagtacattgatggtgtcaagggctgtgaaaatatcaaggtgcataaaacgttcaagaaaactcttggctttatcaattaagagatgattagtcactctacaaggaaatctcagtaaagagagaatatgagaaaacatataccagatggcttttatcacctcagtgattcctctcttttcattttctcttaaatttcacacaagtacgctttccttttaacattctagtaaagctgttctcattaaggtcactgata

SEQ ID NO: 39574 - DNA, 679 bp, Homo sapiens
ggtgggaattgaacaatgagaacacttggacacagggcaggcaacatcacacaccggggcctgtcatggagttgggggtagggggagggatagcattaagggaaatacctaatgtaaatgatgagttaatgggtgcagcaaaccaacatggcacatgtatacctatgtaacaaacctgcacattgtgcacatgtaccctagaacttaaagtatatatataaaaaaagaattttaaaaaaagagagaaataaaataagtggatcccaagcttgacagacagaaagcgtggtcacagaagcagctcaratcagcagatgggactagatacacacatattcgtgcacatgtagatgcagcacacgcacacacatacacacacacatgcaccatccacgtacacgagctgaggaacaggatgaagaaagtacattgatggtgtcaagggctgtgaaaatatcaaggtgcataaaacgttcaagaaaactcttggctttatcaattaagagatgattagtcactctacaaggaaatctcagtaaagagagaatatgagaaaacatataccagatggcttttatcacctcagtgattcctctcttttcattttctcttaaatttcacacaagtacgctttccttttaacattctagtaaagctgttctcattaaggtcactgata

SEQ ID NO: 39575 - DNA, 508 bp, Homo sapiens
tgcttacttggttgacctttattactcttcttattcatttagcatttttacattataaatttcctttcaaggactattttaactatrtcttatcagttctaatagacaataatttgaaaaataatgatttcattagcttacttttccagatagaaattttattttctattttttcgagttagatcttctttttactttttaaaaggcttagttttaatataattacaaagtaatataagcttattatagaaagatcagaagtcgtatgcaagccaaaaagacaatattaaaaatactctcagtgaatccaaagaaatttttcaaacacccttttttgaaggtatcacattttgtgatttcaaagtgtattacaaagccatagtaatcaaaacagtatggcactgtcataaaagcagactatagccagtggaacaaaaataaatctacccattatggttggacaactaatctttgacaaggtgaaaggatagtctcctcaataaatggt

SEQ ID NO: 39576 - DNA, 629 bp, Homo sapiens
cactaaagctggatgcatcagctggcattcagaactaggaacaaagtatttgcaagtttaagcactcttcttaatagtgttccagtaaatagcatcttgcttttacctgtatatagccatgtgacttatttttaaaatctattgttttgtgctctttagattaagtattccatcctggacaacagtgaacattttgtaacggcatgaaatttcaaaagcaaaaggcaaatgtcatctaaaccaggctcccctactgccaaagaagaccagggtttagctaccttggggtgcctawcttgtgtgttatcttatgcagggaaaaagaccccgctggcctttgttaatatctttgtgatgattcagctcaacagctaggaaagctttgtgaaggtttaacgcagaccctagatctttcctttcctcttgctccttttaatatgctacaggaagcactattcacagctgtgaaaacttcagtactctaactgaccctacccagtctcctcttaggtaagtactcacattttccaggcagtgcaaaaacacgaggcagagtcagacacaggaggtacccagtgaaagtaatgcttccagtgaggccctgtttccaaactccttaattactcttt

SEQ ID NO: 39577 - DNA, 620 bp, Homo sapiens
ttgcatttttatttattctccaatttccaggagagttctgtaatttgaaagactgcaaccattttggagaaagcaatttcaaatttgaactcattttctaagccaaaaatacrctggctttgcttaatggaaagcagtgccatcctcctaagagttcattagccctctgcacttttgtttcttcacatgaacagcaggacattgacttccagtaaatgtttgtgaagctcagtgatgcaaaacagcctgacttaagtctggactcacagaaaaagcacggccctcaaccccaaatcacacacatatctacttcctccatccattcatccattaatccatctatccatccaacaaatatttattgaatacctgttatgtacagcatcttctgtcatagagcttaccaggtagaagggaggtgggattattcatatgaagcacacgaggaccatagtccatgttaccctaaaaacactgtgatttggtgataatcacggttgctgtttttaaaaggcttactttaatcctaagctttgtgcatacattctatgccatgaaaatgctcacaaacaacatcttcagtttaagactataaaatatatttacaaaagcaaagatga

SEQ ID NO: 39578 - DNA, 730 bp, Homo sapiens
gtagagatggggtttcaccacattgcccaggctggtcttgaactcttgacgtcaagtgatctgcccgcctcggcctccaaaggtgctgggattacaggcatgagccactgcgcccagccaagattttcttggatttttttctctgtcattaagtgtagtctctatttctacctgctttgtactacaaaccaatttaaataagcatgctgtctttctccataaaaacattaaactgtagaacaatgtttttatggagaaaaagagctaaagtcamatgctggtggagcataaaacgctcacttgaagaacaccttggtaatggctccagctaactgtaccatgacctaatcctgtggctggaacctctggggagtcttatccacctccccaaatccatttgacaagctcaggtccaataccacttctttcatgggctattctctgatcttctcagaatgtctatcttctattgaatttgccacaatattttgtttgtactactcttgagacatcccacacaaccttgaattataattgctcacatgggtgtctcagcatttattctagaccataagatacttaaaaggaggaattgtgatttctttgacagttttgtctcttagaatttaagggtgagggtgcttaataagtattagaaataacggataagtaaaatattcagtgctattaaaaatactattaaatctcaacacctccaggggttacatat

SEQ ID NO: 39579 - DNA, 624 bp, Homo sapiens
tgacagcctctaggtactgccagcttgccaccctcggtgcagccctgtcaattatgggcttcccaaatggaaagattgggactcaaggtcccatcctctccccattcccacgctggcccctaatagygaaccagccggctgctctgctgccctcaccagaaggtggctttcgtaagggctgcgggggagcagtcttgctcagcagcggaggtgtcccagcgcaacagcagcaacctctccgcagggctcccagctgcctgcccgccccttcctgggcctcttggctgggctttcctcccagcctgaaaacctggctccagccacccactgcccactcatcacaattggcctgcagtgactcagtctccttgctacctcctcctcccgtcttctggccctggcgtcccccagctcttaggagcctcttcaatagtgcctttgatcctggctgccgaggctctttaatgaggacggcctgctgccttcagcaatgggatggcagagaacagcttctgggagcacagtgacgataacagggtgaacatagccctgatgccccccagcctcccccagatgaccaagggccctgagcccagaggccctgcagggaagacaggaaagctg

SEQ ID NO: 39580 - DNA, 504 bp, Homo sapiens
tgggcaggcagaagtcaggactggggggtcgggccaaggtcgaggatggggctcagaggagcctgacgaaagttaggtcaatgagagtcttggtcaggagcctccgtttccacggctgccccaggctggtgtctgatctcacttgagagcrcggggaggcaagggcttctccgacaaatgccgagatgagatgttgccagctgcccagctgtgcccttcttctccaggggagcatcagaaacaagaagggggtatgctagcaccccagccgcaccttccagtggcccaggaggtggctcatcactgcttcccagaaggaaatccttggcctcgccctgaggagctgtcctcagttttataggcatgaatctgccatagtgagggaggcatccctgttgtccatctcaaggactcactgcagctacacatgtgggtcacccaggcagcttcttaaaaaataccagtccagagtccttttgtagttcatgagtgtgatgactgggt

SEQ ID NO: 39581 - DNA, 517 bp, Homo sapiens
ttcttggatctctctgtatggctcccaaaggtggaacgagcccagaaaatactttytaagcactggtagggatcatattgggggtggagacatggggaggtatctccctactttctgccctgcccccaccagagaacacaaagtgggtaagaaggggaaggatggaatctgcctagcacttctgtgagccatttggcaggggtaggggtggggagatcctttgtcatcaccacctctgggaacccccagctgctctctttccacacacacctctccccggggccttagctgcgggtgcagaagagtgcatggcattgccaattggaattctaaggaggttaacacggcctcccagcattgtcactgactaacttggtgacgttgggcagctcacctaactggactgtacctccattttctcatctgtaaaatgggggtaataataacatcatcctcagaattgccttgagagtctcatgagctgatgtatggtaaagcccttagcacagtgcccggc

SEQ ID NO: 39582 - DNA, 517 bp, Homo sapiens
ttcttggatctctctgtatggctcccaaaggtggaacgagcccagaaaatactttctaagcactggtagggatcatattgggggtggagacatggggaggtatctccctactttctgccctgcccccaccagagaacacaaagtgggtaagaaggggaaggatggaatctgcctagcacttctgtgagccatttggcaggggtaggggtggggagatcctttgtcatcaccacctctgggaacccccagctgctctctttccacacacacctctcccyggggccttagctgcgggtgcagaagagtgcatggcattgccaattggaattctaaggaggttaacacggcctcccagcattgtcactgactaacttggtgacgttgggcagctcacctaactggactgtacctccattttctcatctgtaaaatgggggtaataataacatcatcctcagaattgccttgagagtctcatgagctgatgtatggtaaagcccttagcacagtgcccggc

SEQ ID NO: 39583 - DNA, 1720 bp, Homo sapiens
  misc_feature (1)...(1720): n = A,T,C or G
tgaggacagggcaggctggccttgcctgcctggtcctgaccccctcctcctgcaggagatccccttctatcacatttggagtggcagccagaaggccctccactgcactttcaccctggagaggcacagcttggcctccacagagctcacctgcaagatctgcgtgcggcaagtggaaggggagggccagatattccagctgcataccactctggcagaggtgagggaagtcggggccacatattccagctggacaccacactgccgggggtgagggaagggtggggcagattttccagctgcacaccaccctggcggaggtgagggaagggtggggccgatattccagctgcacaccaccctggcgtaggtggggaaggggnnnnnnnnnnnnnnnnnnnnnnnnnnnnnnnnnnnnnnnnnnnnnnnnnnnnnnnnnnnnnnnnnnnnnnnnnnnnnnnnnnnnnnnnnnnnnnnnnnnnccaaaaaaaatttttaaaaaattagcctggcacggtgacacatgcctgtagtcccagctactcagtaggctgaggcaggaggatcgcttgagccgaggagttcaagtctgcagtgagctatggtcacgtcactgcactccagcctcggctagaatgaaagggaggagtcaggatttgaactgggaccttctcaccctacatctgtgcttggaacccctgagccacctacatcctagttccccagctttgcacccacccctgcccctgcaggcagaaccactcccaagatccttctagtgagagccctgtctctccgggattcaggctgctgggatggaagggggtggttaagaagggctgggtctgtctccagtgagatgtgggcccccaggccagctgccctctgagattgggtcccggcagatggctcagcagttacaggacattctcagagggaattagcccacccctggcctgcccctgctcctcctaggctctaggagaggggrcaagggcaatgcaggaacatcctctgaggcctccatctgtttccaggctgtgggaagatggtctggggctaagctgttttttatttaatgtgcgagattgaaaagtctccttttctcccctcctggagaaccgtggctttcccgactggcttatccataatcgccaagtgttttattatgttaaatctgcagcatcataaatacttatgaggaggatttacatcttggagacttatgaagaaatcataagtggggtcctgagccctcacgagtcagggagtcgggggaccggcaacctgggtactggaggcagcctctccaagagtcttcacaggactgagacctgccccagggtcttggtcttgaagctgtcctcttggccatgccctgtctccaagtagaaccccagacattagagcagctgaaagtctagactttcctaagaccctaagagcaccactgtcccctgggccactctcccttcctgggtggaagcagcagagagggaagccagtgtcctctgttcatgcctgtggaccaggcttgcagctggcacatttcatgaagcttgatgaatgttgaaaatagccctagagcccacggatggaggctctgggcaagagtggtttatgcagcagataattagcaggcgggaaggagacctgtgcgggtgaagggccatgtagggggacagaggaggggacagagcagcgttccacactgcatcgt

SEQ ID NO: 39584 - DNA, 1720 bp, Homo sapiens
  misc_feature (1)...(1720): n = A,T,C or G
tgaggacagggcaggctggccttgcctgcctggtcctgaccccctcctcctgcaggagatccccttctatcacatttggagtggcagccagaaggccctccactgcactttcaccctggagaggcacagcttggcctccacagagctcacctgcaagatctgcgtgcggcaagtggaaggggagggccagatattccagctgcataccactctggcagaggtgagggaagtcggggccacatattccagctggacaccacactgccgggggtgagggaagggtggggcagattttccagctgcacaccaccctggcggaggtgagggaagggtggggccgatattccagctgcacaccaccctggcgtaggtggggaaggggnnnnnnnnnnnnnnnnnnnnnnnnnnnnnnnnnnnnnnnnnnnnnnnnnnnnnnnnnnnnnnnnnnnnnnnnnnnnnnnnnnnnnnnnnnnnnnnnnnnnccaaaaaaaatttttaaaaaattagcctggcacggtgacacatgcctgtagtcccagctactcagtaggctgaggcaggaggatcgcttgagccgaggagttcaagtctgcagtgagctatggtcacgtcactgcactccagcctcggctagaatgaaagggaggagtcaggatttgaactgggaccttctcaccctacatctgtgcttggaacccctgagccacctacatcctagttccccagctttgcacccacccctgcccctgcaggcagaaccactcccaagatccttctagtgagagccctgtctctccgggattcaggctgctgggatggaagggggtggttaagaagggctgggtctgtctccagtgagatgtgggcccccaggccagctgccctctgagattgggtcccggcagatggctcagcagttacaggacattctcagagggaattagcccacccctggcctgcccctgctcctcctaggctctaggagaggggacaagggcaatgcaggaacatcctctgaggcctccatctgtttccaggctgtgggaagatggtctggggctaagctgttttttatttaatgtgcgagattgaaaagtctccttttctcccctcctggagaaccgtggctttcccgactggcttatccataatcgccaagtgttttattatgttaaatctgcagcatcataaatacttatgaggaggatttacatcttggagacttatgaagaaatcataagtggggtcctgagccctcacgagtcagggagtcgggggaccggcaacctgggtactggaggcagcctctccaagagtcttcacaggactgagacctgccccagggtcttggtcttgaagctgtcctcttggccatgccctgtctccaagtagaaccccagacrttagagcagctgaaagtctagactttcctaagaccctaagagcaccactgtcccctgggccactctcccttcctgggtggaagcagcagagagggaagccagtgtcctctgttcatgcctgtggaccaggcttgcagctggcacatttcatgaagcttgatgaatgttgaaaatagccctagagcccacggatggaggctctgggcaagagtggtttatgcagcagataattagcaggcgggaaggagacctgtgcgggtgaagggccatgtagggggacagaggaggggacagagcagcgttccacactgcatcgt

SEQ ID NO: 39585 - DNA, 657 bp, Homo sapiens
atgctgtgtggccacaggtccagtgggacaatatgaaagcagccaccacgtggcatctgaaaattgatgtgactgggaccaggaaggatctgaattccccaggctggttagagtcccggatgccgacctccttcccagtgcccctcaaactgtgtttctctctccagggargtgggagggcggcagggccagcaccagagcatcctctcctggcctgactttaccttcaaaggaacagtaagactcatagctagcttcttaatggaagccatggaatgcaaaaggcagtgaaatgatctttaaagtgccaaaagaaaataagcatcaatctagaattccagacctggtgaaaatagggcaaagggcatttccaggccaacaaaaattgagaaacttcattgctaaaagactgacattagaaagaaatactaatgggagccttttgcgcttacagaaatgactccaggaagaagcaaatgcaggaaggaatgagaaacaatgagaatgggtaaatatgtgagtaaatagaaattaatatgaactgtaaaaaagaaaaaaagtaatatcttatgagttttaaaataatgtaaattaaattatgttaaaatggtaacacaaaagttgggtcagggtaagtgtaattaaggtattctaagg

SEQ ID NO: 39586 - DNA, 556 bp, Homo sapiens
gggaggttctgttatggaagacaaggaaaatgaatccgaagggataattagtctgatcaccatgggagagattgctgtgacttgggagttggtgggtttcaagaaaggggaggaaacgatccaggtagaagaaaaaggctgggcaacggcagaatgggaggaaagttcaggtgtgtatgacaaactgtgaagctgtgtttggggcacaagtaagagcaagaggtcttgagatcattgccyggggccttgaatgtccaggtgaggagtcaattttgtttagttgacagggctgctcactttgctgggtggcttttccagagaggtgggggcagtaggggaagaggattaaggaaaaaaattatactgacactcgttaaaacagtaaggaaagctttatttaagactattgtagtaggggagataaatggagctcaactctgaagaggagatggggatttatagccaaggagcagcatgagggctggaggatggaacatttctaagaggagacgtcaaggcgaggcctctgcttgctgaaagcaggcccaggacttac

SEQ ID NO: 39587 - DNA, 638 bp, Homo sapiens
cctggtggcccccactactgggaggtcaccacgtatatgccacacgttagtaagaacgcaccataggcatagtgcattgtaatacagaactcctgggctcaagcaatcctcccgcctcagcagtagctgggactacaggtgcatgcccagcaagtttagcgttcttttagcattcttttctttttttttttttttttgagacggagtcttgccctgttgcccaggttggagtgcaatggtgatctyggctcactgcaacctctgcctcccgggttcaagtgattctcctgcctcagcctcctgagtagctgggattacaggcgcgtgacaccatgctaatttttttgtatctttagtagagacagggatttcaccatgttggccaggctggtcttgaactcctgaccttatgatccacctgcctcagcctcccaaagtgctgagattaccagcgtgtgccactgcgcctggccgagtttagcattcttaatattcatcatgtcgtctccaacattgatctaatcttagtatgttctagacactgtgctactaagcagcttttcagaaattatctttttttttttttttttttttgggacggagtttcgctcttgttgcccaggctggagtgcaatggc

SEQ ID NO: 39588 - DNA, 638 bp, Homo sapiens
cctggtggcccccactactgggaggtcaccacgtatatgccacacgttagtaagaacgcaccataggcatagtgcattgtaatacagaactcctgggctcaagcaatcctcccgcctcagcagtagctgggactacaggtgcatgcccagcaagtttagcgttcttttagcattcttttctttttttttttttttttgagacggagtcttgccctgttgcccaggttggagtgcaatggtgatcttrgctcactgcaacctctgcctcccgggttcaagtgattctcctgcctcagcctcctgagtagctgggattacaggcgcgtgacaccatgctaatttttttgtatctttagtagagacagggatttcaccatgttggccaggctggtcttgaactcctgaccttatgatccacctgcctcagcctcccaaagtgctgagattaccagcgtgtgccactgcgcctggccgagtttagcattcttaatattcatcatgtcgtctccaacattgatctaatcttagtatgttctagacactgtgctactaagcagcttttcagaaattatctttttttttttttttttttttgggacggagtttcgctcttgttgcccaggctggagtgcaatggc

SEQ ID NO: 39589 - DNA, 621 bp, Homo sapiens
gcaggtgcttgtaatcccagctccttgggaggctgaggcaggagattctcttgaacccaggaggcggagattgcagtgagctgagatcgcacctttgcactccagcctgggtgacaagagcaagacttcatctcaaaaaaraaaaaaaaaagaaaaaaaaagaaaatttatttacaaaaacagacagcggatgaaatagtttagcaatgctgccctacatcctcaaaatccacaaaatccaatgaaaacgaaaagcttctgaagccatcactaggctgagcaatgtaaccccatgctctgcctatcctcacgtaggcctgagtctgcctaaggcctgagtctgcctaacacaggtcaggagtaaactagaagataaatagagagaggagaccatgatcacgaaggataagaaactatgcctgaaaggagaggggcaggggactggggatgtgcagcctgaagaaagaacacctctggggtaatcattttcaaatacatacatatgatctacagtcatgcatcgcttgacagggtgcgttctgaaaaatgcatcggtaggtgattttattgtgtgagcagcatagagtgtatttacaaaaacctagatggcacagcccctac

SEQ ID NO: 39590 - DNA, 574 bp, Homo sapiens
gtttctgcaccattgttcagccattgttctactcatattaagtcactgtgcaatgcctctctgtgccaaagggtatggcctaccttgaaccactaacgtcccttgagagtgcrttattttctctttctaatgccaattccttggactttccatcgtctgctgtcagaccttcagttttcacatggttctccatcataaagaaacactttcttctccaaatattcagcctagaagaggattccacagtagagagtcttggacgtccatccatcaggatcttctttatcatttctataaggaggtaagcaatctggggtgctgcatcagagggtggtcaagtgcagccatgtactacagttggaattattgtttattctggcccactctattgcaattctctgtatgtacatgtgatttttctctcaagaattgtattgcaccgccttgaaacatggctttttgagtgggcctatctgagtccttcagccatggctggtatctcttactcggccatgttggcaatgtcttgtctgcatatttctaaactctatatatagggctgtagccaatcagg

SEQ ID NO: 39591 - DNA, 574 bp, Homo sapiens
gtttctgcaccattgttcagccattgttctactcatattaagtcactgtgcaatgcctctctgtgccaaagggtatggcctaccttgaaccactaacgtcccttgagagtgcattattttctctttctaatgccaattccttggactttccatcgtctgctgtcagaccttcagttttcacatggttctccatcataaagaaacactttcttctccaaatattcagcctagaagaggattccacagtagagagtcttggacgtccatccatcaggatcttctttatcatttctataaggaggtaagcaatctggggtgctgcatcagagggtggtcaagtgcagccrtgtactacagttggaattattgtttattctggcccactctattgcaattctctgtatgtacatgtgatttttctctcaagaattgtattgcaccgccttgaaacatggctttttgagtgggcctatctgagtccttcagccatggctggtatctcttactcggccatgttggcaatgtcttgtctgcatatttctaaactctatatatagggctgtagccaatcagg

SEQ ID NO: 39592 - DNA, 574 bp, Homo sapiens
gtttctgcaccattgttcagccattgttctactcatattaagtcactgtgcaatgcctctctgtgccaaagggtatggcctaccttgaaccactaacgtcccttgagagtgcattattttctctttctaatgccaattccttggactttccatcgtctgctgtcagaccttcagttttcacatggttctccatcataaagaaacactttcttctccaaatattcagcctagaagaggattccacagtagagagtcttggacgtccatccatcaggatcttctttatcatttctataaggaggtaagcaatctggggtgctgcatcagagggtggtcaagtgcagccatgtactacagttggaattattgtttattctggcccactctattgcaattctctgtatgtacatgtgatttttctctcaagaattgtattgyaccgccttgaaacatggctttttgagtgggcctatctgagtccttcagccatggctggtatctcttactcggccatgttggcaatgtcttgtctgcatatttctaaactctatatatagggctgtagccaatcagg

SEQ ID NO: 39593 - DNA, 645 bp, Homo sapiens
ataattcacagcaatccataagattgatcatgtctctccaagtgcacagtgtttcagtttatacaacaaaatattttatttaaaaaaaaatttgtagaaatgggatctcgttatgttgcccagactggtcttgaactcctagcctcagcaaagtctcttgccttggcctcccaaagagctggagaaaaaacagtctggtccctccaatcctggagcacactgtatctgtaccacaggttacccacccaactcgggggaaactgaggctcagcaaatttaaaaaattacctccctccaaaaaaaaaaaaactagaatatcttctgagaaataagcttctgctcagtgagcttaacatagtctaagacaggggccccaacaccctgggccacagactgagctaggaaccagtctacacagcagaaggctagtggcaggtgagtgagcgaagcttcatctgtatttacagccactccccatcactcgcattaccacctgagctccacctcctgtcagatcagcaacagcattagattctcataggagcatgaaccctattgtgaactgcacatgtgaggaatataggttgtgtgctccttatgagactctaatgcctgatgatctgtcattgtctcccatcascccca

SEQ ID NO: 39594 - DNA, 1051 bp, Homo sapiens
cacagtgacactgtcctgtccttgacctccaactccgctaggagcatctactttttctgccactgctggcagaaattctttctttcctcttcttaccattttcattccacagagagaaggttcagcagcataggggcttggggccttagtaatacaattattctattgtattactttgtatttgtatggtttgtatttgttttgtatttgtttgttttggtttgtattactttgtatttgtatggtttgtatttgttttgtatytgtttgttttggtttgtattactttgtatttgtatggtttgtatttgttttgtatttgtttgttttggtttgtattactttgtatttgtatggtttgtatttgttttgaaccacatagccctttccttgccccttgccggacacacagatattcccctaggggctgcatggagttcaagtgcatccaactgctttatgcagaccactgcccactttccacgacagggcctgtgatgctccagcccatcatgcctgacttcttgatttttctttttttttgagacagtgtcttactctgttgcccaggctggaatgcagtggcacaaatcacggctcactgcagccttgactcccagaactcaggtgatcctcccacctcagcttcctgagtagctgggactacaggtgcatgccaccatgcccagctaatttttctattttttgtagagatggggtttcaccacgttgcccctgctggtcttgaactcatgggctcgagagatcagcacgttggcctcccaaaatactgggattacaagcgtgagccaccacacccagctcctgacttcttgatttaacgtgattttcttcctgttaccttgtctttctctgtaatctgacttctgttatgaccaccctacctctcatccaataaatccttagtatgtttaaacctgagttacggaaaggagttgaattcaggtagggtccatgtgtcatatgcaaatcagaagacggtgaataccctggtagaagaagttccaccccatagcttagagccagctgt

SEQ ID NO: 39595 - DNA, 1051 bp, Homo sapiens
cacagtgacactgtcctgtccttgacctccaactccgctaggagcatctactttttctgccactgctggcagaaattctttctttcctcttcttaccattttcattccacagagagaaggttcagcagcataggggcttggggccttagtaatacaattattctattgtattactttgtatttgtatggtttgtatttgttttgtatttgtttgttttggtttgtattactttgtatttgtatggtttgtatttgttttgtatctgtttgttttggtttgtattactttgtatttgtatggtttgtatttgttttgtatttgtttgttttggtttgtattactttgtatttgtatggtttgtatttgttttgaaccacatagccctttccttgccccttgccggacacacagatattcccctaggggctgcatggagttcaagtgcatccamctgctttatgcagaccactgcccactttccacgacagggcctgtgatgctccagcccatcatgcctgacttcttgatttttctttttttttgagacagtgtcttactctgttgcccaggctggaatgcagtggcacaaatcacggctcactgcagccttgactcccagaactcaggtgatcctcccacctcagcttcctgagtagctgggactacaggtgcatgccaccatgcccagctaatttttctattttttgtagagatggggtttcaccacgttgcccctgctggtcttgaactcatgggctcgagagatcagcacgttggcctcccaaaatactgggattacaagcgtgagccaccacacccagctcctgacttcttgatttaacgtgattttcttcctgttaccttgtctttctctgtaatctgacttctgttatgaccaccctacctctcatccaataaatccttagtatgtttaaacctgagttacggaaaggagttgaattcaggtagggtccatgtgtcatatgcaaatcagaagacggtgaataccctggtagaagaagttccaccccatagcttagagccagctgt

SEQ ID NO: 39596 - DNA, 1051 bp, Homo sapiens
cacagtgacactgtcctgtccttgacctccaactccgctaggagcatctactttttctgccactgctggcagaaattctttctttcctcttcttaccattttcattccacagagagaaggttcagcagcataggggcttggggccttagtaatacaattattctattgtattactttgtatttgtatggtttgtatttgttttgtatttgtttgttttggtttgtattactttgtatttgtatggtttgtatttgttttgtatctgtttgttttggtttgtattactttgtatttgtatggtttgtatttgttttgtatttgtttgttttggtttgtattactttgtatttgtatggtttgtatttgttttgaaccacatagccctttccttgccccttgccggacacacagatattcccctaggggctgcatggagttcaagtgcatccaactgctttatgcagaccactgcccactttccacgacagggcctgtgatgctccagcccatcatgcctgacttcttgatttttctttttttttgagacagtgtcttactctgttgcccaggctggaatgcagtggcacaaatcacggctcactgcagccttgactcccagaactcaggtgatcctcccacctcagcttcctgagtagctgggactacaggtgcatgccaccatgcccagctaatttttctattttttgtagagatggggtttcaccacgttgcccctgctggtcttgaactcatgggctcgagagatcagcacgttggcctcccaaaatactgggattacaagcgtgagccaccacacccagctcctgacttcttgatttaacgtgattttcttcctgttaccttgtctttctctgtaatctgacttctgttatgaccaccctacctctcatccaataaatccttagtatgtttaaacctgagttayggaaaggagttgaattcaggtagggtccatgtgtcatatgcaaatcagaagacggtgaataccctggtagaagaagttccaccccatagcttagagccagctgt

SEQ ID NO: 39597 - DNA, 818 bp, Homo sapiens
ccacccccctggcctgctgtgttggctgggcttttccttggagcatggcccctggtgcttctgccactcctrcctccctgcccacccccgaaaccccatccctcagagggaccgggtatttttcaacatcctcatccagatcaaggccccattgacattggagagaattcaagcccaacagggaattccattacttatcattgagcactgactaagatttttttttttaactagactttttctgaaacaaaaatataccttatagtgcagaaactggactgcataatttttattcttgtatttatttaattaaatgttctaggtatttctttcttaatttgaaagacaggagaaaaatgtgttctgttctcttcctcttttgtcaaacccaatccaaataagccagagtcatgtaagttaaatgactgtgcttcccacactggcctggggtctgagacaggctggtgccctgttccttagaacgcttgggagtggccctgcaggctggtcgtcggagccaggtgatgtgtgtctgtggaacgggagacagcatgctcgctttggggtctgatgggcccgtctgttcccctggcactggttcggctgtgtctctccgcctcggagtccttgaagttgttctctgtgggggtacacttccccaaacatcctcttagcctgatatttgctgtctttctgtccttctgtcttgctcagctgtccagcaccagcagaggaagaggcctttcttggccatcctattcaacattgaaatcactagagtccccttctccccagcacgttctcttctctccctggtt

SEQ ID NO: 39598 - DNA, 598 bp, Homo sapiens
cagaaagtacagagcattcccattcaccatctatccccacacatttacaggctcccccactaycgacatcccacacaagagtgttatatttgttataatcgatgaacctgcattgccatatagttattactcaaagtctgtagtttacattaggttttactcctggtgttgtatattctatgggtttggacaaatgtataatgacttatatccacaattatagtataatacggaatagtttcactgccctaaaactcctctgtgctccatcctccctaatctctgccaaccactgattttttttctgtctccataattttgtcatctccagaatgtcatataattggaatgaagtgtagttttttcagattggcctttttcacttagtaatacgcatttaggttttcttcatgtcctttcattgactgatagctcatttctctttagcactgaataatatgccattatataatatatcacaatttatttattcattcataaagtactctttttaatggccacattcgattttatatctggataattttcattaaaaatctcttaattagggataatttactatcctgttttcaatttt

SEQ ID NO: 39599 - DNA, 598 bp, Homo sapiens
cagaaagtacagagcattcccattcaccatctatccccacacatttacaggctcccccactatcgacatcccacacaagagtgttatatttgttataatcgatgaacctgcattrccatatagttattactcaaagtctgtagtttacattaggttttactcctggtgttgtatattctatgggtttggacaaatgtataatgacttatatccacaattatagtataatacggaatagtttcactgccctaaaactcctctgtgctccatcctccctaatctctgccaaccactgattttttttctgtctccataattttgtcatctccagaatgtcatataattggaatgaagtgtagttttttcagattggcctttttcacttagtaatacgcatttaggttttcttcatgtcctttcattgactgatagctcatttctctttagcactgaataatatgccattatataatatatcacaatttatttattcattcataaagtactctttttaatggccacattcgattttatatctggataattttcattaaaaatctcttaattagggataatttactatcctgttttcaatttt

SEQ ID NO: 39600 - DNA, 559 bp, Homo sapiens
agaagtcagagagaaggcaaaagggataggagtaagtttgactatactttatagcttaaagtcagacagacagagagttacagatgggaaggtgagtgaggtaggaaaaatctaaaatttgaatgaagactaaagcattgaccaataatttggactgagatagtctaataacaacattgagacmatgttttgtgaattaaagcaatcacaaggctgtttattacctaatgatgaattaatgatatcaaggcagggtaagactatccccctttcaatgcacagaaggtaatgaaaatacagttacatcttaattgtgtcatgaaatatggttgttcaaactctcagttatacatactgggatgtctagaatagaaggagaatgccatgagcctggttgcaggggtgaggaagggtcctagaaattttgttcagttttctggatattcctaggaagcagaaataataaaaggagatctagatgggtttctctataagattacgggaagcttcttattcatttagttaattgtagctttggcgagagccattgctttctggg

SEQ ID NO: 39601 - DNA, 2471 bp, Homo sapiens
cctgtcctggggtgggggtatgggggagggacagcattagaagaaatacctaatgtaaacgatgagttaatgggtgcagcaaacctgcatggcacatgtatacatatgtaacaaacctgcacgttgtgtacatgtactctacaacttaaagtataaaaaaagagagagaaagttctaaatatctgagaaataatcataaagaaatagggcagccaacctgggagtccccagtcctacttgtgttgtttgtcgtgtgcatcagattataaaagctaaaagtggattccagcctctgtgattattctgttttgctctctaatggaacagccattcagtggtggtttgcattctcctttgcctctcttcagcatgtcactttagggttagggtgctgtttgacagggggaactgggatcctccccttttctcactgaggtgctgtcttgaattacagtcgggagccaggacctgggcagtgcggaggaccagcatgctgtgccccacagacctcctggattgcttcttcatatgtgggaacagttaagtgctgtcctggatctctgatatatgggctgcttttaggatttgccaaaaggaaacttttaaagcttctgtttctttacaaccagcagctcaattacttatgggatgtaggttgtcatggaggcagtaaagagttcatttgggaaaagagtggagaaggcatacagcggaaaatggaataaaccatgtatgagtcagtttcttttccataggaaaaacccttaacatcttagggactaaaagcaagaaactgttcctgtcacgctctggagcctgcagatgggctggggcttagcagatctggtctggcttgccttgtgtcttcawcccggggcccatgctaaggggcagtgtctgcttgggtcaggttttcttcatgatggtgaggaggggagcaggaggacccacctctcgcatctgcagggttaaggtctctgtccttgtcacatctgttaagacccaagcaagacccatgaccatgcacaaaggcaatgggggtttatgctgcattttctggagagagttgctgctagccacatggcagagggggcatgcatgtatagttttgttccagcaagggagacagctgtccatcaatcctggcacacccccttgaatctaggaaaacccctctgctctgtgctgtgacatggcacacacttccaggaagcctgtggctttcatgctggcagtggctgactaaacttttgctaacaagggtgatttttttcagtctcctgagttccacctgcggtatcttggaagtgctggctccctagaagggatcctccatatgaggaaagctcctttccaaaggcccatgtttattctctataaaaacaggctgctcaaaaggtatggcctggtagagccttttttggcctacattttgttatatattaattgttgagttcttcctaatagagaattcacgtctactcccacccagtgtggttcacatggtatcagaatcatagccaaataattgcgaaggtgtgcaatgtgcaggatggggttttatgatgaaaactcaagatgaaatagaagaaggggtctgggaaacaacagtgaccccctgcactgcaaagggaggtgcaggtaggatgaggtggggaaagtggccatctcttgtgaggtgacaacatctgagggaagtggagggcgcttcctcctcagcctctgtccctgcatcctctccagtgccccagtcccttctgcctcacactctctctctgctctaaggaacagtacagagtgtggatgctggtgaagcgtgttcttagtaaccagccagcctgcagcttcatcacgtgatggtttggccatttcccctacacatgtatgctaggctgagaagttaggaggtgtttccatgacttcccaactagctgacaacactggcctgtgtatctcaggtgatcccgatgcagaactttgctgtattttgagtttttattttttgcaccttttattttgtagtgatttcaaacttacaaaaagtgggaagagtaatataaagagctcctgtatacactcagattctcccactcttaacattttgtctcgtgctttttccttctctttctatatgtacaagctattataggtttttctgagtcatttgagtgcaaattgcagacatgacctcttttgtcctcagatactttcatgtgtgtgtcctaaggacaaggacattctctaacacaacctcagtgcaatgagcaaaatcatgatgcttgtgtggatacagccttttatctagtctattgttcagacagtttatcaattgtgtttgtttgccaagcttccttagtctcctttaatctggaaacgcttttcattctttcttgtctttgttatcctgtcatttttgaagataactggctactttgaagaatgttttctgttggggtcgtcagtggattaga

SEQ ID NO: 39602 - DNA, 2471 bp, Homo sapiens
cctgtcctggggtgggggtatgggggagggacagcattagaagaaatacctaatgtaaacgatgagttaatgggtgcagcaaacctgcatggcacatgtatacatatgtaacaaacctgcacgttgtgtacatgtactctacaacttaaagtataaaaaaagagagagaaagttctaaatatctgagaaataatcataaagaaatagggcagccaacctgggagtccccagtcctacttgtgttgtttgtcgtgtgcatcagattataaaagctaaaagtggattccagcctctgtgattattctgttttgctctctaatggaacagccattcagtggtggtttgcattctcctttgcctctcttcagcatgtcactttagggttagggtgctgtttgacagggggaactgggatcctccccttttctcactgaggtgctgtcttgaattacagtcgggagccaggacctgggcagtgcggaggaccagcatgctgtgccccacagacctcctggattgcttcttcatatgtgggaacagttaagtgctgtcctggatctctgatatatgggctgcttttaggatttgccaaaaggaaacttttaaagcttctgtttctttacaaccagcagctcaattacttatgggatgtaggttgtcatggaggcagtaaagagttcatttgggaaaagagtggagaaggcatacagcggaaaatggaataaaccatgtatgagtcagtttcttttccataggaaaaacccttaacatcttagggactaaaagcaagaaactgttcctgtcacgctctggagcctgcagatgggctggggcttagcagatctggtctggcttgccttgtgtcttcatccyggggcccatgctaaggggcagtgtctgcttgggtcaggttttcttcatgatggtgaggaggggagcaggaggacccacctctcgcatctgcagggttaaggtctctgtccttgtcacatctgttaagacccaagcaagacccatgaccatgcacaaaggcaatgggggtttatgctgcattttctggagagagttgctgctagccacatggcagagggggcatgcatgtatagttttgttccagcaagggagacagctgtccatcaatcctggcacacccccttgaatctaggaaaacccctctgctctgtgctgtgacatggcacacacttccaggaagcctgtggctttcatgctggcagtggctgactaaacttttgctaacaagggtgatttttttcagtctcctgagttccacctgcggtatcttggaagtgctggctccctagaagggatcctccatatgaggaaagctcctttccaaaggcccatgtttattctctataaaaacaggctgctcaaaaggtatggcctggtagagccttttttggcctacattttgttatatattaattgttgagttcttcctaatagagaattcacgtctactcccacccagtgtggttcacatggtatcagaatcatagccaaataattgcgaaggtgtgcaatgtgcaggatggggttttatgatgaaaactcaagatgaaatagaagaaggggtctgggaaacaacagtgaccccctgcactgcaaagggaggtgcaggtaggatgaggtggggaaagtggccatctcttgtgaggtgacaacatctgagggaagtggagggcgcttcctcctcagcctctgtccctgcatcctctccagtgccccagtcccttctgcctcacactctctctctgctctaaggaacagtacagagtgtggatgctggtgaagcgtgttcttagtaaccagccagcctgcagcttcatcacgtgatggtttggccatttcccctacacatgtatgctaggctgagaagttaggaggtgtttccatgacttcccaactagctgacaacactggcctgtgtatctcaggtgatcccgatgcagaactttgctgtattttgagtttttattttttgcaccttttattttgtagtgatttcaaacttacaaaaagtgggaagagtaatataaagagctcctgtatacactcagattctcccactcttaacattttgtctcgtgctttttccttctctttctatatgtacaagctattataggtttttctgagtcatttgagtgcaaattgcagacatgacctcttttgtcctcagatactttcatgtgtgtgtcctaaggacaaggacattctctaacacaacctcagtgcaatgagcaaaatcatgatgcttgtgtggatacagccttttatctagtctattgttcagacagtttatcaattgtgtttgtttgccaagcttccttagtctcctttaatctggaaacgcttttcattctttcttgtctttgttatcctgtcatttttgaagataactggctactttgaagaatgttttctgttggggtcgtcagtggattaga

SEQ ID NO: 39603 - DNA, 2471 bp, Homo sapiens
cctgtcctggggtgggggtatgggggagggacagcattagaagaaatacctaatgtaaacgatgagttaatgggtgcagcaaacctgcatggcacatgtatacatatgtaacaaacctgcacgttgtgtacatgtactctacaacttaaagtataaaaaaagagagagaaagttctaaatatctgagaaataatcataaagaaatagggcagccaacctgggagtccccagtcctacttgtgttgtttgtcgtgtgcatcagattataaaagctaaaagtggattccagcctctgtgattattctgttttgctctctaatggaacagccattcagtggtggtttgcattctcctttgcctctcttcagcatgtcactttagggttagggtgctgtttgacagggggaactgggatcctccccttttctcactgaggtgctgtcttgaattacagtcgggagccaggacctgggcagtgcggaggaccagcatgctgtgccccacagacctcctggattgcttcttcatatgtgggaacagttaagtgctgtcctggatctctgatatatgggctgcttttaggatttgccaaaaggaaacttttaaagcttctgtttctttacaaccagcagctcaattacttatgggatgtaggttgtcatggaggcagtaaagagttcatttgggaaaagagtggagaaggcatacagcggaaaatggaataaaccatgtatgagtcagtttcttttccataggaaaaacccttaacatcttagggactaaaagcaagaaactgttcctgtcacgctctggagcctgcagatgggctggggcttagcagatctggtctggcttgccttgtgtcttcatcccggggcccatgctaaggggcagtgtctgcttgggtcaggttttcttcatgatggtgaggaggggagcaggaggacccacctctcscatctgcagggttaaggtctctgtccttgtcacatctgttaagacccaagcaagacccatgaccatgcacaaaggcaatgggggtttatgctgcattttctggagagagttgctgctagccacatggcagagggggcatgcatgtatagttttgttccagcaagggagacagctgtccatcaatcctggcacacccccttgaatctaggaaaacccctctgctctgtgctgtgacatggcacacacttccaggaagcctgtggctttcatgctggcagtggctgactaaacttttgctaacaagggtgatttttttcagtctcctgagttccacctgcggtatcttggaagtgctggctccctagaagggatcctccatatgaggaaagctcctttccaaaggcccatgtttattctctataaaaacaggctgctcaaaaggtatggcctggtagagccttttttggcctacattttgttatatattaattgttgagttcttcctaatagagaattcacgtctactcccacccagtgtggttcacatggtatcagaatcatagccaaataattgcgaaggtgtgcaatgtgcaggatggggttttatgatgaaaactcaagatgaaatagaagaaggggtctgggaaacaacagtgaccccctgcactgcaaagggaggtgcaggtaggatgaggtggggaaagtggccatctcttgtgaggtgacaacatctgagggaagtggagggcgcttcctcctcagcctctgtccctgcatcctctccagtgccccagtcccttctgcctcacactctctctctgctctaaggaacagtacagagtgtggatgctggtgaagcgtgttcttagtaaccagccagcctgcagcttcatcacgtgatggtttggccatttcccctacacatgtatgctaggctgagaagttaggaggtgtttccatgacttcccaactagctgacaacactggcctgtgtatctcaggtgatcccgatgcagaactttgctgtattttgagtttttattttttgcaccttttattttgtagtgatttcaaacttacaaaaagtgggaagagtaatataaagagctcctgtatacactcagattctcccactcttaacattttgtctcgtgctttttccttctctttctatatgtacaagctattataggtttttctgagtcatttgagtgcaaattgcagacatgacctcttttgtcctcagatactttcatgtgtgtgtcctaaggacaaggacattctctaacacaacctcagtgcaatgagcaaaatcatgatgcttgtgtggatacagccttttatctagtctattgttcagacagtttatcaattgtgtttgtttgccaagcttccttagtctcctttaatctggaaacgcttttcattctttcttgtctttgttatcctgtcatttttgaagataactggctactttgaagaatgttttctgttggggtcgtcagtggattaga

SEQ ID NO: 39604 - DNA, 2471 bp, Homo sapiens
cctgtcctggggtgggggtatgggggagggacagcattagaagaaatacctaatgtaaacgatgagttaatgggtgcagcaaacctgcatggcacatgtatacatatgtaacaaacctgcacgttgtgtacatgtactctacaacttaaagtataaaaaaagagagagaaagttctaaatatctgagaaataatcataaagaaatagggcagccaacctgggagtccccagtcctacttgtgttgtttgtcgtgtgcatcagattataaaagctaaaagtggattccagcctctgtgattattctgttttgctctctaatggaacagccattcagtggtggtttgcattctcctttgcctctcttcagcatgtcactttagggttagggtgctgtttgacagggggaactgggatcctccccttttctcactgaggtgctgtcttgaattacagtcgggagccaggacctgggcagtgcggaggaccagcatgctgtgccccacagacctcctggattgcttcttcatatgtgggaacagttaagtgctgtcctggatctctgatatatgggctgcttttaggatttgccaaaaggaaacttttaaagcttctgtttctttacaaccagcagctcaattacttatgggatgtaggttgtcatggaggcagtaaagagttcatttgggaaaagagtggagaaggcatacagcggaaaatggaataaaccatgtatgagtcagtttcttttccataggaaaaacccttaacatcttagggactaaaagcaagaaactgttcctgtcacgctctggagcctgcagatgggctggggcttagcagatctggtctggcttgccttgtgtcttcatcccggggcccatgctaaggggcagtgtctgcttgggtcaggttttcttcatgatggtgaggaggggagcaggaggacccacctctcgcatctgcagggttaaggtctctgtccttgtcacatctgttaagacccaagcaagacccatgaccatgcacaaaggcaatgggggtttatgctgcattttctggagagagttgctgctagccacatggcagagggggcatgcatgtatagttttgttccagcaagggagacagctgtccatcaatcctggcacacccccttgaatctaggaaaacccctctgctctgtgctgtgacatggcacacacttccaggaagcctgtggctttcatgctggcagtggctgactaaacttttgctaacaagggtgatttttttcagtctcctgagttccacctgcggtatcttggaagtgctggctccctagaagggatcctccatatgaggaaagctcctttccaaaggcccatgtttattctctataaaaacaggctgctcaaaaggtatggcctggtagagccttttttggcctacattttgttatatattaattgttgagttcttcctaatagagaattcacgtctactcccacccagtgtggttcacatggtatcagaatcatagccaaataattgcgaaggtgtgcaatgtgcaggatggggttttatgatgaaaactcaagatgaaatagaagaaggggkctgggaaacaacagtgaccccctgcactgcaaagggaggtgcaggtaggatgaggtggggaaagtggccatctcttgtgaggtgacaacatctgagggaagtggagggcgcttcctcctcagcctctgtccctgcatcctctccagtgccccagtcccttctgcctcacactctctctctgctctaaggaacagtacagagtgtggatgctggtgaagcgtgttcttagtaaccagccagcctgcagcttcatcacgtgatggtttggccatttcccctacacatgtatgctaggctgagaagttaggaggtgtttccatgacttcccaactagctgacaacactggcctgtgtatctcaggtgatcccgatgcagaactttgctgtattttgagtttttattttttgcaccttttattttgtagtgatttcaaacttacaaaaagtgggaagagtaatataaagagctcctgtatacactcagattctcccactcttaacattttgtctcgtgctttttccttctctttctatatgtacaagctattataggtttttctgagtcatttgagtgcaaattgcagacatgacctcttttgtcctcagatactttcatgtgtgtgtcctaaggacaaggacattctctaacacaacctcagtgcaatgagcaaaatcatgatgcttgtgtggatacagccttttatctagtctattgttcagacagtttatcaattgtgtttgtttgccaagcttccttagtctcctttaatctggaaacgcttttcattctttcttgtctttgttatcctgtcatttttgaagataactggctactttgaagaatgttttctgttggggtcgtcagtggattaga

SEQ ID NO: 39605 - DNA, 2032 bp, Homo sapiens
ctgaaaactccctcataccctcccaatcaatttccttgtggttaagttagccacagctagcctttgttgcatttggacgtaaaatctgccagttgcggtggctcacacctgtaatcccagcacttggggaggctgaggtgggcgtatcacttgaggtcgggggttcaagaccagcccggtcaacatggtgaaacccccacctctactaaaaatacaaaaattagccgggcgtggtggtgcatgcttataatcccagctactagggaggctgaggcaggaggatcgcttgaacctgggaggcagtggttgcagtgagccaagacatcaccactgcactccagcccgggtgacagaataagactccgtctcaaaaaaaaaaaaaaaaaaaaaaaaaaaggagtgaacatgaaatctaacttttggagccattccctgcttctggagcctcaggcaagtccctcaacttccctggaactgttttctcttttgcaaaataagaagagtaacaataattcctgatttattcacctcaagaaggtggttgtggaattaagacaaataatgtaagaatgaactgtaaactcccaaacgtgcctaagtgctttttttttggcctagttttgaagtctcagctgatacttccttttacaggaagtcttccttgactatctgagccatgcagataccttctttctccaatctatgcctaatctctcctctcagcaaggagctgatcagatatagtcttgcataactcattcttttatatgcataatataatcaagttaaatcatttaatttttaatagttttaatttttgtcaaatgctcaaaaagttccacaaggcttgttataagactgcagtttccctgacacaccctctcatgccccctttgtcaccaccttcaactctttccttcattcattatcttgatactcactgccctgtctctaaattgcatggttataattacatggctttttgatttttcactttgaggcattatttgatcccactatgggcaatgtggattttcttcttgctacctttaccgcacatatgtatccttctcattctcttttcctcctraatagtcatggctttgtttgtttgcttgagacagcggtcttgctctgttggccaaactggagtgcagtggtgccacctcggctcactgcagcctctaactcctgggctcaagggatccttcaacctcagcctccggagtagctaggactacaggtgcacaccaccacgcctggctaattttttgaaaaaaaaatttttttttgtacagatgggattttgctgttttgcccaggctagtctcaaactcctgggctcaagtgatctgcccacctcggcttctcaaaagtgaatggtttttattgggctactagtcagagttcacgctgctgtgattactgcataggctgactgccttgatgactcaatgtccttacatcttcaccctctgaagtgtgatagtaaagcttctcccttcaagaggtggggttactgctctgtttaaatctgggctggcttatgtttacttttgctgacagaatgcagcagaaatgatctgggctcgtttctaagccccagggtacagtgctgcccacttttcacagtgtgccagttccaaatggcacgccagttccaaatggaggactaaagacgggtctctctccttgaaaggaacacttcttaggccacgaggaaaagcctggacttgcctgctggaggatgagagaccccatggagcagagacaggttgtcccagctcaggccattctctaccagctgatctgccagctgaccctgcagacacatgcaagagcccagtctagctcagtagaacctctctgccaactcaaaatctcatgggctgaataataaatgcttattgttttatgccactaagtcctggggtgattgttttgtagctaactgataacacagctaagccaggtagtaaactatgatcacttctcatgccttttgttttccgttggagtaaataatgatctt

SEQ ID NO: 39606 - DNA, 2032 bp, Homo sapiens
ctgaaaactccctcataccctcccaatcaatttccttgtggttaagttagccacagctagcctttgttgcatttggacgtaaaatctgccagttgcggtggctcacacctgtaatcccagcacttggggaggctgaggtgggcgtatcacttgaggtcgggggttcaagaccagcccggtcaacatggtgaaacccccacctctactaaaaatacaaaaattagccgggcgtggtggtgcatgcttataatcccagctactagggaggctgaggcaggaggatcgcttgaacctgggaggcagtggttgcagtgagccaagacatcaccactgcactccagcccgggtgacagaataagactccgtctcaaaaaaaaaaaaaaaaaaaaaaaaaaaggagtgaacatgaaatctaacttttggagccattccctgcttctggagcctcaggcaagtccctcaacttccctggaactgttttctcttttgcaaaataagaagagtaacaataattcctgatttattcacctcaagaaggtggttgtggaattaagacaaataatgtaagaatgaactgtaaactcccaaacgtgcctaagtgctttttttttggcctagttttgaagtctcagctgatacttccttttacaggaagtcttccttgactatctgagccatgcagataccttctttctccaatctatgcctaatctctcctctcagcaaggagctgatcagatatagtcttgcataactcattcttttatatgcataatataatcaagttaaatcatttaatttttaatagttttaatttttgtcaaatgctcaaaaagttccacaaggcttgttataagactgcagtttccctgacacaccctctcatgccccctttgtcaccaccttcaactctttccttcattcattatcttgatactcactgccctgtctctaaattgcatggttataattacatggctttttgatttttcactttgaggcattatttgatcccactatgggcaatgtggattttcttcttgctacctttaccgcacatatgtatccttctcattctcttttcctcctaaatagtcatggctttgtttgtttgcttgagacagcggtcttgctctgttggccaaactggagtgcagtggtgccacctcggctcactgcagcctctaactcctgggctcaagggatccttcaacctcagcctccggagtagctaggactacaggtgcacaccaccacgcctggctaattttttgaaaaraaaatttttttttgtacagatgggattttgctgttttgcccaggctagtctcaaactcctgggctcaagtgatctgcccacctcggcttctcaaaagtgaatggtttttattgggctactagtcagagttcacgctgctgtgattactgcataggctgactgccttgatgactcaatgtccttacatcttcaccctctgaagtgtgatagtaaagcttctcccttcaagaggtggggttactgctctgtttaaatctgggctggcttatgtttacttttgctgacagaatgcagcagaaatgatctgggctcgtttctaagccccagggtacagtgctgcccacttttcacagtgtgccagttccaaatggcacgccagttccaaatggaggactaaagacgggtctctctccttgaaaggaacacttcttaggccacgaggaaaagcctggacttgcctgctggaggatgagagaccccatggagcagagacaggttgtcccagctcaggccattctctaccagctgatctgccagctgaccctgcagacacatgcaagagcccagtctagctcagtagaacctctctgccaactcaaaatctcatgggctgaataataaatgcttattgttttatgccactaagtcctggggtgattgttttgtagctaactgataacacagctaagccaggtagtaaactatgatcacttctcatgccttttgttttccgttggagtaaataatgatctt

SEQ ID NO: 39607 - DNA, 746 bp, Homo sapiens
tgcatccagtaacatacacatgtttaaatcagtgcagactgaaaataaacagccttctaaacagagtgagatattgtgcacattattcattaaattaaaacacatgccacacataaaacaacatggcatcatttataaggaaacatttacatatttaatatgtcagagtcattgtctagggcgkgggggaaaataaggataaaggggaacttttaaaaatcttgttggaagaaggtgatggctcaaataagatttccttcctccctgtctctctctccctctgccccttctttcctcccttcctccaacagatgctaactggatgatggaatgaacaagattctgtgttaagtgctgtggaggaaataaagatgatttccccattggcttggccttcaagaaccttaggcaagggcctaaggtgaatacaccagaagccttagtagcaatactctgtcccagagttcagactcataaacacattcctgctctgcttaaaatcaacaaatgctgttttggatgtgtaagagctcttaaggatgacagcaacactcagtaaagtaaataagctatgtgactgaggccagaagtgtcacactgccgtctctttccttagcaggcttttctgataatacatatgacatagctctcaaatgcaaatgcctatagggaccaggaggaaataccaatggaaaaagagggtcaaatttaagagagtagggagtggtggggactgtgacaaaatg

SEQ ID NO: 39608 - DNA, 534 bp, Homo sapiens
agcaaagatctctatttaatgtaatgcttctcagtttattatttacatttttattttttcaccatgctatcatttttactgggattgtcactgctttggttaatgctctggttacaaagtggcattgctgtggggcagtcagctgtaaccctacttcttcccataagctctctgattttagtgcacrggtttgcataactcatggcctttcaagaaagcattatcacatgatggcagaaacacttgtctatattcttttcacagataacatcctatgcacactcttctgcacttcgttttcctcatttagctatataccttggaaagaacttgctaagtcaatatatagaaagagcttcttcattctttttcatagatgcctattattgcattgaatgatgtgctataaatgattgagccagttccttactgggggccatttggcctgtttctactcttttgcaactgcctccgaaatggtcatgaaaacccctatatgtatattattttttataagtatatctgaagggcaaa

SEQ ID NO: 39609 - DNA, 534 bp, Homo sapiens
agcaaagatctctatttaatgtaatgcttctcagtttattatttacatttttattttttcaccatgctatcatttttactgggattgtcactgctttggttaatgctctggttacaaagtggcattgctgtggggcagtcagctgtaaccctacttcttcccataagctctctgattttagtgcacaggtttgcataactcatggcctttcaagaaagcattatcacatgatggcagaaacacttgtctatattcttttcacagataacatmctatgcacactcttctgcacttcgttttcctcatttagctatataccttggaaagaacttgctaagtcaatatatagaaagagcttcttcattctttttcatagatgcctattattgcattgaatgatgtgctataaatgattgagccagttccttactgggggccatttggcctgtttctactcttttgcaactgcctccgaaatggtcatgaaaacccctatatgtatattattttttataagtatatctgaagggcaaa

SEQ ID NO: 39610 - DNA, 609 bp, Homo sapiens
aatatattttgcctcatgtaagaaaacaattattgacttaattaaaataatcatttgttcaactagaatctcaaggtagatgactatttaatagtgaggtatgtatttcatatttgatttaattccccaaagaacctttggtgacattttcttcccctctttttcttttttttttcctgtggtttaatttagtaccttatgactcaattttctatcctttcttgacatatgttacacttctttttaaattaattgttatatcactccctggatattgtaggtattttataacagattattctcwatttttgccttctaattcttatagtattgtaattcattttctttattcatatagtataattgcctaataccatgttgctattattattttgatcaaatgtcaagtcaaaatgaaatacctacaaatacagctaaccaaagaggtaaaagaggaaaaaaaaaactaaactaaaaaatactgctgaaagaaattagagatgacaaaaaatgcacgaaaaaaaattccatcctcatgtattggaagaatcaatatggaataaatggccataccacccaaagcaatttacagatcagtgctattcctgt

SEQ ID NO: 39611 - DNA, 1054 bp, Homo sapiens
ggatccagcctctgccctccagctctaagagaatctccagccagagcatggatgaggccagcaggcagatctcagagacatttcstggacgttactatatagttggcactggttcccacaatacagcacagagaatagctttgtgacactagctacgaatttgatcataatttgagatcagatgcatccataaaagagtggactctgatatatttctctccctacttctcagacttcaaaacccacagggatggtaacagcagaggtcagaagaaaattaattgccaacagagaggagggaaaacacacctaagatatctacatccaagaggacaggccacccatttggggagcatttcaatgcaggtagattttaaagtgaataaataaaagtaatgaggtgataaccctaccaggtgctaaaacatatgttaatgatataataattaaataaatgtttaagtaggtaaatagcagtaaaaactagaaatgacagaaaaaaggcctagtacatgtaagaatttagtatatgataaaggataaacaaaagtattacgtaatatatggttctgggacaatagtttacacagtgcgatatacgttcacttagatatttactttctgaatagtttctagacatgttaaataattaaatattaaaataatcaactggaaaaatagataagacttttttaaatggaaaaagcacataataaatttataaaattaaaatttataaatccatacatcttttgtttgttaaaaatttatactctgggggacagccaatatggctgactagatgcagccaggaagagcttctcccatagagagagaccagaccaagtagactggcacactccaaacggatctttggaaataaagcattgggagtggacagagggaggatgcagaccctgggctgaaacagaaggaaactgggaactcttcacagggttgccaagtagctggactcgttcctggccttgagcagctcctaggggtgggtgagtgacctaggcatggagtggcctactcttgctgtggacctcca

SEQ ID NO: 39612 - DNA, 1054 bp, Homo sapiens
ggatccagcctctgccctccagctctaagagaatctccagccagagcatggatgaggccagcaggcagatctcagagacatttcgtggacgttactatatagttggcactggttcccacaatacagcacagagaatagctttgtgacactagctacgaatttgatcataatttgagatcagatgcatccataaaagagtggactctgatatatttctctccctacttctcagacttcaaaacccacagggatggtaacagcagaggtcagaagaaaattaattgccaacagagaggagggaaaacacacctaagatatctacatccaagaggacaggccacccatttggggagcatttcaatgcaggtagattttaaagtgaataaataaaagtaatgaggtgataaccctaccaggtgctaaaacatatgttaatgatataataattaaataaatgtttaagtaggtaaatagcagtaaaaactagaaatgacagaaaaaaggcctagtacatgtaagaatttagtatatgataaaggataaacaaaagtattacgtaatatatggttctgggacaatagtttacacagtgcgatatacgttcacttagatatttactttctgaatagtttctagacatgttaaataattaaatattaaaataatcaactggaaaaatagataagacttttttaaatggaaaaagcacataataaatttataaaattaaaatttataaatccatacatcttttgtttgttaaaaatttatactctgggggacagccaatatggctgactagatgcagccaggaagagcttctcccatagagagagaccagaccaagtagactggcacactccaaacggatctttggaaataaagcattgggagtggacagagggaggatgcagaccctgggctgaaacagaaggaaactgggaactcttcacagggttgccaagtagctggactcgttcctggccttgagcagctcctaggggtgggtgartgacctaggcatggagtggcctactcttgctgtggacctcca

SEQ ID NO: 39613 - DNA, 470 bp, Homo sapiens
attttcctgaatgccacaagaaaaatctacttaaaaactctcaccatttcactccctcactttgtgtttctcagaaagcttttgccatcaatactaatatttactctatattttatgtttgctctgacaagtataacagaaagtactgtgattgcataatgaattctattctttttgaatgttggtatacaatagcataaattttgataagccaaaaggtgattcttgtctcagagagaagcctacttgttctctgattatcatattttgtacataaacataacttcttacaaagtaaaattccttcatctatgaacttagttaagagtgttgagtgccaactatttctcaaagactaccactaaatkacttagtaagatttttatccagaaactgatgtagatgcttaaaatatttgtggtgacttatattagtcattataaaatttaagatgtatatgctaattcata

SEQ ID NO: 39614 - DNA, 662 bp, Homo sapiens
tgttgcaatcataatttaggatatttgccatgkttttgtaatcatatttataataattatttattcatagacatatttacaaggctcacagtggactcttttatactgcaattttcttatttttttgagctcattcttttttaagaaattttatcttgatttctgaaggtaagacatgtttttcaggaggaatttgagtacttttcaacaacttgtagtttagtagagttggcagataaaatgcaggacacccagttacattgaacgtcagataaggaacagataattgtttagtaaaagtgtttgtatttatttgcatgccctatacacaaacagtaggtaagtagatgccgttctcgaatgccatgctaaatgtagtaatcaatattctttaacacaaacaaacaacaaaaaaacattttccataaaactcttggcaattgctttgtggcatttttaaagtaggaaagtattttgcggtagccttaatttcttccttatttagaacacttactttcagacttaaattctgatttaagaatgagaatttttataaattatatgtgtcaattaattttaaaattaaatttaaaattatggttccattttggaatgttaattcattttcaaaattatttttttttcacagaaagtcacgcaac

SEQ ID NO: 39615 - DNA, 601 bp, Homo sapiens
tgtgatctctagttttctgggatttataatataaaaagaaacctgatgcaacattccagggctattacaagtcaaattccaatgctacaaactctaaaagatcataaaatacatcctaacaaagattacttccaataagagaatctggctggctaaggttttaaaatctcttggtttgtcaaatagacactttgttataatttgattttacttgtggcattactagcaaactttgtaaatcccaagtatactttggcagggtagatggatggaattgttgggaaagccttagggtggaaaacattaactagagcttaagaaaaaatgyacaaaggaaatgaggaaaggataggcagatggggaattcagtgaggtttcgatggactcgtgctcggtcctgtgcctgatatcttcttcctcttggtgtgtttctttgcagaacattgacaaccctcaagataacaggggcatctgagaaatgtaggaagcaaggcaggttgcttggggaaatatttgtggactgccttcttctaaggttattcctattttaaaggacttgaaaaagtactaaatatgggttaacatcacgaaagagttttcc

SEQ ID NO: 39616 - DNA, 548 bp, Homo sapiens
ggttgtccgtgtgacctctaacacgatcacagscctattcaaagggtgtatggaactaacagtaagatgactaactcaaacccggacagtggctaagagcagtgagttccctgagaagtcctttaaaaggaagaatgtgggctttcccatctctatctacttccctctggagagtctttaaagaaatcaaagagactgaagacaggaagtagcctttatcctgtgatctcaccacaacccacttggtgctttactgccaaacagaggcctcttccctgatgtgataagaagagctgctttcttgaagatctgagtggtccttggcgcttacggcagtcttgtcagcagtatgttggccgctggatcaggggctgaatcctaatctctgggaaagccctgtggataaaaccgtgaagagttgacatgaatgcaaaacagtgaatgaacccattctccagattaaaggaaaatgggggatgaatggaagatgcttgggccagttccttacagtatcgccaaagactgtaacaccaggctagatcgacttc

SEQ ID NO: 39617 - DNA, 548 bp, Homo sapiens
ggttgtccgtgtgacctctaacacgatcacaggcctattcaaagggtgtatggaactaacagtaagatgactaactcaaacccggacagtggctaagagcagtgagttccctgagaagtcctttaaaaggaagaatgtgggctttcccatctctatctacttccctctggagagtctttaaagaaatcaaagagactgaagacaggaagtagcctttatcctgtgatctcaccacaacccacttggtgctttactgccaaacagaggcctcttccctgatgtgataagaagagctgctttcttgaagatctgagtggtccttggcgcttacggcagtcttgtcagcagkatgttggccgctggatcaggggctgaatcctaatctctgggaaagccctgtggataaaaccgtgaagagttgacatgaatgcaaaacagtgaatgaacccattctccagattaaaggaaaatgggggatgaatggaagatgcttgggccagttccttacagtatcgccaaagactgtaacaccaggctagatcgacttc

SEQ ID NO: 39618 - DNA, 1187 bp, Homo sapiens
aacttgctgttcccaaagtcgagcagtccaagaagaaattttctttgtaaaagggaaaaagaaatttgattagctatgcatgcatagaaccctagcagaataatcaatgcatcacattaccctttggtggctgttcgtttagatattccaggaagactacacactcaaattccgtgttcagcaatccccctgggagggttgaaaaatgaacgtattaatatgtatatgtaaaactatttttttaaagagcaaaccatattaaggcaaaatgccaaaatagtgggactattctcattagaggaataaaatttagaatttgcagtttgaaacatggaagcatctttgttgcagagtcatctcaagagaaaaatgagtggattgaataactgtggctgaaatatggtatttttctcttgaaaataatgtagcggaatcccagtatgagcctgatctgtgcccactctgagatttattcacatttggcaatggtggagaaacagggggggccctaataggatatatttgttttggtttgcatattagtccattttcatgctgctgataaagacatacccaagactgggtaatttataaagaaaaagaggtttaatggactcacagttccacrtggccggggaggcttcacaatcatggcagaaggcgaaagccacgtctcacatgtcagcaggaaagagacaatgagaaccaagcaaagaggaaaccccttataccaccatcaaatctcttgagacttattcaccaccatgagaacagcatgggacaaactgtccccacgattcaattatctcccaccagctccctttcataacacatgggaattacgggagctacaattcaagatgagatttgggtggggacacagccaaaccatatctgtttggtttgggcttttttatttttgaaatttatattttttaaattggcaaataataattgtgtatatttacagggtaccatgttgtattttgatctctatatacattgtaacaaggggatatattttaataagggggagaaattagagtatcttgctaggggacaactcaccctgaagagagggagcgcctttgtacatgtctggccagagatcaacgtgctcacatcagtggtagggtggggatggctcatgcggtgggtcagacagcctttagtctccctgcacatgg

SEQ ID NO: 39619 - DNA, 1187 bp, Homo sapiens
aacttgctgttcccaaagtcgagcagtccaagaagaaattttctttgtaaaagggaaaaagaaatttgattagctatgcatgcatagaaccctagcagaataatcaatgcatcacattaccctttggtggctgttcgtttagatattccaggaagactacacactcaaattccgtgttcagcaatccccctgggagggttgaaaaatgaacgtattaatatgtatatgtaaaactatttttttaaagagcaaaccatattaaggcaaaatgccaaaatagtgggactattctcattagaggaataaaatttagaatttgcagtttgaaacatggaagcatctttgttgcagagtcatctcaagagaaaaatgagtggattgaataactgtggctgaaatatggtatttttctcttgaaaataatgtagcggaatcccagtatgagcctgatctgtgcccactctgagatttattcacatttggcaatggtggagaaacagggggggccctaataggatatatttgttttggtttgcatattagtccattttcatgctgctgataaagacatacccaagactgggtaatttataaagaaaaagaggtttaatggactcacagttccacgtggccggggaggcttcacaatcatggcagaaggcgaaagccacgtctcacatgtcagcaggaaagagacaatgagaaccaagcaaagaggaaaccccttatacmaccatcaaatctcttgagacttattcaccaccatgagaacagcatgggacaaactgtccccacgattcaattatctcccaccagctccctttcataacacatgggaattacgggagctacaattcaagatgagatttgggtggggacacagccaaaccatatctgtttggtttgggcttttttatttttgaaatttatattttttaaattggcaaataataattgtgtatatttacagggtaccatgttgtattttgatctctatatacattgtaacaaggggatatattttaataagggggagaaattagagtatcttgctaggggacaactcaccctgaagagagggagcgcctttgtacatgtctggccagagatcaacgtgctcacatcagtggtagggtggggatggctcatgcggtgggtcagacagcctttagtctccctgcacatgg

SEQ ID NO: 39620 - DNA, 1187 bp, Homo sapiens
aacttgctgttcccaaagtcgagcagtccaagaagaaattttctttgtaaaagggaaaaagaaatttgattagctatgcatgcatagaaccctagcagaataatcaatgcatcacattaccctttggtggctgttcgtttagatattccaggaagactacacactcaaattccgtgttcagcaatccccctgggagggttgaaaaatgaacgtattaatatgtatatgtaaaactatttttttaaagagcaaaccatattaaggcaaaatgccaaaatagtgggactattctcattagaggaataaaatttagaatttgcagtttgaaacatggaagcatctttgttgcagagtcatctcaagagaaaaatgagtggattgaataactgtggctgaaatatggtatttttctcttgaaaataatgtagcggaatcccagtatgagcctgatctgtgcccactctgagatttattcacatttggcaatggtggagaaacagggggggccctaataggatatatttgttttggtttgcatattagtccattttcatgctgctgataaagacatacccaagactgggtaatttataaagaaaaagaggtttaatggactcacagttccacgtggccggggaggcttcacaatcatggcagaaggcgaaagccacgtctcacatgtcagcaggaaagagacaatgagaaccaagcaaagaggaaaccccttataccaccwtcaaatctcttgagacttattcaccaccatgagaacagcatgggacaaactgtccccacgattcaattatctcccaccagctccctttcataacacatgggaattacgggagctacaattcaagatgagatttgggtggggacacagccaaaccatatctgtttggtttgggcttttttatttttgaaatttatattttttaaattggcaaataataattgtgtatatttacagggtaccatgttgtattttgatctctatatacattgtaacaaggggatatattttaataagggggagaaattagagtatcttgctaggggacaactcaccctgaagagagggagcgcctttgtacatgtctggccagagatcaacgtgctcacatcagtggtagggtggggatggctcatgcggtgggtcagacagcctttagtctccctgcacatgg

SEQ ID NO: 39621 - DNA, 1187 bp, Homo sapiens
aacttgctgttcccaaagtcgagcagtccaagaagaaattttctttgtaaaagggaaaaagaaatttgattagctatgcatgcatagaaccctagcagaataatcaatgcatcacattaccctttggtggctgttcgtttagatattccaggaagactacacactcaaattccgtgttcagcaatccccctgggagggttgaaaaatgaacgtattaatatgtatatgtaaaactatttttttaaagagcaaaccatattaaggcaaaatgccaaaatagtgggactattctcattagaggaataaaatttagaatttgcagtttgaaacatggaagcatctttgttgcagagtcatctcaagagaaaaatgagtggattgaataactgtggctgaaatatggtatttttctcttgaaaataatgtagcggaatcccagtatgagcctgatctgtgcccactctgagatttattcacatttggcaatggtggagaaacagggggggccctaataggatatatttgttttggtttgcatattagtccattttcatgctgctgataaagacatacccaagactgggtaatttataaagaaaaagaggtttaatggactcacagttccacgtggccggggaggcttcacaatcatggcagaaggcgaaagccacgtctcacatgtcagcaggaaagagacaatgagaaccaagcaaagaggaaaccccttataccaccatcaaatctcttgagacttattcaccaccatgagaacagcatgggacaaactgtccccacgattcaattatctcccaccagctccctttcataacacatgggaattacgggagctacaattcaagatgagatttgggtggggacacagccaaaccatatctgtttggtttgggcttttttatttttgaaatttatattttttaaattggcaaataataattgtgtatatttacagggtaccatgttgtattttgatctctatatacattgtaacaaggggatatattttaataagggggagaaattagagtatcttgctaggggacaactcaccctgaagagagggagcgcctttgtacatgtckggccagagatcaacgtgctcacatcagtggtagggtggggatggctcatgcggtgggtcagacagcctttagtctccctgcacatgg

SEQ ID NO: 39622 - DNA, 561 bp, Homo sapiens
aagccctgggttctactgcctgccttgaactttcacaggttcttaggaaaaaaatactgcatttaagagaaaaaaagaaacacatccagacttggcttttttttgcttttatcagaagagaatgatgccctgacacatacagatgcatatgggggtcactcagaggattctcctttttagacttctcattctttaatccacattttcgcttatttaaatggaaattaatcatcttggaggagtgatgaataggatgagctttggagtcagacagctgtgtgatcgtgaggaaattacacgtgatgttactacacctcagtttccttatttataaaatttagaataataatagtgtttatatatagtgctaatatggagattagcccagagcctaatataactattccataactgatagttagtattattaacaatatgattagtaatataatcatattatarctaatcatattactaatcatattagtcatattattactaatcatattactaatcatattagtcatattattattactaatcatattgttataaaagaca

SEQ ID NO: 39623 - DNA, 667 bp, Homo sapiens
ttaactcagactcatgtttaaagtttatgtaataaatttgtgttgggggttaaatttatcttcttgtttaaatttaaaattcttaagcctttattttatgaccaaactatctataaaatgtatgaaaatattctaataattctctgttatagagcatcaacctattgttttatcaatgccttctactttttcttttgtattcttggtcaaaagcrgattgggtatggtttcccttggacgggtagggttctacttatctgctctttgctctggacttttaactagtgatactaatttcttctttcacatgacaatctgggccaggctgtttcccagaacttggcctaagtggtctaaacagcctagtactaggtcttgatggcaaatataggtttctgactgtttgcccttttcccattcctctggaatggtggctatacttcaggttagctttttccttattatgaagcatgaaggtcacccttcctcactggggaagtaaaatggtcagagaatcagagggaaggaagaagtcttattcaggactctaattcaggacgctaattccagcttactggaggattactgggcattaaacaggagctccacctagtctctctctggggaagaagagtgagtaataggaaccaaataccaaaccaacacc

SEQ ID NO: 39624 - DNA, 577 bp, Homo sapiens
atgaaagtatttcttgattttctgggaagttcttggcatatatatatatatatatatatatatatatatatatayacacacaggttgttctgcaataattttttaatagtgtcttctttctcttttaaagtaccacagattagatggtcattctaaccagctttaaaaaagtttcaagtagttcaacacgtgtttggctttcaaaagatttccccaaatataagaatcatttgggaagcttactgaaaatgccagagtctaaactccacttccagagattctgagtcagtgggtttaggataaaacaaaacaaaacaacataaaacaagacaaaaatccacatgctttagaaaaaaaaggtgagcaccttgctgttttttatttgcttttaggagcagtgcattaatatatccaaatgatctgcatactctctcttctctccacggaagtcagaataaattatacataccaagttctcagcaaatactatgtggcttatgcagatgatccccaacttatgatgattcaacctgggtttttctaggatggtgaaaaagtgatagacattcaatagaaa

SEQ ID NO: 39625 - DNA, 440 bp, Homo sapiens
ttgcatgataaattttagctggactaatactttatatcttcttaggttattctgagaattagtggttatataagtaggcataaagcatggtatatggtacaatcaaaatatttttattgttattgaaattatgatgtttacagttgtttargaagacttcctagtgaatggactcttatgatagcccatttcaaaacccgtgtatgacaaattatatttaaatatttaaatataatttaaaaacacttttctcatcaatatacaatttcattgcaatttcagattatagtaataaacttatttaaataatgatgttaatattacatttaagaaaacctgtgtttctatttgctttaaagattattatttgaatttgatttcaatttaattttcaatccttaaagttgataatatgtagactttattgatctctttattat

SEQ ID NO: 39626 - DNA, 598 bp, Homo sapiens
tgatgaaacaatccacttccagcatggaatatctagtggaatgctacagcaatcccccataaaaacaataaacagctgattgtgtgtagtatcagatattctttataaggggcttaatttcaggtcctgctctgggatatgaagtatgaagagattgattgaaatgtatcttcatctagactcatgggtagttactaataatgtcttagctctatgatgaggccactaggacaccaaggtatagataacaaaatatgtagtgatrtaatgtatgtttaacttatagactctcatatatatataagaataatatatataaaaatatatttcacatgtaccatcagtcagaaagcaaccatttaaagaacaccctctagattgaataagtatgtgtactcaattctattatagcttggtgggtttatgctcaaaatattacagcaaagaaattatcacaaagaactacaaagtctatcctatttgcaacctatcccagcctcggtgaggaagaattctgtaagaactgttttcaactacttataagttacagaccatcattctcattctacctaagcttaattgctgtgtgttagggatg

SEQ ID NO: 39627 - DNA, 994 bp, Homo sapiens
tttttttttttggagatagggtcttgctatgttgttgcccaggctggtcttaaacttctggcctcaagtgatcctcccaccttggcctcccaaagtccttggatttcaggcaccagccaccatgcctggccacaaagactatttaataaggaaaaatcctcaaaatgttacataaagatcacatcacaaaacttttacatacagtgttattctgatttatttttgaaggggtaaggagaaggaaaatatatcacttttaaaagtggaatttcaattgtttttcttctatactcatatgttttccattttttttctatttccaacagaaactttctgtaaatgctactgtcattacagggawaacttcaaatctactgtgattctttaggccgtatacacacagacttatccatatattgagtcttacctttcaccacagatcccacctgaaaacactctccagtccggcagctctccttacagtccaacaaataccttaagttcgttcctctttctgtgtcttgtacctttccttaggctccttgaccatctaaatcagggtttctcaactgggcactaatatttggggtgaaacattgttgtggggctgtcctgtgcatcgtgggacatttagcagcacccctggcctctgcatactgaatgccaagagcaccccctccccagaccctccaagttatgacaatcaaacatgtctccagacattgtcaaatgtctcctggtggacaaaatcaccctggcatgactcactgaaactaatgctttaagtaattaatgtaatatagtccaagtacataagtctgagtggtccagcttgatccatagggagtgatgaatggactgcacagtctttaaatgaccttctgcaataatacttctttcagccaaacttctgagaaaaagttaggaaggacaattctagattctactctctcacaagaatctgatgtgctggtgttttatattgcttaagaat

SEQ ID NO: 39628 - DNA, 617 bp, Homo sapiens
actcacacttatgttatcatttcttcccacacagaatttctcttcgttcctcaccccatcctccattactaccgggcctggagttccagagagaatgttgcaggaagtcagggacccggaaaagagggactgactgaagccatggcaggagaacataaattgtgaagatttcatggacatttattagttccccaaattaawacttttataatttcttatgcctgtctttactgcaatctgtgaacataaattgtgaagatttcatggacatttatcacttccctaatcaatactcttgtgatttcctatacctgtctttaatctcttaatcccatcatcttcataagctgaggatgtatgtccactcaggatcctgtcatgattgcgttaactgcacaaattgtttgtaaccatgtgtgtttaaacaatatgaaatctgggcaccttgaaaaaagaacaggataacagtgatgttcatggaacaagggcgataaccattaggtctggctgcctgagagccaggtggaacagagccatatttctcttctttcaaaagtaaataggagaaatattgctgaattccttttctcagcaaggaacagccctgagaaagagaa

SEQ ID NO: 39629 - DNA, 1003 bp, Homo sapiens
cgtcgatacggagggctgactgtatatttggatctatatattcacagattaaagcctaacacagcatttactagactcctttaatagataaggatcatctgaaattagcatgtggcattttactaatcctgtgatctcaaacagcttttacgtttctcttgggagaggaggaatgctagctaatgaaatctgtagctaatgataagataaagtagtttagcccagagcaaatgatactatatttatattttacagtttgaaatgaattgctacatttctgaatagttattttgtggggtaaaacgtggctgcattgagcaagtggactttttactgagccagttctattgggtaccatgcctgtgggtatctctgtgctgaatgctgtgagtgatgccgaatgaagagaggagatggttctgatgcatgatgcgtgctcacagtctctctctctctctctctytttttttttttttcttgagacagggtcttgctctgttgcccaggctggagtgcagtggtgcaatctgcaacctcctcctgggctgaagtcatcttcccacttcagcctcccgagtagctgggaccacaggcgcgtgccaccaggcttggctagtttttgtattttgtatttttgtagagaggggatttcaccatgttgcccaggctggtctccaactcctggactcaagtgatcctcccaccttgacctctcaaagtgctgggattacaggcatgagtcaccacacctggtttctcacagtctcttattgcagataaaagaatcacatgaaatggttaaataactggatgggcaatatatatataatatatagcagagcaagtaagcatatgagtatgcgtcatcaaatagcacttgggtcatagtagagtggataaacagggtagagcccaattgaaaaggaccccacaaatggaagacaatggaatcatactgttactttgtaagagtatggtagccattggtagatgtttgagctag

SEQ ID NO: 39630 - DNA, 2522 bp, Homo sapiens
cattttcctcctttttaaattttacctagttttaggcttggagttgcagatagagagcaaagagttcccttccacccttcattctgtttctcacaacattaaccttggaggaaaccgtagtgtagtgatgaagaacagcagattaacatagtgacagcattggttaccaagtccacaggcctcagtcgagttcaccagtttttccgctgttgtcctttttctgttccaggaacctcgacaggactccacaatacatttagttgttattccttcttagtcttctctagtctaatagttgtttaggctttccttgtctctcatgaccttgatactttttggaaggtactggttggttattttgtaagtgtccctcagtttgggtcattccagtgttctctttgattgcggtaaagttacccactgtgacaggaacacagaaakgatagctgtgtccttctcagtgcattgggtccaggggcccatggtgctgagatgtcttattcctggtggcgggtaggagttacggtggcgtctgccaggtgtctcagctgtgaagctcactcatgcctttgtagtgctaaggtctctggggaggtgctttgaggctatatactttccccttttgtttcaggtggttattaacttggtgatgcttttggctgaaatgaaaatacaggaccgcgctgttccatccttggccatgattttagttaatagtttccagcttctctatgtggtggatgctctctggaatgaggtaattaattttaagagccgaggccttggagtcagatggctttgagtgggtgagtgacctgtcagagcctcggcttcttgcacacaaagtgaggggagcatggcctgcctccaaggctgcttgagaggaggacgaggccatccatgtgaagctgacgagggagcactgacaggtgggaagtttctaggcatttgggagtgcttcagtgtttatcagctgttcttgtgtttaaaagtaatattctaaatatttaagattggtggatcttggttttgtttttgtgggtggtggtaattatggtatcacatgaaaatggatggattattactaaattagaatggtgtttcttggactgtcaagagtcacctagtttttaaataatgggggagatgttttattgttaatgttttaaaatacaaagactagctctaattagatgaatgtaaaatcagaaatcaagatgcattgaggaaaccagttgaaataaggctaagtttccatcttgtgtcttttttcatacattgattagtctttctactagttgaagactggtaaatgttttgtttgttttctctgtctcagccagcatattccttttaaaaattttgtcttcctcaggcttattttacaagtattttatcgtatttactgttatctttgtaattatctccaaattccaactctagttttctttccatattaaaaacaaatctggcagctgtacatcataatgttccaaaacaagttttagtgacagtctgttgagacaatctgctgacattttgagagaagaccttttctctttgagcctggaacattaaaaaaaattatattatttggtcatcaatactatgtatctcccccacccctgctggctggtctttaattttggccttctatgcaaaattgcagagaacatttagtcagaacaacttcgcaagtttgatattggtgtttcgatgatctccttgttatttaggaagattagggccactttgaggtaaacctcaattacaagcggtgggattagtgctatccgctaattacgggttcctgttgcgctcctaccacttcacagaccctggctcagagcttgggaagctgtgaaggtggtgataacacttcaaattgactttaaaaattccacgtcgacccaaaattaaacatgtttttgaaattaaaaaacaactgttttgtaaatgcacttactgttaccagtgtagctttgtttgctgttatagaatgaatcgccaaaagagcatataggttacagtttgcaaatcaaatgatatttcacagttgtgctcacctcagaggcttctttaaaccttcctttctagtagctttccactgatcagtgattatttcttctggtttcttctattactagctttctgccatgttgtggttgtcactttttaattggcttagaagttgatattttctatagatttagccaaacattgacttgtgttaaaagaaaattttttgcatcttaaggcaaaacgcttaatgcaatattaacatagccccaggggtagagaactagagttaggaaattgttttctgtctgttctcagtatctcagccagatgataataagcttcttgaggaaagattgtattttatgatttcttcagcattctggcatgccactgggcaattagcagatgcttaataacttctgtcaggtcacttgatagaaatccctctgtattcaagaatgtgctataccttaagaaaactgagactacctgtttaaata

SEQ ID NO: 39631 - DNA, 522 bp, Homo sapiens
caaagacttattttggtaagatatcttatgaggaaatattaatattctaaatattttgagtgctttattagtarcttaaacccttcaaaattaaaattttacaagcaaagtgtatttttaaagtacatttcgtgaacgttaataggagagggaagcacctacgcctccccttaatgcttctttcatgtggagagtccaatgtgagtaacattcctggagtccctctgtcccctcatttattctcccccagaaaggaggactcatagccctgtcccttttgggatttgtctgcctataaagaacatactttctgcctgcttctccgtgccataaaccatacaggaacagaccttggtcctgtagggagaggccaatggctgaccagcactgcttgtgacaggtaagtctgtctaattctaggttctgtatgaggaagcacatttttgcctcatacctaaaccacatccaccaacatgacctttattattaataaaaggatatttttgcccagcacctctattt

SEQ ID NO: 39632 - DNA, 522 bp, Homo sapiens
caaagacttattttggtaagatatcttatgaggaaatattaatattctaaatattttgagtgctttattagtaacttaaacccttcaaaattaaaattttacaagcaaagtgtatttttaaagtacatttcgtgaacgttaataggagagggaagcacctacgcctccccttaatgcttctttcatgtggagagtccaatgtgagtaacattcctggagtccctctgtcccctcatttattctcccccagaaaggaggactcatagccctgtcccttttgggatttgtctgcctataaagaacatactttctgcctgcttctcygtgccataaaccatacaggaacagaccttggtcctgtagggagaggccaatggctgaccagcactgcttgtgacaggtaagtctgtctaattctaggttctgtatgaggaagcacatttttgcctcatacctaaaccacatccaccaacatgacctttattattaataaaaggatatttttgcccagcacctctattt

SEQ ID NO: 39633 - DNA, 565 bp, Homo sapiens
ataagccatggaagatctggcagcacagagtaggaaattaacaagcttgatgttggacacaaacactatttctccagaaatgaacttctccccttaggattagcactggccttttccagaaccctgaatcctataccagattgaaaacctgtgtagacatgtgaaaagatgttcaacagcatttgckttgagggaaatgcaaatcaaaaccacaatgagatacaacttcacacctactaagatggaaagaattaaaaatacataaaaacaagcattgggagaaattggaacccaaatgcaccactcatgggaatgaaaaatggtgcagctactttggaaatagtccagtagttcctcaaaaagttaaacagatttaccatttgacccagcaatttcactcctaggaatatatccaacagaaattaaagcataaatccaggccgggcacagggcctcatgcttgtaatctcagcacttttggaggccaaggtggcggatcacctgaggttaggagtttgagaccagcctggcaaacatggtgaaaccccgtctctactaaaaataa

SEQ ID NO: 39634 - DNA, 565 bp, Homo sapiens
ataagccatggaagatctggcagcacagagtaggaaattaacaagcttgatgttggacacaaacactatttctccagaaatgaacttctccccttaggattagcactggccttttccagaaccctgaatcctataccagattgaaaacctgtgtagacatgtgaaaagatgttcaacagcatttgctttgagggaaatgcaaatcaaaaccacaatgagatacaacttcacacctactaagatggaaagaattaaaaatacataaaaacaagcattgggagaaattggaacccaaatgcaccactcatgggaatgaaaaatggtgcagctactttggaaatagtccagtagttcctcaaaaagttaaacagatttaccatttgacccagcaatttcactcctaggaatatatccaacagaaattaaagcataaatccaggccgggcacrgggcctcatgcttgtaatctcagcacttttggaggccaaggtggcggatcacctgaggttaggagtttgagaccagcctggcaaacatggtgaaaccccgtctctactaaaaataa

SEQ ID NO: 39635 - DNA, 1196 bp, Homo sapiens
atggttccttgcgaatgcgtgtgcacacgtgtttatgagggcgtgtgaaagcgaaggaacagttttgaaaccagagccattttgttcttggaggaacacctaatgaggctgaagtcttggtcaagacagcagacttcctgatctgggccaattttttttttttttcttyttaagacaggcacctgctcacgtggccgagatgccaaagctccagattcctaccctgtgtcgtgaaatatagattccattactgttcaggtaagctgaggccaacaaatcccaggaggaaattgccatcaaaaagatggtttcttattcattgttcccaagtggcaggaacccaccacactacacagggcaatggggaagcaccagggccagtcaggaggcagaagaagtggggagaaaagcgggcgagaggctttattgtcgcctccacaggaaggaataagcaaagcagagtaagcagacttagggttggctattgaatgatttcagtggctcttggggtgtaggggctgacccgagctgtctggggggcttagggcaaggggcagtaatctgcaggtaacagccagttgtaggaggtggctggggagtgggctctggattggtcagttcacacgtgaaagctctgctgggaagggcaggctctcccggctcagcaagaccccggaagtcaaagcattagaaatacagaaaagacaaggacatgataaatgtagtagaaacaccctgattagcacctggagattgtgtccgatagagaaaagtgtgtcacggaagaagcagcttctgaattcccttttcttgtccccatcatttggtttgaaagataattctcaaactacaagtggacttttacagctgagttcctggtcacaagttagccatagggaggaggagaggcatccagcacccatgagagcatcaggtggacccatggtcccagctatcaaaacccatccgtgaagtggaatacttcccaaagtcgaatgaagtcatcttgcggctttcagagaggacatttgggaagctcaatagtagacacctgagaggtggttttcaaaaatggctgcatgataggccagacgtgatggctcacgcctgtaatcccagcactttggaaggccaaggtgggagaaccgcttgagcccaggagttagagactagcccgggcaatatagtgagacctc

SEQ ID NO: 39636 - DNA, 586 bp, Homo sapiens
ctgggattacaggtgcccaccaccataccaggctaatttttgtatttttagtggagatgcggtttcaccatgttggccgggccagtctcraactcctgacgtcaagtgatcttcccgcctcgactcctgatatcaagtgatcttcccgcctcggcctcccagagtgctgagattacagacgtgaacccatgcctggccaggaattttgttttttaggaaggctttctactaatggaattcctggccttgagaggatgttactttagaaggaaaggatttttttgttattaaaaggtaagattcctggattcttattggactgttatctctgttatgagtaatccatctttagtcattcaccactagggttgtatttaattaagtctgagttattttatggtggttttgttttgttttgttttgtttttaccgaattttgttctcattgccgtggcttgagggcaatgacgtgatctcaggtcaccacattctctgccttccaggttcaagcaattctcctgcctcagcctccttagtagctggatttacaggcatgcgccaccatgcctggctaattttttgtatt

SEQ ID NO: 39637 - DNA, 586 bp, Homo sapiens
ctgggattacaggtgcccaccaccataccaggctaatttttgtatttttagtggagatgcggtttcaccatgttggccgggccagtctcaaactcctgacgtcaagtgatcttcccgcctcgactcctgatatcaagtgatcttcccgcctcggcctcccagagtgctgagattacagacgtgaacccatgcctggccaggaattttgttttttaggaaggctttctactaatggaattcctggccttgagaggatgttactttagaaggaaaggatttttttgttattaaaaggtaagattcctggattcttattggactgttrtctctgttatgagtaatccatctttagtcattcaccactagggttgtatttaattaagtctgagttattttatggtggttttgttttgttttgttttgtttttaccgaattttgttctcattgccgtggcttgagggcaatgacgtgatctcaggtcaccacattctctgccttccaggttcaagcaattctcctgcctcagcctccttagtagctggatttacaggcatgcgccaccatgcctggctaattttttgtatt

SEQ ID NO: 39638 - DNA, 586 bp, Homo sapiens
ctgggattacaggtgcccaccaccataccaggctaatttttgtatttttagtggagatgcggtttcaccatgttggccgggccagtctcaaactcctgacgtcaagtgatcttcccgcctcgactcctgatatcaagtgatcttcccgcctcggcctcccagagtgctgagattacagacgtgaacccatgcctggccaggaattttgttttttaggaaggctttctactaatggaattcctggccttgagaggatgttactttagaaggaaaggatttttttgttattaaaaggtaagattcctggattcttattggactgttatctctgttatgagtaatccatctttagtcattcaccactagggttgtatttaattaagtctgagttattttatggtggttttgttttgttttgytttgtttttaccgaattttgttctcattgccgtggcttgagggcaatgacgtgatctcaggtcaccacattctctgccttccaggttcaagcaattctcctgcctcagcctccttagtagctggatttacaggcatgcgccaccatgcctggctaattttttgtatt

SEQ ID NO: 39639 - DNA, 1217 bp, Homo sapiens
ttctgtgattgtcaggaggcaccaaaaaggctaccctaggttttctgtcattcggcccaaacatttcctctgctgggcaaatgtggaaaagaggcattaagctggtgctcccacaactgaaaggaaagcaattctctttctgttgtggttccttcctctttggactcttttcttccattccagcctatccccttcttggaaaagctgttctaccaatagcagggaagaaacagcgccgtgtacctgatacgctaccstgggcacaggcgatcagaccagggatagacacctgaactgatctgggcagatgccctcttctggccattgagaattgacagcatcagacatctagaacataatagtatttttaaattctgcagggacatccaccaggctgagggggaccaattttgttttaaaaatgtatcctgaacttggccaggcatggtggctcatgcctgtaatcacagcactttgagaggccaaggtgggcggatcacttgaggtcaggagtttgagaccagtctggccaacgtggtaaaatcctgtgtctattaaaaaatacaaaaattagccaggcgtggtggtgtgtacctgtaatcccagctgctgggaaggctgaggcaggagaattgcttggaccagggaggtggaggttgcagtgaggtgagatcatgccactgcattccagcctggccaacaagagcaaaattccatctcaaaaaaaaaagtatcccaaacttggaagtaaaaataggatgactgcacgtctttctaatgccatactggaaggttgcctaacaaaccaccaaagctttttttaactctctaagggaaggtacttttgtttgacttactatttactattgattagggcccagactctgccaagttacatgttaatttttgtctggtagagatacaaatgatttttgtcctgtaaaaagattttattgctccacaggacattaatgagtgaggtttccaaattagcaaacttatgtcagcatgctgtttctgatggtctatccaaatctttctccttccaattctcttttcaaacagctttaccatcctctggttctttcttttgtgaagtaaacagatctttatacacactccctatagacttatataagaatcatgttttcactttttgaaaatgatgctttgacaattccactgaacgggctggggaaaattttatgagaattgtt

SEQ ID NO: 39640 - DNA, 1217 bp, Homo sapiens
ttctgtgattgtcaggaggcaccaaaaaggctaccctaggttttctgtcattcggcccaaacatttcctctgctgggcaaatgtggaaaagaggcattaagctggtgctcccacaactgaaaggaaagcaattctctttctgttgtggttccttcctctttggactcttttcttccattccagcctatccccttcttggaaaagctgttctaccaatagcagggaagaaacagcgccgtgtacctgatacgctaccctgggcacaggcgatcagaccagggatagacacctgaactgatctgggcagatgccctcttctggccattgagaattgacagcatcagacatctagaacataatagtatttttaaattctgcagggacatccaccaggctgagggggaccaattttgttttaaaaatgtatcctgaacttggccaggcatggtggctcatgcctgtaatcacagcactttgagaggccaaggtgggcggatcacttgaggtcaggagtttgagaccagtctggccaacgtggtaaaatcctgtgtctattaaaaaatacaaaaattagccaggcgtggtggtgtgtacctgtaatcccagctgctgggaaggctgaggcaggagaattgcttggaccagggaggtggaggttgcagtgaggtgagatcatgccactgcattccagcctggccaacaagagcaaaattccatctcaaaaaaaaaagtatcccaaacttggaagtaaaaataggatgactgcacgtctttctaatgccatactggaaggttgcctaacaaaccaccaaagctttttttaactctctaagggaaggtacttttgtttgacttactatttactattgattagggcccagactctgccaagttacatgttaatttttgtctggtagagatacaaatgatttttgtcctgtaaaaagattttattgctccacaggacattaatgagtgaggtttccaaattagcaaacttatgtcagcatgctgtttctgatggtctatccaaatctttctccttccaattctcttttcaaacagctttaccatcctctggttctttcttttgtgaagtaaacagatctttatacacactccctatagacttatataagaatcatgttttcactttttgaaaatgatgctttgacaattccactgaacrggctggggaaaattttatgagaattgtt

SEQ ID NO: 39641 - DNA, 2308 bp, Homo sapiens
agagtaccctgcctcagtgcctagcatgagacatacatccaggaccatgtttttattcccatcttatggatgagaaaactgaggttcagaaagggtaggcaaaatcccctagctcacctggctggaagggggcagaacttccctgtacgtgctgagaacaccactgttcgagcagaggggaaacctctgcaaatttcactctgtgttcagtgggtgacttgccaaaatgacttgccaaagccctttagggccaataaattagagtgtttgcatcaaatttccatgcacaagagccaactcaaaaccttagatccaattccattggttcccatagctctgaagtggagagatgctagtaataaatcctacaggctgatggcaggactttgatatataatattaactctgatcttggtggtggtctgactcaagacagagggaatattaaaagcagtagtaatccttctaaaagttccatgcgcttctgcccagatatccagggtttctggctgaattagcctgcagaagcaattgtgcagattaggtgatgttgaaccacgagaaagtgtcttcccacttagcaaatcaagggtccatgggatggagagaaaggagggaatagagtttgtcacttgggctgtactgaccccagtggtgatgtcttccctttgatgggtggtgttgggacagcaaggcagtcatcatttagcccactagtgctaaggyggaaggcatccgcagtgcatggtctggcatccccaggcaaagacaagaggatgggccctgcagagtgttttgggttagaaacaagctgagtgaactgagtgtttcttcagggagcgcactaaagatgagccgacaaatccacgacagtggggagtgaggtgaggcagggacacaaatccacagctgactcacccagcacattcccacctcctcagcatagaaaaccacagggacaaactgaccagaaggccattcatccatgggtctatcccgtgccttgatcagtcttcctaaatcccacctttgccaaagtcactccagtctgtgaattttccatggcttcctgatgcatatggaaagacgttcagactcccaatctgaggtccaatgctctccagaattccatctttccctaccttcctggaatgatttcccattgacttgccatctacctggacaagctggaatggctgctttggctgtcttctgaaaatgccctgaggtgtctctgccccaggcctgtctcctgtgcccccagagctgcccaggcccctgcttcctacagagaccagctcacagtcttcttgtcagtggtcatctaacagtggtcttgtaaaagcagagcaagttccaatcttatttatagcattcagcagttttttttttttttagagctggtgtcttgctctgttgcccaagtttgagtgcaatggctcaatcacagctttactgcagccttgaactcctgggccctagtgatcctcctctttcagcctcctgagtagctgggaccacaggtatgcaccaccatgcccacctaaacacagtctacctttatgtgtgtgtgtccatccatcaccagatgctcacggaaggtagggcagaaacattttgaaaaataatttttacctttgaagagtaatcttaatgataacctagcaggtgctcagatacatcgggtcgattcacttcctatggctgtgtaacaaattaccacaaacttggtgatttagagcaatgcccatttattatctcagggtttctataggtcagaagtttgggtgttgcatggctggattgtctgtttaggatctcacagggttgagatcggggtagccagggttgcttctcatctggggctccaagtcctctttgcaagctcactggttgtcagtagaattcagttcctgtggttgtaggactgaggtccccatattcttcttgctgtttgtcagtctggggtgctcccagcaactcaaggccactctcaggttgttgacacagggtgccaacatctatcttcaaaaccagtaggaggatttctcttgcactgaatctcttttgcatctctgacattctcagtctctgacctctagatccagatttaaagggttcacttgattctgtcagacccactcaggacaattattttgttgtgcgtccctttttctgggaagtgggtctaccacttctatcacgttcttaaaagggtctgggaatgttcacccatcacagacatccacaccaggccagttaagtcagaactgctggagattccacattctcctgggcagcctgggtg

SEQ ID NO: 39642 - DNA, 630 bp, Homo sapiens
acaggaaagactgaataaatagctaattctccaccctacctctcatcttaagtcacttttcagagtagtaagttagtgacctagtaaccttccctctaatgaccagtagtttttttttctgaataccattatgaactcatagtttattgtttgcatttgatgtatttcaggccattgcagtctttattgttttggatgcttacattgtctcatctaggttaataattatctcttcaagttgactttcatgtctttttgacgtgatcctgttggactttgatggcttccttgctttctggcaaaamagatgttccaggatcaatatactgcaccatacatggagtcagccgtttctctagggaaccttgattccttttagtagagaacacagtttgaggtcttggactgaatgacttttgtgaacctcctctcctgagactacagcctgcatccctgcatatagcccgtttggagctcttgctgggcaccaacagatctcctaaaactgctatatagttctgcctcactcttacaaagattcatctcttgagagttttgtgctctacccccagatgtggtctttctggttctgaagcttttgcttcagtcaccctgaattttgccagccct

SEQ ID NO: 39643 - DNA, 1355 bp, Homo sapiens
tgctctgcagattctgaggaccacctcccttatttctcaccaaattcccatttcttctgtttttgttccacccaatgcaaaaagcatactgccttctcttctgcattggtgggcagcgggtcctgcagctcaggtttctccagccagggccctgaacgtgagcctggtggcgtgggcagggggctgactccatgtgggccaaaggcaacctatccagctcttcagaatggcttttctctcctccctataaaacatattttctctcctccctataaagcctatttttgtattagggtgtttgttaaaatgaaaacatgagatcattgatgcataactagaagccgtgtcattacttcccaggccctgtgcaaggtgcaaattggcgtgttagtggctgtttgcatcttttcagttcctttcgtcttttctccttatcctgccctttatatggtttctgctttaagtcaaacattgtgagtggattgatggacatatgtgtgtgtgagcgtgtgtgcacagatgcatgagaactgcagagagagatgggaggtaaccagggggatcactgttctcttcttcccaaacattagcgttaggctgttccgcttctgttcttgagagggcacccacmttactgcttgggagcctggaaatggccccactgaagcagctctgaggccctggacacccttttcctggttgtggccagctgagttgtgcatggtcctccccgtgggatgtgcttggagcatctgctggtagcagagcctcagttcctctcctgcgttctttcgctacaggtgttagacctgctgcccacctgtgacctgtttactgccagggatagacctgtggccagtgtggaaagtgagatgctttgtccatacagcctgcggggctcagccttcccggggttgcccacagctaggctgggccaggacccccaagcctgggaacttacacctttctcacctgctttcctaaaggtggttttcctttgtgatctctctccctgaacggctaaaccacactctgaatagaaaactgtcttgaaaactgctttgcacgtacatctgataaggtcctctggagggcgacctccactgtctagtgggcgaggattgttcagccgccttggctgagtcaccgagctgccaagggcagactgtaccctgggctcaccagcatgcaaagatattttattcatttatttattccataaatatatatttatattatttatatttagagccagtgtatctctctgtcgctcaggctggagtgcagtggcactatctcactgcagcctcaagctcccgggctcaaggaatcctcctactttgtcctcccaaaca

SEQ ID NO: 39644 - DNA, 1355 bp, Homo sapiens
tgctctgcagattctgaggaccacctcccttatttctcaccaaattcccatttcttctgtttttgttccacccaatgcaaaaagcatactgccttctcttctgcattggtgggcagcgggtcctgcagctcaggtttctccagccagggccctgaacgtgagcctggtggcgtgggcagggggctgactccatgtgggccaaaggcaacctatccagctcttcagaatggcttttctctcctccctataaaacatattttctctcctccctataaagcctatttttgtattagggtgtttgttaaaatgaaaacatgagatcattgatgcataactagaagccgtgtcattacttcccaggccctgtgcaaggtgcaaattggcgtgttagtggctgtttgcatcttttcagttcctttcgtcttttctccttatcctgccctttatatggtttctgctttaagtcaaacattgtgagtggattgatggacatatgtgtgtgtgagcgtgtgtgcacagatgcatgagaactgcagagagagatgggaggtaaccagggggatcactgttctcttcttcccaaacattagcgttaggctgttccgcttctgttcttgagagggcacccacattactgcttgggagcctggaaatggccccactgaagcagctctgaggccctggrcacccttttcctggttgtggccagctgagttgtgcatggtcctccccgtgggatgtgcttggagcatctgctggtagcagagcctcagttcctctcctgcgttctttcgctacaggtgttagacctgctgcccacctgtgacctgtttactgccagggatagacctgtggccagtgtggaaagtgagatgctttgtccatacagcctgcggggctcagccttcccggggttgcccacagctaggctgggccaggacccccaagcctgggaacttacacctttctcacctgctttcctaaaggtggttttcctttgtgatctctctccctgaacggctaaaccacactctgaatagaaaactgtcttgaaaactgctttgcacgtacatctgataaggtcctctggagggcgacctccactgtctagtgggcgaggattgttcagccgccttggctgagtcaccgagctgccaagggcagactgtaccctgggctcaccagcatgcaaagatattttattcatttatttattccataaatatatatttatattatttatatttagagccagtgtatctctctgtcgctcaggctggagtgcagtggcactatctcactgcagcctcaagctcccgggctcaaggaatcctcctactttgtcctcccaaaca

SEQ ID NO: 39645 - DNA, 1355 bp, Homo sapiens
tgctctgcagattctgaggaccacctcccttatttctcaccaaattcccatttcttctgtttttgttccacccaatgcaaaaagcatactgccttctcttctgcattggtgggcagcgggtcctgcagctcaggtttctccagccagggccctgaacgtgagcctggtggcgtgggcagggggctgactccatgtgggccaaaggcaacctatccagctcttcagaatggcttttctctcctccctataaaacatattttctctcctccctataaagcctatttttgtattagggtgtttgttaaaatgaaaacatgagatcattgatgcataactagaagccgtgtcattacttcccaggccctgtgcaaggtgcaaattggcgtgttagtggctgtttgcatcttttcagttcctttcgtcttttctccttatcctgccctttatatggtttctgctttaagtcaaacattgtgagtggattgatggacatatgtgtgtgtgagcgtgtgtgcacagatgcatgagaactgcagagagagatgggaggtaaccagggggatcactgttctcttcttcccaaacattagcgttaggctgttccgcttctgttcttgagagggcacccacattactgcttgggagcctggaaatggccccactgaagcagctctgaggccctggacacccttttcctggttgtggccagctgagttgtgcatggtcctccccgtgggatgtgcttggagcatctgctggtagcagagcctcagttcctctcctgcgttctttcgctacaggtgttagacctsctgcccacctgtgacctgtttactgccagggatagacctgtggccagtgtggaaagtgagatgctttgtccatacagcctgcggggctcagccttcccggggttgcccacagctaggctgggccaggacccccaagcctgggaacttacacctttctcacctgctttcctaaaggtggttttcctttgtgatctctctccctgaacggctaaaccacactctgaatagaaaactgtcttgaaaactgctttgcacgtacatctgataaggtcctctggagggcgacctccactgtctagtgggcgaggattgttcagccgccttggctgagtcaccgagctgccaagggcagactgtaccctgggctcaccagcatgcaaagatattttattcatttatttattccataaatatatatttatattatttatatttagagccagtgtatctctctgtcgctcaggctggagtgcagtggcactatctcactgcagcctcaagctcccgggctcaaggaatcctcctactttgtcctcccaaaca

SEQ ID NO: 39646 - DNA, 1355 bp, Homo sapiens
tgctctgcagattctgaggaccacctcccttatttctcaccaaattcccatttcttctgtttttgttccacccaatgcaaaaagcatactgccttctcttctgcattggtgggcagcgggtcctgcagctcaggtttctccagccagggccctgaacgtgagcctggtggcgtgggcagggggctgactccatgtgggccaaaggcaacctatccagctcttcagaatggcttttctctcctccctataaaacatattttctctcctccctataaagcctatttttgtattagggtgtttgttaaaatgaaaacatgagatcattgatgcataactagaagccgtgtcattacttcccaggccctgtgcaaggtgcaaattggcgtgttagtggctgtttgcatcttttcagttcctttcgtcttttctccttatcctgccctttatatggtttctgctttaagtcaaacattgtgagtggattgatggacatatgtgtgtgtgagcgtgtgtgcacagatgcatgagaactgcagagagagatgggaggtaaccagggggatcactgttctcttcttcccaaacattagcgttaggctgttccgcttctgttcttgagagggcacccacattactgcttgggagcctggaaatggccccactgaagcagctctgaggccctggacacccttttcctggttgtggccagctgagttgtgcatggtcctccccgtgggatgtgcttggagcatctgctggtagcagagcctcagttcctctcctgcgttctttcgctacaggtgttagacctgctgcccacctgtgacctgtttactgccagggatagacctgtggccagtgtggaaagygagatgctttgtccatacagcctgcggggctcagccttcccggggttgcccacagctaggctgggccaggacccccaagcctgggaacttacacctttctcacctgctttcctaaaggtggttttcctttgtgatctctctccctgaacggctaaaccacactctgaatagaaaactgtcttgaaaactgctttgcacgtacatctgataaggtcctctggagggcgacctccactgtctagtgggcgaggattgttcagccgccttggctgagtcaccgagctgccaagggcagactgtaccctgggctcaccagcatgcaaagatattttattcatttatttattccataaatatatatttatattatttatatttagagccagtgtatctctctgtcgctcaggctggagtgcagtggcactatctcactgcagcctcaagctcccgggctcaaggaatcctcctactttgtcctcccaaaca

SEQ ID NO: 39647 - DNA, 1355 bp, Homo sapiens
tgctctgcagattctgaggaccacctcccttatttctcaccaaattcccatttcttctgtttttgttccacccaatgcaaaaagcatactgccttctcttctgcattggtgggcagcgggtcctgcagctcaggtttctccagccagggccctgaacgtgagcctggtggcgtgggcagggggctgactccatgtgggccaaaggcaacctatccagctcttcagaatggcttttctctcctccctataaaacatattttctctcctccctataaagcctatttttgtattagggtgtttgttaaaatgaaaacatgagatcattgatgcataactagaagccgtgtcattacttcccaggccctgtgcaaggtgcaaattggcgtgttagtggctgtttgcatcttttcagttcctttcgtcttttctccttatcctgccctttatatggtttctgctttaagtcaaacattgtgagtggattgatggacatatgtgtgtgtgagcgtgtgtgcacagatgcatgagaactgcagagagagatgggaggtaaccagggggatcactgttctcttcttcccaaacattagcgttaggctgttccgcttctgttcttgagagggcacccacattactgcttgggagcctggaaatggccccactgaagcagctctgaggccctggacacccttttcctggttgtggccagctgagttgtgcatggtcctccccgtgggatgtgcttggagcatctgctggtagcagagcctcagttcctctcctgcgttctttcgctacaggtgttagacctgctgcccacctgtgacctgtttactgccagggatagacctgtggccagtgtggaaagtgagatgctttgtccatacagcctgcggggctcagccttcccggggttgcccacagctaggctgggccaggacccccaagcctgggaacttacacctttctcacctgctttcctaaaggtggttttcctttgtgatctctctccctgaacggctaaaccacactctgaatagaaaactgtcttgaaaactgctttgcacgtacatctgataaggtcctctggagggcgacctccactgtctagtgggcgaggattgttcagccgccttggctgwgtcaccgagctgccaagggcagactgtaccctgggctcaccagcatgcaaagatattttattcatttatttattccataaatatatatttatattatttatatttagagccagtgtatctctctgtcgctcaggctggagtgcagtggcactatctcactgcagcctcaagctcccgggctcaaggaatcctcctactttgtcctcccaaaca

SEQ ID NO: 39648 - DNA, 1355 bp, Homo sapiens
tgctctgcagattctgaggaccacctcccttatttctcaccaaattcccatttcttctgtttttgttccacccaatgcaaaaagcatactgccttctcttctgcattggtgggcagcgggtcctgcagctcaggtttctccagccagggccctgaacgtgagcctggtggcgtgggcagggggctgactccatgtgggccaaaggcaacctatccagctcttcagaatggcttttctctcctccctataaaacatattttctctcctccctataaagcctatttttgtattagggtgtttgttaaaatgaaaacatgagatcattgatgcataactagaagccgtgtcattacttcccaggccctgtgcaaggtgcaaattggcgtgttagtggctgtttgcatcttttcagttcctttcgtcttttctccttatcctgccctttatatggtttctgctttaagtcaaacattgtgagtggattgatggacatatgtgtgtgtgagcgtgtgtgcacagatgcatgagaactgcagagagagatgggaggtaaccagggggatcactgttctcttcttcccaaacattagcgttaggctgttccgcttctgttcttgagagggcacccacattactgcttgggagcctggaaatggccccactgaagcagctctgaggccctggacacccttttcctggttgtggccagctgagttgtgcatggtcctccccgtgggatgtgcttggagcatctgctggtagcagagcctcagttcctctcctgcgttctttcgctacaggtgttagacctgctgcccacctgtgacctgtttactgccagggatagacctgtggccagtgtggaaagtgagatgctttgtccatacagcctgcggggctcagccttcccggggttgcccacagctaggctgggccaggacccccaagcctgggaacttacacctttctcacctgctttcctaaaggtggttttcctttgtgatctctctccctgaacggctaaaccacactctgaatagaaaactgtcttgaaaactgctttgcacgtacatctgataaggtcctctggagggcgacctccactgtctagtgggcgaggattgttcagccgccttggctgagtcaccgagctgccaagggcagactgtaccctgggctcaccagcatgcaaagatattttattcatttatttattccataaatatatatttatattatttatatttagagccagtgtatctctctgtygctcaggctggagtgcagtggcactatctcactgcagcctcaagctcccgggctcaaggaatcctcctactttgtcctcccaaaca

SEQ ID NO: 39649 - DNA, 595 bp, Homo sapiens
aaaatccctatgaatgctgcaaaagtcactgttgagagaatgaaaacacaagacatagagttggagaaaatatttgtgaatctcatatctggcaaaggaattgtatctagaatacataaagaactctcaaaatccaacagtaaaaacaccaaataatccagttacaaaccggggaaggayttgaacagatgcgtcaccaagcaagggatatggatgggaaataagcttccatcagccaccagggagatgcaaattacagccactaggaaacgcttttcattcattccgggatggctgaaatgtaagcacggaaaatgctgggtgcccgcaagaacgcggagcagcaggcactcattcccgattagcgggagcgcaaagcgaaggggcggcctgtggcgttttcctgtaaagttgggcacacgcttcccacatgactcagcaattgcacttctgggtatgtacccgagagaaacaaaagcttatgttcacacaaaaacctacaacgcaaatgcacaaacagctctatccaacaaccctggaagcaacccaaacacgcttcagcggcacaggcgcctccacgcggaaccccacgcgg

SEQ ID NO: 39650 - DNA, 595 bp, Homo sapiens
aaaatccctatgaatgctgcaaaagtcactgttgagagaatgaaaacacaagacatagagttggagaaaatatttgtgaatctcatatctggcaaaggaattgtatctagaatacataaagaactctcaaaatccaacagtaaaaacaccaaataatccagttacaaaccggggaaggatttgaacagatgcgycaccaagcaagggatatggatgggaaataagcttccatcagccaccagggagatgcaaattacagccactaggaaacgcttttcattcattccgggatggctgaaatgtaagcacggaaaatgctgggtgcccgcaagaacgcggagcagcaggcactcattcccgattagcgggagcgcaaagcgaaggggcggcctgtggcgttttcctgtaaagttgggcacacgcttcccacatgactcagcaattgcacttctgggtatgtacccgagagaaacaaaagcttatgttcacacaaaaacctacaacgcaaatgcacaaacagctctatccaacaaccctggaagcaacccaaacacgcttcagcggcacaggcgcctccacgcggaaccccacgcgg

SEQ ID NO: 39651 - DNA, 889 bp, Homo sapiens
cagagtcagagctgcccagggtcacagctactcgaggtcagagctgccccagatcagggctgcccaaggtcagagctgtcctgggtcagagctgcccatggtcagagctgtcctgggcatcagaggcgcagaggtgggaagggctggcttcaggtgggagttataggtgggagttatgctacaaagggtcttgaaggccagtgttgttgacagggtagggtgcctgggtaatagcagaggaagaaaaaggcttagagttggagggaaaaacatgaactggagttgggggagtgcacctgccccctcagagaccacaaagcctccccagggctgggctgtggctgctggagctcccagmccatgccaagtgtcagagcctgggcaagaccctctggggcagcccggaaccaccagaggtcagagctggaggaggctcagctggggcccttgcaccaggcaggaggcccagaaaagagacagtgctcttgaactgcaggaaggcagctccgtagagaggcaaatctcactccagctcgggcaatactcaactacacggacgtggatgctctcaagggggctttggggcatgtggtgtcggcattggacccaaatatgggctcaaagctttcctttaccatattccttctacatttttcttgcagattgagaagggatagggaggagtttagggaagtgagtgaagcaggaagatgttgaccaagggaagttaattccataaagaggaggatgaggggacagaaaggcaggaggaagaggaggaggagaatcttcgcacagggggtgtcagctgatgggggcagcatgggtgcccatggagccctttaggggtcgttggttgtgtgcagagaggccacagcaggcgaggcag

SEQ ID NO: 39652 - DNA, 889 bp, Homo sapiens
cagagtcagagctgcccagggtcacagctactcgaggtcagagctgccccagatcagggctgcccaaggtcagagctgtcctgggtcagagctgcccatggtcagagctgtcctgggcatcagaggcgcagaggtgggaagggctggcttcaggtgggagttataggtgggagttatgctacaaagggtcttgaaggccagtgttgttgacagggtagggtgcctgggtaatagcagaggaagaaaaaggcttagagttggagggaaaaacatgaactggagttgggggagtgcacctgccccctcagagaccacaaagcctccccagggctgggctgtggctgctggagctcccagaccatgccaagtgtcagagccygggcaagaccctctggggcagcccggaaccaccagaggtcagagctggaggaggctcagctggggcccttgcaccaggcaggaggcccagaaaagagacagtgctcttgaactgcaggaaggcagctccgtagagaggcaaatctcactccagctcgggcaatactcaactacacggacgtggatgctctcaagggggctttggggcatgtggtgtcggcattggacccaaatatgggctcaaagctttcctttaccatattccttctacatttttcttgcagattgagaagggatagggaggagtttagggaagtgagtgaagcaggaagatgttgaccaagggaagttaattccataaagaggaggatgaggggacagaaaggcaggaggaagaggaggaggagaatcttcgcacagggggtgtcagctgatgggggcagcatgggtgcccatggagccctttaggggtcgttggttgtgtgcagagaggccacagcaggcgaggcag

SEQ ID NO: 39653 - DNA, 889 bp, Homo sapiens
cagagtcagagctgcccagggtcacagctactcgaggtcagagctgccccagatcagggctgcccaaggtcagagctgtcctgggtcagagctgcccatggtcagagctgtcctgggcatcagaggcgcagaggtgggaagggctggcttcaggtgggagttataggtgggagttatgctacaaagggtcttgaaggccagtgttgttgacagggtagggtgcctgggtaatagcagaggaagaaaaaggcttagagttggagggaaaaacatgaactggagttgggggagtgcacctgccccctcagagaccacaaagcctccccagggctgggctgtggctgctggagctcccagaccatgccaagtgtcagagcctgggcaagaccctctggggyagcccggaaccaccagaggtcagagctggaggaggctcagctggggcccttgcaccaggcaggaggcccagaaaagagacagtgctcttgaactgcaggaaggcagctccgtagagaggcaaatctcactccagctcgggcaatactcaactacacggacgtggatgctctcaagggggctttggggcatgtggtgtcggcattggacccaaatatgggctcaaagctttcctttaccatattccttctacatttttcttgcagattgagaagggatagggaggagtttagggaagtgagtgaagcaggaagatgttgaccaagggaagttaattccataaagaggaggatgaggggacagaaaggcaggaggaagaggaggaggagaatcttcgcacagggggtgtcagctgatgggggcagcatgggtgcccatggagccctttaggggtcgttggttgtgtgcagagaggccacagcaggcgaggcag

SEQ ID NO: 39654 - DNA, 889 bp, Homo sapiens
cagagtcagagctgcccagggtcacagctactcgaggtcagagctgccccagatcagggctgcccaaggtcagagctgtcctgggtcagagctgcccatggtcagagctgtcctgggcatcagaggcgcagaggtgggaagggctggcttcaggtgggagttataggtgggagttatgctacaaagggtcttgaaggccagtgttgttgacagggtagggtgcctgggtaatagcagaggaagaaaaaggcttagagttggagggaaaaacatgaactggagttgggggagtgcacctgccccctcagagaccacaaagcctccccagggctgggctgtggctgctggagctcccagaccatgccaagtgtcagagcctgggcaagaccctctggggcagcccggraccaccagaggtcagagctggaggaggctcagctggggcccttgcaccaggcaggaggcccagaaaagagacagtgctcttgaactgcaggaaggcagctccgtagagaggcaaatctcactccagctcgggcaatactcaactacacggacgtggatgctctcaagggggctttggggcatgtggtgtcggcattggacccaaatatgggctcaaagctttcctttaccatattccttctacatttttcttgcagattgagaagggatagggaggagtttagggaagtgagtgaagcaggaagatgttgaccaagggaagttaattccataaagaggaggatgaggggacagaaaggcaggaggaagaggaggaggagaatcttcgcacagggggtgtcagctgatgggggcagcatgggtgcccatggagccctttaggggtcgttggttgtgtgcagagaggccacagcaggcgaggcag

SEQ ID NO: 39655 - DNA, 498 bp, Homo sapiens
tcaacaacatttctagttgttagaattgcaagtttgtaacatcacaggcaagggtaaataaacattcactgttctttgcttaagccatggtcccttcccacgcaccctccctccttcattgggagcagagttcctttatgccaagtagcccaggagcctctgaagctcctcggtgttggggactttgtctttcacatctctgagtcctcctaccacagagctctgagtaaattggatttgggaccttatctttattcccartgctaaacagggaaaagaccaggctagactgttccccatttctcctctctgtcccctcaaggtctgtggagctctctgaccccatttccttggaagattgaggctgaataataataaaaaccaacatctgggtcacagcttaaattttacagagtctttacccttcccatggactcattaatccttacaaccatatcagtagctactgctgctgctgctgcaattattatgaaccca

SEQ ID NO: 39656 - DNA, 413 bp, Homo sapiens
  misc_feature (1)...(413): n = A,T,C or G
atttctgaatctgatttcttaaattctcttaaagacacaactaaggcatttcttcttctctagttatttatttttctgtggaaatctacacatgtataaaaattacagggtgaataactaaggttgtattaaaatagttttttgaccctgcagtatcttattcaaaaccttaccttttcattttagcctccacctaacrtgtgcatctgaaatgatgttttcttaaactcttaatggcagatgtttaggaaaaagcttttgattaattcagtgaatgataactcacactctgcattaccttgctgcacttttttaaagcagcatggtaacagctatgtctagagtattgaaattccagggcataaggaaaggtgactgtgaggattttagattttgggaactagaaggggtna

SEQ ID NO: 39657 - DNA, 836 bp, Homo sapiens
ctatgatagcattagctaacggagatgtctgaagagtcaaggcagcctgggaagagtctataaaagatggagtatgcctctgttagtcaacctaactgctgagagagaacaaacactcgatctcactggtttatagggccaccacagaggagactgctcctggaataagtgggctttctcataaaatagcaccaggtcctctgaattccacatttaaacaccattgtaaaattgctcctgtgcaacccgctcagcagcaatcccataacaacacttagccctttattcttctccaggtttctctctccagttcaacaatacgctcacaatcatccctttctccttctccttttattttgccaatcctcactcctgctcggcttccactgccaatatcctagtatcttcacaggcaacttctctcctgctggatatacacatctagctkatgtctaattaatcctcactttcaatgcgccccaaaccaaactcatggcattatcacaatcccactcctcttcctgacttctaatgtttataaactgtatcaccatttttccacgaacaaacataaaaattaccacattttcaaacaaactcagattctaaatacctcttcatttccatttatgttctccgaatgctctacccagactattttaatagtttctgcacgattgccttttctccaattcatctatcacatcaataacaatcttaaccagttaggaattgcattcagctgtaagtaataaacctctgaaaaatagtggctgaaataagattggtgtttatttttctttctctttggctcaggttccttctaactttgttct

SEQ ID NO: 39658 - DNA, 1819 bp, Homo sapiens
acacacacataccaatcacacatatacctgtacatactcacatatgtacacatccatatgcccccatacacacatatgtacataaacatagacacctatagtgggctgaaaaatgcaacccccccaaagatatcaggtcctaacccctggtacctgttaccttacttggaaaaggggtctttgctaacattactaataacctgatgagggggaaattatcctggattatccagataggccctaaatggcatcacaagtcaagtgtcttcagaagagagagacaggaagagatttcacacatacacacagaaaagacaaggccatgtgaagacagaggcagagacaggagtgatgtggccacaactcaaggactgcccacagtccccggaagctggaagagcaaggattagattctcccctggagcctctacatggagtgctgccctgccaacaccttgactgcaacccagtgacactgatctcagggttcggcctccagcgttgtgagagaataaatttctgttgctttaagccaccaactttgtggtaatttgttatagcaaacttatacatctatcagtttatacacacttatacaacatctatcagtatatacacacggaaaacttatacaacatctatcagtatatacacacaggttcatacactcacagatttacacactcatccaaccatgcacacacacccagagccatcactcatttacacaatcatgaacatgcagtcacacttacacaaggatccatttatgcactagcagttaagttggttatcaccaaagtatctttaaggaaacaaaaatctcgaatcacacccttctcaaataaatatataagaaaataagatgtcaacatattaataacaattggaagagaagacaataagtgaattttctccatatttagttttatacataaataattataactaacactagatgaaagtcttttctgtgccaagccactgtgccaattgttttctaggtataatcacaccaatagtatacacatgagaaactgaggagcagtgaggatgcataacgtgcccaaggtcagagtgataaagctgagatgtgaactcgggcattgagtaggattctggaggctacattttaatcaataaggaaagccttttggaaaagcctcacacgattggggcgagccttaaaagccttttttaaaagccttttaaaatctcaacatttttctttaataaaaacctatgtatttcattatgcaacatttcaccagtgccacttcctactttatttcagtcatagcatctgtgcacatgctggaatcaaggctaattgggtcatcttcatctgaaatctgctctccatctggtaagagccttttctttactctgtggagcaacccccycaacccgctgtgtgccccccacacagtatgaggccttctgccgctggaggcaagacatggccatgtgcactgtgcacacaaggtgtgagcccacaccaacagcatcgtgactcagctttccaggtgccacactgagtcttgaagctctttcttgcgactgtgattctggaaatactattattctcttttatgctccatatataggtcacatattctgatgtaccaaatcaaaaaccatgctagataaacatgttttcttttttagggccagaatattacaaactgaggcttcctgaaaataagaaatggtcattatacctacatcccatctcatagcgtagccatgaatagcaaactattttcaggctagatattctgattatagcacaaactgtttcaccagaggcatgggggaa

SEQ ID NO: 39659 - DNA, 600 bp, Homo sapiens
tggctaaacttctttcttagtagtgaataaaataattgcaccatctaaaaatcaaccctgtctctgatttgtataaatacaacaggacaattaaatcactgttattaaaaatagattatgtctacagagacaagactggaaacaagcaaaccaatcaggagcttgttttgatattttaggaatgaaagggtaaatggtagattcagtgcagttaagtttaggagccttgattcacaattgaaattagttgaatgaagcttttcttagcctgtcaaccatgttgctacaaggaaaacatcttgggtgagatcttagaaggtaagacctgcacgtttataggctagaatggtcagcctgtggagctgtcaagaggtccagaatgaggcatcctgagactcaaaaagatacttaagagaacttataattcatgactgaagaaaagtttattaagactgaaagtgtaagaatkcaaggttggttcaacatacgcaaatcaataaatctgatttattacataaacagaactaaagacaaaaatcacatggtgcagaaaaagcttttaataaaatccaacattcactcttgttaaaaattcaataa

SEQ ID NO: 39660 - DNA, 908 bp, Homo sapiens
aaatttgtccattggtcaattttgtttctcaagtagacagtaaacttattagggacagatatgtcatagaattcttttgtattttcccctgctaatctcacagtgttagtacatagaaacttctcagcaaatgcttattgattgatacaggaacttttgctgcttggataatatgttttaatgtaggaaaacttagagtgcaacaggaaagcagcaatcaggaaactattagaattttagaattctcaattgtttcaaaaatatttttgaacttcgttgtgagtctagagaccaaccacaaaacaaaactctagagttgtcaataaggaatttatttatatttgacatcaattgccaaaaaaagccatttgaaaagcactttcctcttgctgaaagtgctcacatgaaagtatttagaacttagaagttctaagaaggaacattagcagagctagatgctattagaaactgtgattggttctaggattctaaaaacaaaagggcatactgtttgctgttcttcaagtggcatttatttcagcagtctttattgtgtgactgggtgggctcttagaatcatccaggccatctacttgactgcctaaggagatggctgccctcagaattggacttgttttaatagagcaaactttctatttattagttatcaactttagaattaaaagctcagattcaacaattaactcattatcccaaawgcatgccacttgtcatgacttcctgttgtatgaccactatcctatacaatgcaggcagtgccttcatgcctgaacctatcctactaaatcagtcaaaagggaactctggtttctgcaagatttcagcatggaagagaagatcctaaaagatgcacctctatacctggagaagtgttgaagaaaatcata

SEQ ID NO: 39661 - DNA, 1063 bp, Homo sapiens
ggaaaaaagcccaatcatgaaggaaagcatcaagtgtgatgaagtggaggtaccaaatatagaccatcccttcaagaggtatagtggttaaaatagaaaaatagtgttacagtcacttgatgtggttttaaaggtatttatgaattaataatttcttagcacttgtcagaccactggagattgctatcccaccagaatattgtgacatacctagccaatcaagtctgcattactctaactggtttttccagtcatttacatttttacaaatgataattataattatgaaattacagcctttcagaacaggaagggatcctagaaagacattaatttaacccttcatttaataaatgaaggaaataaatgagggaaagggcatcgaacactatgtttgtatgcttaactattccaaaaagcatttgagccttgttgctcattggcggtggtttagacaatgcattattgatatcactgaaccagctttccagactggatgagatagacaactagattgggtgagactcctataagtgattagccacatacaccaacttggtctgaccatactaattcatttcaggtcctcctgatgtgcttttttggtttgtttttttaccattttacccgtagaatttttataaattctgattttccaaacaaagctattcatagactcaaggattccacaccaacaaccattgggtttacacttggtaaaagacagaataggaatttatacttccttgactactcccttagtgactaaacagtgctatatatttagtaagcactcaataaataccaaaataaatactgagaaaaaaatttaaaggcttagcatcatcattagattttcactgcacacccagccgatgtctsatgagatggtgcaatcaggaaaaccaagtatgctaggaagggttataggaacatcctatttagtgcctgtgttaagtggatttccttaattgcccttaatagcctaaaattttgtgacttaatcattaagaatccagtgacagaggagaataaggtgacccacaaatcctattcctctttg

SEQ ID NO: 39662 - DNA, 1063 bp, Homo sapiens
ggaaaaaagcccaatcatgaaggaaagcatcaagtgtgatgaagtggaggtaccaaatatagaccatcccttcaagaggtatagtggttaaaatagaaaaatagtgttacagtcacttgatgtggttttaaaggtatttatgaattaataatttcttagcacttgtcagaccactggagattgctatcccaccagaatattgtgacatacctagccaatcaagtctgcattactctaactggtttttccagtcatttacatttttacaaatgataattataattatgaaattacagcctttcagaacaggaagggatcctagaaagacattaatttaacccttcatttaataaatgaaggaaataaatgagggaaagggcatcgaacactatgtttgtatgcttaactattccaaaaagcatttgagccttgttgctcattggcggtggtttagacaatgcattattgatatcactgaaccagctttccagactggatgagatagacaactagattgggtgagactcctataagtgattagccacatacaccaacttggtctgaccatactaattcatttcaggtcctcctgatgtgcttttttggtttgtttttttaccattttacccgtagaatttttataaattctgattttccaaacaaagctattcatagactcaaggattccacaccaacaaccattgggtttacacttggtaaaagacagaataggaatttatacttccttgactactcccttagtgactaaacagtgctatatatttagtaagcactcaataaataccaaaataaatactgagaaaaaaatttaaaggcttagcatcatcattagattttcactgcacacccagccgatgtctcatgagatggtgcaatcaggaaaascaagtatgctaggaagggttataggaacatcctatttagtgcctgtgttaagtggatttccttaattgcccttaatagcctaaaattttgtgacttaatcattaagaatccagtgacagaggagaataaggtgacccacaaatcctattcctctttg

SEQ ID NO: 39663 - DNA, 1134 bp, Homo sapiens
gttcgcgctgattacagacaaatgggagtgctccatgtaaacaagtccagaaagtttttgtgatagatttaatatatagtgcatgtgaggccgtgactgtcagcagaaggaaagtcttcacaaagcaggcaataatacattgaggtaaatttacaatgaggcttataatttcaagaggtttaaaggaagaggtttataaagaaaaccacaggatgtgcaatgaaatgggcacggtttttcggaggattgcaagtagttttgtctgtctagatgacaagagactgggagatgaggccaaagaagtgacctggggtcagttcatgaccagtcacccatactatgctgaggaatttggattttgcaggtaggtggaaggaggcatcgaagggtacttgggaagtgtggcaggatggccacatacaggacatcctaggataagaagttgagctaatagtgacttggagaagccttgatctctgcctggtttctttgtcctgtggaatcactaattctggcaacaagtagcacatcatttaatagatgatgccactaggaagtcaggttatatgtctttgattccattgtcactggatgatggcatcagtgatactaatggcttgattaattattgtccttgtagtcacactgaacggctggtagagcagccagttctatccatgaarattagtccagctaagaacaaaacaattaaatgcacctcccctgacatataaatatatgaatgcagaacaaatcccgtaacttagaagccaagaagaaaagaaagaacagtggtgtatcaccatgatcctagctcacctaataggcacattactccctgatattccaaagaaataatgctcatttttaattttttctttctggaatgatatatggaaatgttgcctgaggctagaaagaaagtttgtgagtgaggctgtatgtcagataaccactacctgtctcattatctgggtgtcattctagacttgatataaaacagttgttcagttcttagggggtacatcatagtttgaatcccactatggacagtgagctcagccctagaataatggataaccatggacaacacaagctgcttcatactgttttcctgcttatggggaagagtgg

SEQ ID NO: 39664 - DNA, 1134 bp, Homo sapiens
gttcgcgctgattacagacaaatgggagtgctccatgtaaacaagtccagaaagtttttgtgatagatttaatatatagtgcatgtgaggccgtgactgtcagcagaaggaaagtcttcacaaagcaggcaataatacattgaggtaaatttacaatgaggcttataatttcaagaggtttaaaggaagaggtttataaagaaaaccacaggatgtgcaatgaaatgggcacggtttttcggaggattgcaagtagttttgtctgtctagatgacaagagactgggagatgaggccaaagaagtgacctggggtcagttcatgaccagtcacccatactatgctgaggaatttggattttgcaggtaggtggaaggaggcatcgaagggtacttgggaagtgtggcaggatggccacatacaggacatcctaggataagaagttgagctaatagtgacttggagaagccttgatctctgcctggtttctttgtcctgtggaatcactaattctggcaacaagtagcacatcatttaatagatgatgccactaggaagtcaggttatatgtctttgattccattgtcactggatgatggcatcagtgatactaatggcttgattaattattgtccttgtagtcacactgaacggctggtagagcagccagttctatccatgaagwttagtccagctaagaacaaaacaattaaatgcacctcccctgacatataaatatatgaatgcagaacaaatcccgtaacttagaagccaagaagaaaagaaagaacagtggtgtatcaccatgatcctagctcacctaataggcacattactccctgatattccaaagaaataatgctcatttttaattttttctttctggaatgatatatggaaatgttgcctgaggctagaaagaaagtttgtgagtgaggctgtatgtcagataaccactacctgtctcattatctgggtgtcattctagacttgatataaaacagttgttcagttcttagggggtacatcatagtttgaatcccactatggacagtgagctcagccctagaataatggataaccatggacaacacaagctgcttcatactgttttcctgcttatggggaagagtgg

SEQ ID NO: 39665 - DNA, 1134 bp, Homo sapiens
gttcgcgctgattacagacaaatgggagtgctccatgtaaacaagtccagaaagtttttgtgatagatttaatatatagtgcatgtgaggccgtgactgtcagcagaaggaaagtcttcacaaagcaggcaataatacattgaggtaaatttacaatgaggcttataatttcaagaggtttaaaggaagaggtttataaagaaaaccacaggatgtgcaatgaaatgggcacggtttttcggaggattgcaagtagttttgtctgtctagatgacaagagactgggagatgaggccaaagaagtgacctggggtcagttcatgaccagtcacccatactatgctgaggaatttggattttgcaggtaggtggaaggaggcatcgaagggtacttgggaagtgtggcaggatggccacatacaggacatcctaggataagaagttgagctaatagtgacttggagaagccttgatctctgcctggtttctttgtcctgtggaatcactaattctggcaacaagtagcacatcatttaatagatgatgccactaggaagtcaggttatatgtctttgattccattgtcactggatgatggcatcagtgatactaatggcttgattaattattgtccttgtagtcacactgaacggctggtagagcagccagttctatccatgaagattagtccagctaagaacaaaacaattaaatgcacctcccctgacatataaatatatgaatgcagaacaaatcccgtaacttagaagccaagaagaaaagaaagaacagtggtgtatcaccatgatcctagctcacctaataggcacattactccctgatattccaaagaaataatgctcatttttaattttttctttctggratgatatatggaaatgttgcctgaggctagaaagaaagtttgtgagtgaggctgtatgtcagataaccactacctgtctcattatctgggtgtcattctagacttgatataaaacagttgttcagttcttagggggtacatcatagtttgaatcccactatggacagtgagctcagccctagaataatggataaccatggacaacacaagctgcttcatactgttttcctgcttatggggaagagtgg

SEQ ID NO: 39666 - DNA, 1134 bp, Homo sapiens
gttcgcgctgattacagacaaatgggagtgctccatgtaaacaagtccagaaagtttttgtgatagatttaatatatagtgcatgtgaggccgtgactgtcagcagaaggaaagtcttcacaaagcaggcaataatacattgaggtaaatttacaatgaggcttataatttcaagaggtttaaaggaagaggtttataaagaaaaccacaggatgtgcaatgaaatgggcacggtttttcggaggattgcaagtagttttgtctgtctagatgacaagagactgggagatgaggccaaagaagtgacctggggtcagttcatgaccagtcacccatactatgctgaggaatttggattttgcaggtaggtggaaggaggcatcgaagggtacttgggaagtgtggcaggatggccacatacaggacatcctaggataagaagttgagctaatagtgacttggagaagccttgatctctgcctggtttctttgtcctgtggaatcactaattctggcaacaagtagcacatcatttaatagatgatgccactaggaagtcaggttatatgtctttgattccattgtcactggatgatggcatcagtgatactaatggcttgattaattattgtccttgtagtcacactgaacggctggtagagcagccagttctatccatgaagattagtccagctaagaacaaaacaattaaatgcacctcccctgacatataaatatatgaatgcagaacaaatcccgtaacttagaagccaagaagaaaagaaagaacagtggtgtatcaccatgatcctagctcacctaataggcacattactccctgatattccaaagaaataatgctcatttttaattttttctttctggaatgatatatggaaatgttgcctgaggctagaaagaaagtttgtgagtgaggctgtatgtcagataaccactacctgtctcattatctgggtgtcattctagacttgatataaaacagttgttcagttcttagggggtacatcatagtttgaatcccactatggacagtragctcagccctagaataatggataaccatggacaacacaagctgcttcatactgttttcctgcttatggggaagagtgg

SEQ ID NO: 39667 - DNA, 1140 bp, Homo sapiens
ctagattgctgattaaaagctattcagcaacagcctgcaagtgctacaccgataacattatctttactgattcatcagggctgccctggtgcaggtgggagactgtggctgagtctctccagacaagtgttgtcagctctggcttgagccttcagaatcttgtggacaaagaaccttaagggaggacagaaagtttccgagggcggtcttgtcccagacttcacccttgcttgaatcaccttcccattttgtacttggctcaccagagcactgctttcccttgtcaattccgtgaagtgagtaggaggctctatggtgaacactgtgtgctcctgctttgaaagagaaagaagtgagaggttctgtacagttctgcagggatttcaaagctaacacttgatgactgtgttaagggaaggcagggctcacatgcaagtgagccctcagggctagaatttcccttgatcgaagtgctggcctgaaaagaccactggactcagaagctttgcttccaacttcatagctccttcatctataaaatcatggagaaacattacttaatctccactacctcttacaggtctgagtcttttagaagcatacccctagtaattaatagtcctcgttcttgattggtgaagtgagcacagaagccaagggagaaatacatgagtgcccttgggtccttctacctccatgctttaatcatgctcatggataggaagaatcaatatcgtgaaaatggccatactgccaaagtaatttatagattcagtgctatccccatcaagctgctattgactttcttcacagaattagaaaaaactactttaaatgttatatggaacaaaaaaagagcctgtatagccaagacaatcctaagcaaaaagaacaaagctgtgagcatcatgccaccagacttccaactatactacaaggctacagtaascaaaagagcatggtactggtaccaaaacagatatatagaccaatggaacagaacagaggcctcagaatgtcacacatctgcaaccatctgatctttgatcaacttgacaaaaacaagcaatggggaaaggattccctatttaataaatgatgttgggaaaactggctagccatatgcagaaaactgaaact

SEQ ID NO: 39668 - DNA, 571 bp, Homo sapiens
tgtattcacgatcagagcagctctcctaacagtgccgatgtcaagttcacgggctttacctgcagccgtgtgctaagcctggtgatgagggtgcgggcccyggtgtctgatttatcgacatttgggtgtcgatgctgtggccggccttccatcttctggggagtctcctctgctgtctcgtgtccccacagagagatggagtccatccctgcaggcctgaagcaaagcccccagcagcggcgacaacctctgatttcctctgtgtcattggcaagcctgctagtttcctacctgcttttctacctctttatatatcatcctggtcttctaaataaatctgggttgtctttaaggtgcttataagcaaatgaaagacagatctaagggaaagagcattagatttcctgccttccttttcttattcacattttttttaagacaggtttcccatttgctccctgggctgccaagggcataatgtacagaagataaaatatggcagcacactcttctttctcctctctgtatcagcaccccggggctcctgtttcagaggatatgttctttaaaa

SEQ ID NO: 39669 - DNA, 1300 bp, Homo sapiens
agcatggaaaatgtgatgtattcctaagccaacgtctgcatactaaacacaaatttaaaatgtgcccccaaaattgcggcaatagtttgattataggaataaccatggccgtgaccaaagataagacacaataaacagttcacctctagaagtaagagtcctgaagaggtggatattgtttaaatatacattaggttaaaccacaagccaagataagcttcctccacgaaaaaygtcagagaagtcaagataaagttgaagctaaacacctgttctgctaaattccaggtcatactcaccaggacactttttctcaggagcccagtgaaaaggggagatgctataaaatatgtacctaacaaagcttgtcagcagcttgaatggagcaaaccagtccagagctgagaattctaggaaataaatgaagttgaacatttactgccaacaaccatgtcactggggccacagacaactggagccgcacagctggggaggggaggagtctgtagccagagaaggcagtggaacgcacccaggttggattatttatggtgtgctgatgaagaggcaactttccatatgaggaacagcttaacagaggaatagtcaagttaaactaggaagaggtccagtgagagagagagagagcaacaaaagcggacgtgaataaaaatgacaggtaataaaacaatacaaatctaaaaatgctgtaactttcagaaataatttagggccaaaagaagaggaaaaaaatctagttttgctggcgttgggacaattttccaagaagcaaaagacatgaagcaaaatgaatgtgctgaatttaagaccaagtttgcctccatgcctttctagctacaagtttggtttcttctaaggctggtttattcataaaaagtgttaactttgcttttatttagctgatgtatcctttttttttttttttcaacaaacatctgctgtgcactattccatgtcagccactggaccctagggctctgtgctgaacctctgttcacaggcacagttcctgccctcatgaggctcattatctagtgtgagagatggacaagtccaccctcagcttctggacagcaaggtgggtgctatgatgacagctataacaggggcaagggaagggcagagggacaaccgcaggaatgaggtgctgcatgggctgagacctaaggaatacaggccccaaagtgaaacctggcatggaaataatttagtgaatgttgctttctattctgattgaatagacacttaccaaacctccatgcaatccaaaccctagttt

SEQ ID NO: 39670 - DNA, 2002 bp, Homo sapiens
  misc_feature (1)...(2002): n = A,T,C or G
atcccagaaaaggcaggggaaggggcttggagagggaggctggccacacggtggtgctattgcccacggcggtctagttggcctccgaactgggggtggagggtgggaagtggttagaaccatccccagcaaagagagaagagagtgctgacttcaactcagtggcaaccagggggcatagatgaaaaaaacaaattgcaaattcttccacctcggcctcaatctctgtgataaaaccctgcggttctctgatgatttctggggtgatggggtggggctgggttaagcacccccccaaactgtgattcctgggttaaaaaacggcgctccgactctaaggttttaagcagtgatcccagcaggttaactggggcagtaagtgctgtctttctcggggagggagggagttcagctccaaaggcggcctggttcgcaggctcctttccctaagatcctttagaaatcgttcccatcccagaaaggaagctggggcgcagctgtnnnnnnnnnnnnnnnnnnnnnnnnnnnnnnnnnnnnnnnnnnnnnnnnnnnnnnnnnnnnnnnnnnnnnnnnnnnnnnnnnnnnnnnnnnnnnnnnnnnntaaccactatttataacattgtttttgtgnaaaaatatattctgcattccaaacaacagaactagacatgaacttttggaatacagtgcatttcttgggtcaggaactgnctgtatcttgttaactgcactaaggtcagtattttcctaggagaagatggcaaccaggagtgcagaacaaaaatggttgccaagaatatggaacatatgcatttataaggatgaaagacaaaccctctccccccgcctgcccccaccccctctgagctccccgctttgctctgaaaaaaaccaaaagcatctctcgatgctggggtttcttcacataaagtgattaccacgtgtcagaaataaactgcagtcccctttggagaacagtgaggttggatcaaaaaggagaactatttcaaaacatgctgccagctcgtcttttcaaaaatttttcttttttttytttttttttggatgtggggaggaggatttcaaaaacaaaaaaaagtaagtcagtatcttctcacaactgcagctgatttcctgtgtaaacgaaaaccatgtgatattccataaatgcttccagctctaaattacaggaaatgaaaaccatcatggaaaaggaaagctttcagaataaatccccacttcggatcccgccgcggcgaagctgcgctgggccgcccgcacacacctgcgggtccccgagctcgcccgggcgcccccgccaccgtccccagagcgcgcagggagcggggcgcgcgatcacaccctccgcgctgcgcccgaccactcgggctttcaattaggagccaagctgagaaaagtaggcttttctttatgcacgcctcgccgaggtcaggttacgacctctcaaccgtcttcaatcggcggtggcatccatattcatgaaggctaattaactctgaaaggctcggcggggctggccctccccgggccgcccagcgccgccccccgcggtgcaggggtgggtgagtgggggccccgagcccagtaccctctcctccctcccccgacaacccgccaggcatcttcccagggccgcccggcctccgcagctgctcctgggccggactcccgagcacgcacttgtgcgcggggacacggggtcccagggcgcggggaccagtcaggcgaggagaattagctgcgtcatttgtcgccatcctagcaactcgagcttacttctcccgatagctccctcctggccgctgctcccaggggccgaatgtgggaaagggatgctaattccaagtgagagttcatgcttggggtttcaggcagccttgcagatgggcggccctgggacctaggttatagccccaagccaatggactgtgggggcgcgcggggaagtcactccacctctctgggctctttgcgtttgctc

SEQ ID NO: 39671 - DNA, 2002 bp, Homo sapiens
  misc_feature (1)...(2002): n = A,T,C or G
atcccagaaaaggcaggggaaggggcttggagagggaggctggccacacggtggtgctattgcccacggcggtctagttggcctccgaactgggggtggagggtgggaagtggttagaaccatccccagcaaagagagaagagagtgctgacttcaactcagtggcaaccagggggcatagatgaaaaaaacaaattgcaaattcttccacctcggcctcaatctctgtgataaaaccctgcggttctctgatgatttctggggtgatggggtggggctgggttaagcacccccccaaactgtgattcctgggttaaaaaacggcgctccgactctaaggttttaagcagtgatcccagcaggttaactggggcagtaagtgctgtctttctcggggagggagggagttcagctccaaaggcggcctggttcgcaggctcctttccctaagatcctttagaaatcgttcccatcccagaaaggaagctggggcgcagctgtnnnnnnnnnnnnnnnnnnnnnnnnnnnnnnnnnnnnnnnnnnnnnnnnnnnnnnnnnnnnnnnnnnnnnnnnnnnnnnnnnnnnnnnnnnnnnnnnnnnntaaccactatttataacattgtttttgtgnaaaaatatattctgcattccaaacaacagaactagacatgaacttttggaatacagtgcatttcttgggtcaggaactgnctgtatcttgttaactgcactaaggtcagtattttcctaggagaagatggcaaccaggagtgcagaacaaaaatggttgccaagaatatggaacatatgcatttataaggatgaaagacaaaccctctccccccgcctgcccccaccccctctgagctccccgctttgctctgaaaaaaaccaaaagcatctctcgatgctggggtttcttcacataaagtgattaccacgtgtcagaaataaactgcagtcccctttggagaacagtgaggttggatcaaaaaggagaactatttcaaaacatgctgccagctcgtcttttcaaaaatttttcttttttttttttttttttggatgtggggaggaggatttcaaaaacaaaaaaaagtaagtcagtatcttctcacaactgcagctgatttcctgtgtaaacgaaaaccatgtgatattccataaatgcttccagctctaaattacaggaaatgaaaaccatcatggaaaaggaaagctttcagaataaatccccacttcggatcccgccgcggcgaagctgcgctgggccgcccgcacacacctgcgggtccccgagctcgcccgggcgcccccgccaccgtccccagagcgcgcagggagcggggcgcgcgatcacaccctccgcgctgcgcccgaccactcgggctttcaattaggagccaagctgagaaaagtaggcttttctttatgcacgcctcgccgaggtcaggttacgacctctcaaccgtcttcaatcggcggtggcatccatattcatgaaggctaattaactctgaaaggctcggcggggctggccctccccgggccgcccagcgccgccccccgcggtgcaggggtgggtgagtgggggcmccgagcccagtaccctctcctccctcccccgacaacccgccaggcatcttcccagggccgcccggcctccgcagctgctcctgggccggactcccgagcacgcacttgtgcgcggggacacggggtcccagggcgcggggaccagtcaggcgaggagaattagctgcgtcatttgtcgccatcctagcaactcgagcttacttctcccgatagctccctcctggccgctgctcccaggggccgaatgtgggaaagggatgctaattccaagtgagagttcatgcttggggtttcaggcagccttgcagatgggcggccctgggacctaggttatagccccaagccaatggactgtgggggcgcgcggggaagtcactccacctctctgggctctttgcgtttgctc

SEQ ID NO: 39672 - DNA, 1728 bp, Homo sapiens
accttttctacttcttcctgtatccatcaaggtccttacattttagattttacaaacggacttgaactagtttaagcaaactagaaaattctgttttgtggatagagactttgctcatggacccatgggcctgagatacctccaggctcagaaagttcttcctccttctttcaccttttcttctatattcctgctgctttgtttttattggccgactgactgcctcaaggcctgtttctcagtccacataggacagaagatggtcctgccactgtttatcagtttacatctgctctattcaacaggggagtccagcctgaaactgcatctccagaattcaggcacaaaattcagtttacatctgctctattcaacaggggagcccagcctgaaactgcatctccagaattcaggcacaaaatatggggctggcccagcttagatcacatgcccagctctggtccagccaattgagagcagagggccagccacatggtactcactgccaccatgggactgccctgtgggtaggggatgaatcaggggtgagctggccagaaatggctaagagcatcttctgcatgaactcaagcctgatttcaagtgggtgcaaggtaatttctttcagagacagatagctctctgggctcctgacccagagttggcttcaccttttttatttcttttgtttcttttcagagatgggctctcactctgtcgcccaggctggagtgcagtagtgcaatccacagcctcaaactcctgggctcaagggatcctgcagcctcagcctgcagagtagctgggactacagatgcgtgccaccacattcagctattttttattttcattttttgtggagatgaggtcttacattgttgccaggctggagtgcagtaatgtgatcagagctcactgcagcctcaaacttctgagctcaagtgattctccagcctcagcctcctgagtagctggggctacagttgggcactaaccacacatggctaatttaaaacaattcttttagcagtggggtctcgctgtgttgtccaggctggtcttgaatgcctgtcctcaagcgatcctcccaccttggcctcccaaaatgctgggattacaagtgtaagccaccacacctgaccatggcttcacctaataagaaagaggaggggacagaattcccagtgcagaattcaggggcaccaggaagaacatacctgacctccctgtacttcttagcagggagccagggatgaagtcagaggcccaccatgaccagagaagcagacagagagcccactctccatcagagacacttctgtggctgggcctgcctatggtgatgggattgccacactagggctcctgctgggtcccctccatcctgcactaagatgagaggtctaaggcaagccctgtgccgcccattctgggggaaccatggcctacctgcagatgcaactaccaaatcaacacattagacckagtcgggaagtgaaatactcagagttcttaatcctaaaaaaaggaaatctgctttagctagtccatcagaaaacggatttcagtgtactagtcaagatgcgctaaccctacaacaactgcaaactcagagtggcttaagacaataagaggtttattccttgttcatgtcgccatgcaggctagtgatccaagagcccaggctcctgtcttctcatggctccagggctcttgtcatctcccagc

SEQ ID NO: 39673 - DNA, 544 bp, Homo sapiens
cattttaatgagtatatgtaattcatactttccaacttcagagagtcctgaaagagaaacctatgcttttataacccaagcctctgaagtaaacagttttatttttaaatctcatttcctcccgttccccttacacaaatgcattataaaacagacccattggacgttatctccctttccaaaaaaaaaaaaaaaaaatgcattcaaatatttgtctaggtttcggtgaagagtcccctaagctttgtgctcataggatatgtcagatgggcccattcttcatttggagattagataaggctgtgagcccccattcctccatctgtaaaaacaaattgaaaactggcataagaaagacaatccctgagtcatgctgggaaaattcggttttaaaacttgctttcgctctcatgcctgtttttactgaaatgagatggatttagtcatggttygttcctgccaactgagttcacttttcccatttcccccttctctgggtatgccttcaacctccagcctcgaaagtgactgcgtttgattaaat

SEQ ID NO: 39674 - DNA, 596 bp, Homo sapiens
aaaaacaatactggaattcaaataagcaagagattattttgttaaatgagccttttatgggaatgctgaatttaccaagaatagcakacgggagaaatcacagtagaaagaaaacttgtgaattaggtgctagagtgttaaagacattaaatcaaaatgtgaaatttccagaagttttcaattcatgcaaatatatttttcatatttaaggcaaagttagagaaacataaaaatatttatagtgctatatttatgtttttattcctttaaagatctgtagctaccatgttaaaactgggaaaagattattatatataattttactcataaaatatattttaaaacaggtttgaaagtcaaattttcatctgtaaatgtactactgataagcatcctaaggcttaactgtttaatacaaatagaattataggctgatgaaatttaataattctaccatttcttaattttcatttattttatgaggacctggaaaaaattcaaaaatagatagtgtcactatcactgccattactgcaatttctggtagttctcctgttagcgctattctaaatgtggatgctgctggctccatctac

SEQ ID NO: 39675 - DNA, 805 bp, Homo sapiens
ttaagagaagctataaaactcctccaaggaaattcctaactagatggctagagtttacaattatgagaggtgtttggaaccagagaggagacatcttttgtctgagatggcttttgaatttggaatattttaatgcttatttccttagtaaaaatgaactagaattattgggaaaataaccttgacctctctgattccttggtagtacatgtaacagcagaaacgaccaaatatcaccgtggttccttcttgtcttctcattcttggaggtccatgttgctgaggagtgtgcagcattgggcttgttccaccggccatagcagggtgcagtgaattaagttagaaagcaggaggaggcttagaatcttgagctgtgtgacctttggggaataactgtcctctttgagcttcaattttctcatatgcaagtaaaacgagaagattgataggtaatagccatggtctctctgctgcccacatcatatgagactatgcagataatttaaataatgttatggtcatgtgatgtcttttccttagagcaatctgtagtcagtggggtttattttcagttgttcaacattgaccaggtatcttctgtgctcttagagcttggtgatagtttctggtgtgtgggtggaggtggaggcagccggcacaggggacaaggccactgtaagaagtttgtaatctaattggagagaaagggtgaaaagcgtggaatagagaacagtgaactgagtgcattcccrgatgctgagtggggtagtgaaggcccaagtggagagagcatttagacaaagca

SEQ ID NO: 39676 - DNA, 1024 bp, Homo sapiens
tggtgcttggtctcagttwtaactgggcacattcaggcaagaaggcaaaaacagatcagaactagaaaaaggtctctcagggtagccccttcccttgaggacagtctccctccactgcagacatttccctctgaacagtaatgagggactttcctagatgctggtgccacattcatccaatcaactgagtgctccacacccccaggagatagggcaggatggccactcaaagcaaatacatactcttcactcctggcaagatccctctctgagtccctgtctcctactgcaccacgcttgcctggacatgcacacctccaaggctccctgcttttcttctccccaaatcctagccaagaccttcttgggctccctttgggtaaaccgagcagaagccgtaagggttttctaaacataatgccttcaactagaagagaaggtagaggtggtgccaaactgatcattcccttggggaggagacgatggaaaggcagcctctattatagaattgtttctaatgccctcactcctcccaattaaagaccttctcagtgctctgctggcctgtcgtagcctataatacatcttgtcccaattcacatcagcacctctcgtctctgggaaggatatgtattgtgtggtcatcagaagtaacttttcattaggaaaaaaactatccaaatatacaatcttaggtggatctgtccctcaaaccattaaactatccaaactgttcttacttttattctttccatcctttttgatcctgtctctttgtctcagggaggacagtggccattctgcctaccttggcaccatgctgcatttggccagacgcccctgggactagaaggtcatagaaaagaaagcaaggtgatgtcattgtccagcaatggcagatcaggctatggctgcacctggatggagaaaatgcctccgcatctatgcaggacctgttgcagtgtctgatgcttccacttgtttttctagctgaaggtgttgtttctagaaaacccttataaat

SEQ ID NO: 39677 - DNA, 1024 bp, Homo sapiens
tggtgcttggtctcagttataactgggcacattcaggcaagaaggcaaaaacagatcagaactagaaaaaggtctctcagggtagccccttcccttgaggacagtctccctccactgcagacatttccctctgaacagtaatgagggactttcctagatgctggtgccacattcatccaatcaactgagtgctccacacccccaggagatagggcaggatggccactcaaagcaaatacatactcttcactcctggcaagatccctctctgagtccctgtctcctactgcaccacgcttgcctggacatgcacacctccaaggctccctgcttttcttctccccaaatcctagccaagaccttcttgggctccctttgggtaaaccgagcagaagccgtaagggttttctaaacataatgccttcaactagaagagaaggtagaggtggtgccaaactgatcattcccttggggaggagacgatggaaaggcagcctctattatagaattgtttctaatgccctcactcctcccaattaaagaccttctcagtgctctgctggcctgtcgtagcctataatacatcttgtcccaattcacatcagcacctctcgtctctgggaaggatatgtattgtgtggtcatcagaagtaacttttcattaggaaaaaaactatccaaatatrcaatcttaggtggatctgtccctcaaaccattaaactatccaaactgttcttacttttattctttccatcctttttgatcctgtctctttgtctcagggaggacagtggccattctgcctaccttggcaccatgctgcatttggccagacgcccctgggactagaaggtcatagaaaagaaagcaaggtgatgtcattgtccagcaatggcagatcaggctatggctgcacctggatggagaaaatgcctccgcatctatgcaggacctgttgcagtgtctgatgcttccacttgtttttctagctgaaggtgttgtttctagaaaacccttataaat

SEQ ID NO: 39678 - DNA, 782 bp, Homo sapiens
ggaaggtccctgggaccttcaggctttctgtaagcaaatctcctagcccagcctctgagcattgcaagtcaaggatgatgcaacgccaggcagagctgatggagcccacagcccactgcttttctatttcmcaattttgcatgcaatttctgggtaaccagaggtgctgaatgtaaaatatgagctcagccaggcgagggctgacaaggagaagcgggaaagaaggggctgaatgagtgagtcattggtccagaaggaatgctcctgcatcttaacgaaatcccgagcctgcggctcattttctgcagagaggctgaagatcccagtcgctggtctggccaaagagatacacacagttctttaaaaacccactgagctccgagctgggggaaaggccacactccattcttttctttgcaatgcgtctaaataaatggacttttttttcccttaaaggaaggaaattaagtttttctgcttcacctcctttgtatcattattcctttagtccggcactccacttcctgcttaatctgctataattaaagtgcttaggagataccacttgtgatcaagaaagtccctcggacttgttgccaggagttcttgcttttgtcactaacacccttaggttcttggcaacatctcctccagccccgcctctccctgctgctctccagagagggtccaggcagctgttaacaggcacggccttctccccagctctcgggctcaaagggacggtcactatttcactcccaagggtagacctgcagggaatg

SEQ ID NO: 39679 - DNA, 615 bp, Homo sapiens
cagtttaattgtctctaacatgttaatcaactttttgttgtttatttgtgatctaggtttgaacatctcattcttgcatctgtggtttctgctggctctttctcatggtgccgtgtttctttgtttatttgtgtctgggggctactcattttcactggcattttatttgtgagaattctgcaagctctgggataaagatagtttactccagacagcatttgtgtttacttctaccaggtgccagttgaggatagtctaaaytacattctcagcttgaaatatttttgaccacccagatatggagaactaagcgtgcaaacctgcatgtaattcagaccagggttcgcaattctcaggacagtttctttcccctctgctcagtgcttatttcaagacagtcatgtcttgaatacctacaagggacaattattgggggttgattttcctgtgaaaattcacatgtggagcaggcctccagctttgactgctgccacataaaactcagcagggtgttacctggctgggcagatgtctttggggtgaaagaaagcttgcctgttctgcttatttatcttgagttcccaacttcacttgcttttttttggcctgaggatt

SEQ ID NO: 39680 - DNA, 615 bp, Homo sapiens
cagtttaattgtctctaacatgttaatcaactttttgttgtttatttgtgatctaggtttgaacatctcattcttgcatctgtggtttctgctggctctttctcatggtgccgtgtttctttgtttatttgtgtctgggggctactcattttcactggcattttatttgtgagaattctgcaagctctgggataaagatagtttactccagacagcatttgtgtttacttctaccaggtgccagttgaggatagtctaaactacattctcagcttgaaatatttttgaccacccagatatggagaactaagcgtgcaaacctgcatgtaattcagaccagggttcgcaattctcaggacagtttcwttcccctctgctcagtgcttatttcaagacagtcatgtcttgaatacctacaagggacaattattgggggttgattttcctgtgaaaattcacatgtggagcaggcctccagctttgactgctgccacataaaactcagcagggtgttacctggctgggcagatgtctttggggtgaaagaaagcttgcctgttctgcttatttatcttgagttcccaacttcacttgcttttttttggcctgaggatt

SEQ ID NO: 39681 - DNA, 1161 bp, Homo sapiens
  misc_feature (1)...(1161): n = A,T,C or G
actgcaaaggaatgaggatgggacaggtttaggctttgtaacaagacctcccaaaggctaacacataggcggctgcttcctcggcaagcagagatgacgcttgtggccctttttgaaacaccttttttacatgccagaggtatttaacttgwccgtaccaaatggtacggacaagttaaaagggttatccgcccttttaactcaaatatcccgttgggatcaaacatttttgctctggagacctttgtacctgtgcagcatcagtataaggatagcctgggggtggtaacccagacacagctaacagcggggtctgagtggcttggccagagtcttggcctcaaattgagggcacagcagtggttctgactgtcctnnnnnnnnnnnnnnnnnnnnnnnnnnnnnnnnnnnnnnnnnnnnnnnnnnnnnnnnnnnnnnnnnnnnnnnnnnnnnnnnnnnnnnnnnnnnnnnnnnnntaccccttggccgagatcttgagcctcaaatgaagggcacagcagtggtatctgaactgttcctcttcggggaacgttgtacatcaggaggggcctgaaggtaagttggtgtaaaagtctctgctgtgatccaccctttaagaattgtgaactgtgcagaacgaagcaggtcatggcttgtcctctaggatgtgatgggaggctgaaagcatctctctgctgtgacgtaggagggaccgtaagccttatgctaggcactccttccagcccaaggcagcatcgtctactttggttttctttctttctttttttgaaacactctgcccaggctggagtgcagtggcacgatctcggctcactgcagccttaagctcctgggctcaagctatcctcctgactcagcctcccaagtagctgggacaacaggcgtgtgccaccatgcccggctacttttttaaatatttttaatagagatggggtttcgccatgtgtcccaggctggtctcaaactcctggattcagacaatctgcctgcctcggcctcccaaagtgctgggattacaggcgtgagccaccgtgcctggcctgctttggttttattctgactgtggctcctaggaagaaaaagaaaagatgatgctttggaagctgtagggttgggaagctggagacttcttgtgatgga

SEQ ID NO: 39682 - DNA, 1097 bp, Homo sapiens
tgtggacggtttacagcctgttgagggatcaggtgagggtacctaccctcatgacctggtggcttcagaagcccctcctgtgaggttggtggcctgcaagaccctggcagcctctctcagggatgtgggataacgcacagattgtcccattgaaagtggaatggcgaggcccttcctccacctccaccccaaacatatttgtggacagtcatgtttgcacacctgccacagggcctgcagtgccccccgccacacacaccatgatgcctgaaatgcgtgattttggagaaagtctttgccatttctttttttcctttttttgagacagtcttactctatcgcccaggctggagtgcaatggcgtgatcttgccaaactgcaacctctgcttcctatgttcaagtgattctcctgcttcagcctcctgagtagctgggattacaagcgtgcaccaccgtgcctggctaatttttctatctttggtagagacaaggttttaccatgttgaccaggctggtctcgaactcctgacctcaagtgatccgcccgtctcagcctcccaaagtgctgggattacaggcgtgagccaccacacccagtcagtctttgycatttttaagaatctcctatcaaaaggcacgtactccagaataattaatatataaagcccacagacttgttaattggagtcttgggtggcacatgacagtaagttatgatgggcaaggagaagaggacccgggtcagagctggtggccctggaggtcttggggtaggagaaatgaaaggatggtaaggagagaaaaagacagacagaggcaaaagttcccaagaacaactgaagctacttgagaattttgcctggaatcatctctgctcataagtggcttccaaagaaattacccctgctcatcctttaagggcttaaaaaaaaataaatgaaatttacgcagaaccccacgtgcaattctgtggcttggttgaagccagggcggccgggttcctgccctcctggcctgtctctcccctcccgctgcccttctgtgcaacactaggctcttcacatgctctcagaagccaggtccctgcagggatcc

SEQ ID NO: 39683 - DNA, 1038 bp, Homo sapiens
tcctaatgctctcctcccgccttttcaatgtgaaccttcccacccaccctgcttttcttgtcttcttcccatagcttcagcaggctccaggtgccgcagccctgactcctcagggcccacccctgctgtgtccacacaaatgcccccaggaagctgacacttccccgcagcctgttcctgcagtccctgccttggttcttagctgatgctgtcttatcactgccaccccatccccatttctgagcatcaggcaccctcatcagcacttggcatgtaatagctccattaaccttaactgtaaccccattttttggatagagtttttggtgtgttaaatcttgtgttcaacttaggttttgaaataagagcaggaaatgaagctttcagactgcaaatgtttcctttgaatgttctttaaagaccccatatgataggacatgtgctttttgtgagtgtaactccctgtggtgatcacactaaagtttggacccactctgttagacaagggaggaactgggcagaactgcctgcccatggctgggctgtaggctcagtctccttttagatgcgtcagatttctagtcttgctttcttgcaggagttacttcattcagttgtaatattatccttaggactttaaatccctccgtattttatatgtgcttttcagggttaggcggctccactgctaccgcagtttttttttaataacgtaaaatatgccatcataaccactcaattcagtgttcagttcattcagtgttcagtagtgccagagtatgtaycttgttatgcaacagatctctagaatgttttcatcttgcaaaactgaaactcagtacctattgagtaactacccctcccttttatctctctctccagcctggcaaccaccgtcctacttcctgtttctaagagtttgactgctttagatactccatataagtagaatcatgcagtatttgtctttttatgtttggcttattttacctcaaggttcatccatgttgtagcatgtgtcagaacttctttttaagg

SEQ ID NO: 39684 - DNA, 887 bp, Homo sapiens
tttctgcataccaggtagcgggcctcgcttttgaacagagaattctcattgcacacctgaaatgagcacactcatgtgtgtgacacagcagccaaccagcggaagctgcttgggaggacacaccccaattcgttccctgtgtgcctgatactggtttggtggacagtcagggcccaggcaagacgctatgctttgacatgggatgagcagcatcctacagggttaacgatggactcaaactacctcaaaatgccctttccaagtttacaacaactcccagggatgtgccacatatctggccastaggacttcctgcattcagggacatgctctgtctcccattctgtctgatacagccactagccatgggaggctactgagcccttgaaatgtggtgcgtgacaggaactaaactggtaatttttaatttagttaaatttaagtactcatatgtagctagctttaaaccatctgtaaaatgttatcagaacagcctagaactggtataaaacagcacaaacactgcaatgtttcaagatctaaaaactgtaaactgtgctttcactggtagatctggagacctttttctgaatgttataacagatctccaaaacaccaacagtccactggaatgttctagcgtgtgcagcacttgctaaatcctggtgaggatcagatctgttgagtgccagatgcccggcacaaggctgagcggcgtgcacacgtgcttgcagatgcagcgcagtccgcctgtgtatcacaggaaaagcccaagcaggctggtgtggcaccaacctcacaggtgccctattcatgtctggatttttagatcaaatgattaggtaggaacagttcatacaattcaacctaaacatgtaattatatgt

SEQ ID NO: 39685 - DNA, 1569 bp, Homo sapiens
ccggctccattcctcagataggaaaacccagacagagacaaaggacctacctgggacctgtataggtccagtccctccctctgccgcctagtgagagaggactgaagatgaagagtgaggatgaattgagagcaggtggtgtcacatctgccctgtcagtgagttggtcaacagaggtctttagggggctatacctggacagggaccccaaagggaagatggagcgtctgcaagggggctgctagctgctgtcagcgtccacccagtctgcaggctgccccctgaccctgcttgatggggacaggtgtgtcatgcatgttgccgtgcaacccaagctcagtgtgtgggtggcacccagggctgcactggctgtcagggtccacaagtggtctgggtcaggagggggcaggaacatccttctctgagttccctgattacccaggaaggctggcggggcagggggtccactcatccagacccgttggccagcccaccaaggtgtgcatctcccttttggctccaaggcccgccttggccgggtgacagctggggaaactgataccagctcgtagctctggactgctgggtggcaaggccctgtggtcgctgggagccaggcttcctcagtcccgcgcgttcgctgctgacaattgagcgaccaaagcagattaacttgggtgttaatccccacctaatggcttcagaatccccggctccaggagctaagccgtcctttctccgagcgcggccgagccctccgcggcttcagccccgcagcggcgccgatgctatctctgcctgcccggccgcggtaccgcgctaatccccggcgctcctttcttccccggcccgtccaaggtcggccgattggggtttgattatggccgctatcgagggcccctttgtgcgaccggccctaaatcccctaattccgtgataaaagaggcattagcgggcgtttgtggctgagaaaggaacagagatgaaagaaagcaatcaggagatccggacggccgcgccctcgaggcggggtggcctcgacctagcggggggcggcctgggcccgggcttcctccaccccaaccagccctgagcggggccagcgacccctccccacctccttggctgtccctccccactgttccggctgccacttggctcgggaaccccctgggctcacatgccgagggaccacccccctacctcagcctcacttttgcatgtgcgggatctgagggacctaacccccggctccctgggccctagctgctcctgcgtcccggccctgactgtccaaatccagtggtctgtccgtgcccacccaaagctccattcstctgtggcctctaattctcccccagcccctccagatccctgccctcttcatctgcctcagtttcatccagtcctggaaacagtcaggtctgttctttagtcggggaaagaaatggtggcagccgggagcactgggattgtctagagaggtgcaggtggggacagcagggaaggcccccttgcagaggtgccaggagccccaggatagggcgtcaaggagccagggtggatgca

SEQ ID NO: 39686 - DNA, 1517 bp, Homo sapiens
aaaaatcatattaggatgttcagttatgaaaccactaaagaagaaaaagggagctagaagacagagaaatctgaacttttaggtgatatggacaaatttatagcacatgacctcatcaaagtcaagggtgtggaaaaattataatgctttggacatgttcaaaaactgagattggagcagaggcaattttatgaatagcatgctgaaatgtaagtgattcagagcttgactggtgttagagtaggtgagaaagagttaccccacacattagccacagatcagagaaatagacacaaacacagagaagaaaatgggaaataattcattctagtaagataggtggtaacacaaaacagagagtcacagagaactagtgttaccaaataatcttttagaaaaacattagatctggcgggaatttacagcaagcacctggttttgaragtcccaggccaaaaccaaatagctgagtgaccacaggcaataaataaaagccaattttttaattgtctataattattcagtaatatttcaggttccatttactcagttctgagccaggcaccaccaggagtaggaggtataggaaaagggatggaaatgagtgaggtctgactgtgcccccagggagcttagattctaaaggaatagacaaatatgtaaaaatagactttctggttcaaagtggaaagacgtgagtggtaaaaagcacgttgagagtctaaaataaaggaacaattctcacctaagggagcagaacagaaatgttttaaactaggttaaaaatacagcataagcaaggattctgaagtaacaaaatgcacagtcattttaggggctaatgaatagactaatgtcaactgaaggcagggtgcaaaaaatctgaaaagttgttaggggtcagatcttacaagaaatgtcatactttattctttttgcaactgactgcaactacaaaaatttttgcaccatgtataatcattagtctcaaaaatatttttcaaaattgactatttcaacagctgaaagtgcatttctggctatttcaaaagttatttaaataattgctatgccatctgaagattggaaggtaataaagcacattgtttaaggacaagctgtaaagtcagactgacttggttcaaatcccatatctgccacttactagctgtatgacttgagcatgctactaaatcgctctgtgcctcagtttcttcatctgtaaaagacatgttaatggcatataacagtaattccacaagggtagcctctaagaaaagagagacaatgaccattgcaatgagtacaaaatggaaaaagaataacaaaattcatgtggaaagtaaaaaatccatccattggtctttattgtttttaacatcttcctttttaaaaatccacattcccagcaagaaaataaaagcaacttatcaggaacttaagtatatattactcagttatatgcataaatttttttgatcaagaaaaagcaagtaaataaatacccctactctcat

SEQ ID NO: 39687 - DNA, 572 bp, Homo sapiens
tgccccactgatataaatttaacaatttacaatgatcattgtaccatttttkataatttggatttaatacatttttaaaatgtgtttctcctaacccttagttgtccatctcgtctactttatgtctatttcttttttccttttttctatacttctgtactcccagtcatgttgctcttgttcccttttgtaatgtctttcacttttctcccctttcatagtttccatttttcaggaagaaagaatttcaccattgcccccagctaacttctcagttaccaaaccataagagtgttcattctttattgaatttatggggcacagctatacatgactcccttacatatcccatggaaatacttcaatgcgtcaatagtggatgaacagacgttactgttaactgtaattaccaaatctgacttgtcatccctagcatgcacttcccattatattcctttttaggccagcactatgtatgatattcttaagggtaaaaagaaagtagttatatcaattctaaattctgagtaattgccaaaagtaaattaggacatctttttattttaaatgct

SEQ ID NO: 39688 - DNA, 572 bp, Homo sapiens
tgccccactgatataaatttaacaatttacaatgatcattgtaccattttttataatttggatttaatacatttttaaaatgtgtttctcctaacccttagttgtcmatctcgtctactttatgtctatttcttttttccttttttctatacttctgtactcccagtcatgttgctcttgttcccttttgtaatgtctttcacttttctcccctttcatagtttccatttttcaggaagaaagaatttcaccattgcccccagctaacttctcagttaccaaaccataagagtgttcattctttattgaatttatggggcacagctatacatgactcccttacatatcccatggaaatacttcaatgcgtcaatagtggatgaacagacgttactgttaactgtaattaccaaatctgacttgtcatccctagcatgcacttcccattatattcctttttaggccagcactatgtatgatattcttaagggtaaaaagaaagtagttatatcaattctaaattctgagtaattgccaaaagtaaattaggacatctttttattttaaatgct

SEQ ID NO: 39689 - DNA, 569 bp, Homo sapiens
ttatatgtaatgtgtaaagtttctgcagtgaacatgtgttactgttgtaataaaaatataacaaacttgaaaaaatgcgatgttttatctccaacaaattagtaaagcagtggtattaagagagccgagaaattggccttttaaataagattttcaatcattttcaacaagaatcttccaggtaaaaattagtatgtaatttaagccatttaaactgagtctagtgatttcactaggaagcagatgttaattaaattgtttattcattcaacatatatttttgaatgcttcttaaaccgaccactgcacagtatacaaagatacrttgaacgtgggccccactgtctggagtttaacattcagaaaaaaaaggaagaagaagacatgtataaatacgtaataataataggatatgaacatgcaaaatgcaataaacaaagtagttataaagctctaactgagttctaaggtggagggactatgttcaaacgtggaagcattggaatcaaaaaatttcagtggacaaaatctatccatttgttgttagtctaaataaatatacttacaaa

SEQ ID NO: 39690 - DNA, 569 bp, Homo sapiens
ttatatgtaatgtgtaaagtttctgcagtgaacatgtgttactgttgtaataaaaatataacaaacttgaaaaaatgcgatgttttatctccaacaaattagtaaagcagtggtattaagagagccgagaaattggccttttaaataagattttcaatcattttcaacaagaatcttccaggtaaaaattagtatgtaatttaagccatttaaactgagtctagtgatttcactaggaagcagatgttaattaaattgtttattcattcaacatatatttttgaatgcttcttaaaccgaccactgcacagtatacaaagatacattgaacgtgggccccactgtctggagtttaacattcagaaaaaaaaggaagaagaagacatgtataaatacgtaataataataggatatgaacatgcaaaatgcaataaacaaagtagttataaagctctaactgagttctaaggtggagggactatgttcaaaygtggaagcattggaatcaaaaaatttcagtggacaaaatctatccatttgttgttagtctaaataaatatacttacaaa

SEQ ID NO: 39691 - DNA, 584 bp, Homo sapiens
cagatgcatgagtgagcctgagatcagcacaactgccaaatctagccccactcagttcagctaactctggaaatgtatgagaaataaacgtttattgtatgcttttgaggttttgtggctggagggcaacagctaaccaatacacagaattatattttctgttaaaaaaaaaacaaagatttacacttccctgatacttgtgactaagtgaaagacaaggttaggtcttgtgaatgaaagacatacttatggtacattcctattcttttttttttttttttttttttttawgaggtctctctctgttgctcaggctgaagtgcagtggtacaatcatggctcattgcattctcaaccttcaacctcctgggctcaagcaatcatcctgtctcagcctcccaagtagctgagactgtaggtgtgtatcaccacatctggctgatttttttaattttttgtagagtctgggtctcactatgttgccaaggctggtttcaaaatcatggcctcaggcaatccttctgcctctacctcctaaaagtgttgggattataggcatgagccactgcacccagcctcaatac

SEQ ID NO: 39692 - DNA, 584 bp, Homo sapiens
cagatgcatgagtgagcctgagatcagcacaactgccaaatctagccccactcagttcagctaactctggaaatgtatgagaaataaacgtttattgtatgcttttgaggttttgtggctggagggcaacagctaaccaatacacagaattatattttctgttaaaaaaaaaacaaagatttacacttccctgatacttgtgactaagtgaaagacaaggttaggtcttgtgaatgaaagacatacttatggtacattcctattcttttttttttttttttttttttttaagagrtctctctctgttgctcaggctgaagtgcagtggtacaatcatggctcattgcattctcaaccttcaacctcctgggctcaagcaatcatcctgtctcagcctcccaagtagctgagactgtaggtgtgtatcaccacatctggctgatttttttaattttttgtagagtctgggtctcactatgttgccaaggctggtttcaaaatcatggcctcaggcaatccttctgcctctacctcctaaaagtgttgggattataggcatgagccactgcacccagcctcaatac

SEQ ID NO: 39693 - DNA, 819 bp, Homo sapiens
gcggtttatcgttctagaaactgggaaaagtattttgtacgagaggacagtggaggttcctgctcagcatctgttctttcctgtggcctccagtctcagtagagaccctaggagaagagtttactgtgactggagcagaagagcaggctgcagttaacttggtccctggcagaattacagaagtaaaatgaggtcttcaggaatcactggagggaaatgatactgagagtggcaatagcaacaaattctgagcaggaaagcaataactcatggggatcaactagtgactgatttactcaacccatatgcagtgctctaacccaatgttgactctgctaggtaagaaagatggggtggggatggatgggaggaagaaatgaagaaatgagaagaacagtggtctctgtcctgaggaaccctcattacaatgggaaagataggatacatgcaggagacagatataaaaacaatacaaacctatcctgtgcttcacctgaattagagcagaaagtcgtagaattaaaaattgaggctgggcacgatgcctgatgcctgtaatcccagcactttgggaggccgaggcaggtggatcacctcagctcaggagtttgagaccagcctggcmaacatggtgaaaccccatctctactaaaaatacaaaaaattagccaggggttgtggcacgtgcctgtaatcccaactatttggaaggctgagacaggagaattgcttgaacccgggaggtggaggttgtagtgagccgagatcacgccattgcactcctgcctgggtgacagagtaagcgactcagtctcaaaa

SEQ ID NO: 39694 - DNA, 577 bp, Homo sapiens
cccctcacctggagttccaggagggagaaaccatcgtgctgaggtgccacagctggaaggacaagcctctggtcaaggtcacattcttccagaatggaaaatccaagaaattttcccgttcggatcccaacttctccatcccacaagcaaaccacagtcacagtggtgattaccactgcacaggaaacataggctacacgctgtactcatccaagcctgtgaccatcactgtccaaggtatgaggagtctgccaagatgtagggaggggagaagaggggatggacaagggctgaggtcacatgggcctacatggaggtctgagaaaggccacagcgcaaaattgggcactggagcaaagaggagtggtgtggaggcctggctaagtattgaccaatgagcaggagtaggggccagagcttggagccctcaggtgataggtgaccaggctgttgttccactttgaaatgcaggccccagactaaggacggcagcgaagcagagctccctcgttggtgcagaggttccctaagctcctgggcattcstaagaactgaggtttgcctttattcttctcat

SEQ ID NO: 39695 - DNA, 598 bp, Homo sapiens
tcaggatcagtggcctgagctttggctatgagcctaagccctgagctgactgctggatcctctgggaatagattttctttttcctctactctttcccagtggaytctccctgccttgtactcatatttccactgagactgagcagacttagtcatgctccagaaatagagagctgacacgagtctagagaaatttgcatgcaaatttgtgtgggctttggatagtcagagcctactagagactaatctgatatctaacttggtgccgtgactaatcttccttctctgtctcgctaccttctagtcactagaaacatataagtgttggaatgggcaggacatttgaattctcatcattgattctccagtgattttctattggccttcaaacaacatcccaccttctgtccccagttgcatcaccagtgaaaagggtggttgttgcactgacctttcccagagtgtacatgaaggccagctggctatcagacaatgacatgctttgacaggcccctgagctctgtgagtaaattcttgaacagctgagagtgctaccattttgtcatagccctaagggtgcagatgatgctgaaagcgtg

SEQ ID NO: 39696 - DNA, 598 bp, Homo sapiens
tcaggatcagtggcctgagctttggctatgagcctaagccctgagctgactgctggatcctctgggaatagattttctttttcctctactctttcccagtggattctccctgccttgtactcatatttccactgagactgagcagacttagtcatgctccagaaatagagagctgacacgagtctagagaaatttgcatgcaaatttgtgtgggctttggatagtcagagcctactagagactaatctgatatctaacttggtgccrtgactaatcttccttctctgtctcgctaccttctagtcactagaaacatataagtgttggaatgggcaggacatttgaattctcatcattgattctccagtgattttctattggccttcaaacaacatcccaccttctgtccccagttgcatcaccagtgaaaagggtggttgttgcactgacctttcccagagtgtacatgaaggccagctggctatcagacaatgacatgctttgacaggcccctgagctctgtgagtaaattcttgaacagctgagagtgctaccattttgtcatagccctaagggtgcagatgatgctgaaagcgtg

SEQ ID NO: 39697 - DNA, 525 bp, Homo sapiens
aacatactcatgtgttaaaattaatttctaaaacagaaagaataaagaaaagaatggtgaagtataagcagtaatacatgaagttgccggcattaaaatagctactcatatttaaaagaaaagaaaaaatgatgcaccaaaaatccttctacagtaatttgtaaaaatctgttyatctcctttagctaaaccctcagagaagtagaactactgggtcaaagggtatgaccctttaaagtccatattacttgttgccaaactgcttcccagacagaccgtatgaatttgcatgcctgcccatccgcagcatatgagagtgcctgtctcattgcactctcaccatgcagtataattctaaaaacagaatatttttcaattcactttgattttaaaaatatctgccatatggaacatttttcctttttttgtggagtggggtagatgctgtgaaatcaaacaataacaatgtgtcacaagtcttaaaaggatgaggacagctattcattagaggataagtaccagcat

SEQ ID NO: 39698 - DNA, 641 bp, Homo sapiens
ggttcaaaccctgattgtaccacttgctggttgtgtgaccttccacaagttacttaacctctctgtgcctcagtttccccatcagtaaagtggtgatattaacagtagctctctcataaggtggttgtgagcattcaactaaatgagttactatttgtagacagcttagaacagtgcctggcacatatgatgataagagtgattaaaatgttattatttttagattgcatagcactttgctactcataatgtgttttaatttacattaatttcattcactcccgaccaaaaccatgtgaatcaatcmgacccgaaactatagctttccttttatattaaaggcaactgagattcagagaacttgactttccagaaccccctgcaagtagccaagtgaccaggacaaagtctcttgactctactggcccacacagagctctcatctcaggaccctgccacattgcaaatcaggcatgaaagtaaaactaggcagcactaggcacagctgtaatcataccatggcctatggcgagaaatggaacaaacttcactccaggcccacacatcctgctttgcttcccagaacagacatgggcttggaatctttgtcctgttaagccgagatcactaggcattaagga

SEQ ID NO: 39699 - DNA, 641 bp, Homo sapiens
ggttcaaaccctgattgtaccacttgctggttgtgtgaccttccacaagttacttaacctctctgtgcctcagtttccccatcagtaaagtggtgatattaacagtagctctctcataaggtggttgtgagcattcaactaaatgagttactatttgtagacagcttagaacagtgcctggcacatatgatgataagagtgattaaaatgttattatttttagattgcatagcactttgctactcataatgtgttttaatttacattaatttcattcactcccgaccaaaaccatgtgaatcaatccgacccgaaactatagctttccttttatattaaaggcaactgagattcagagaacttgactttccagaaccccctgcaagtagccaagtgaccaggacaaagtctcttgactctactggcccacacagagctctcatctcaggaccctgccacattgcaaatcaggcatgaaagtaaaactaggcagcactaggcacagctgtaatcataccatggcctatggcragaaatggaacaaacttcactccaggcccacacatcctgctttgcttcccagaacagacatgggcttggaatctttgtcctgttaagccgagatcactaggcattaagga

SEQ ID NO: 39700 - DNA, 1732 bp, Homo sapiens
tctggaagaaaaccatcctactactatcaggtactgatgtcggtgggaacgaaacgcacttcctcctctgggctgcagagtctcagcctgtttgcacagttactcgttcctgactgtgaacctggagggaagggactgagctcatctcatsgtgagggccccagtgcccagcacttagtaggggcttggcaaatatttatagaatgattcaatgagtctgtgtcctagaaaatccagaagccgtttatattcacttttctattgcattggatcatttctttgcactaatttattccccaatttgctctgcttatgctaatagtacaagtttcttgaatttcctaaatagataccatctgggtcgggatgagagtcattgaaggaaatcaacacagaattgaaaattagctacagagtagctacaggtgggtaactgggaattctctatattatcattaatcacattcattacttaacccataagaaaatcccctgtgattaaccaaaactcttctgtctgtctctcatattcttactccaggtagagaaagggatccacagatggctgagtgatggccccaggacacactgtagctcagtaatgaagcaagggacaggcttccgtctttcaaatcttctgtcctctgagtcaggcttcctctgtgttctgcaatgttgtcccctttatatttaataattctcaaagtgtaatccctgatgtcgctgcaaattagcatcgctgctgtaaactaatcagtatgcaaaatgagcaaatccctcaggggcaagaaataaaaacatgcagggtagaatgttagaacagcactcagtgccaatggggattcaggtgtccaagatcacacctggaacccacagtgtcatacaggtctccatcggcaccaccccagtacgggaaaaatcttggccttttccatcaataatttaaaggaggataaaatccattcataaaataagatcctacatcacagaaaaaattagctccaaattgcacaggaaaaatgttttcattccattgacaatttttaccatgtgactgtttgaatgcatatttcaggaatattgaaaaaagaatgaagaaatcgtctaggtgtctgtggttcctgtgccggcttgttaaggggtgcacgcctgtgatgagcctacattgccacctccttcccagcccagcactcaggccccctgggccctctagtgcccttggcattgctcgagaggccaccttcagaaggctctgcaagtgagaatgttgacagggcaaggagaagccaggaaatccacctgtgagaaaatcctgcaccggaactgctagtgacagtgctgtggtttacgcatcttcacatgtaacacaggaggtccttctctgagacccctaatgttgttagagtaccagaaaaattgctttgtgccactgctggaatcgcagaattttagtctcagaaaggaccaaaactaacaaggccgatgttctcatcatcacagttagaaaaatgcggtcctgagggagtgccacctttcagatgactatttctggcaacaagagttgggtataactcttctgattaaggttgctaattgctgctccctactgatgactatcctatcaaatttatgtcatatgacttgtgtgtcccatctctccctctttgggaagatggtgataaagaaggggtttgggccagtcatagaaccaatgaagtgcactttacaccta

SEQ ID NO: 39701 - DNA, 1732 bp, Homo sapiens
tctggaagaaaaccatcctactactatcaggtactgatgtcggtgggaacgaaacgcacttcctcctctgggctgcagagtctcagcctgtttgcacagttactcgttcctgactgtgaacctggagggaagggactgagctcatctcatcgtgagggccccagtgcccagcacttagtaggggcttggcaaatatttatagaatgattcaatgagtctgtgtcctagaaaatccagaagccgtttatattcacttttctattgcattggatcatttctttgcactaatttattccccaatttgctctgcttatgctaatagtacaagtttcttgaatttcctaaatagataccatctgggtcgggatgagagtcattgaaggaaatcaacacagaattgaaaattagctacagagtagctacaggtgggtaactgggaattctctatattatcattaatcacattcattacttaayccataagaaaatcccctgtgattaaccaaaactcttctgtctgtctctcatattcttactccaggtagagaaagggatccacagatggctgagtgatggccccaggacacactgtagctcagtaatgaagcaagggacaggcttccgtctttcaaatcttctgtcctctgagtcaggcttcctctgtgttctgcaatgttgtcccctttatatttaataattctcaaagtgtaatccctgatgtcgctgcaaattagcatcgctgctgtaaactaatcagtatgcaaaatgagcaaatccctcaggggcaagaaataaaaacatgcagggtagaatgttagaacagcactcagtgccaatggggattcaggtgtccaagatcacacctggaacccacagtgtcatacaggtctccatcggcaccaccccagtacgggaaaaatcttggccttttccatcaataatttaaaggaggataaaatccattcataaaataagatcctacatcacagaaaaaattagctccaaattgcacaggaaaaatgttttcattccattgacaatttttaccatgtgactgtttgaatgcatatttcaggaatattgaaaaaagaatgaagaaatcgtctaggtgtctgtggttcctgtgccggcttgttaaggggtgcacgcctgtgatgagcctacattgccacctccttcccagcccagcactcaggccccctgggccctctagtgcccttggcattgctcgagaggccaccttcagaaggctctgcaagtgagaatgttgacagggcaaggagaagccaggaaatccacctgtgagaaaatcctgcaccggaactgctagtgacagtgctgtggtttacgcatcttcacatgtaacacaggaggtccttctctgagacccctaatgttgttagagtaccagaaaaattgctttgtgccactgctggaatcgcagaattttagtctcagaaaggaccaaaactaacaaggccgatgttctcatcatcacagttagaaaaatgcggtcctgagggagtgccacctttcagatgactatttctggcaacaagagttgggtataactcttctgattaaggttgctaattgctgctccctactgatgactatcctatcaaatttatgtcatatgacttgtgtgtcccatctctccctctttgggaagatggtgataaagaaggggtttgggccagtcatagaaccaatgaagtgcactttacaccta

SEQ ID NO: 39702 - DNA, 1732 bp, Homo sapiens
tctggaagaaaaccatcctactactatcaggtactgatgtcggtgggaacgaaacgcacttcctcctctgggctgcagagtctcagcctgtttgcacagttactcgttcctgactgtgaacctggagggaagggactgagctcatctcatcgtgagggccccagtgcccagcacttagtaggggcttggcaaatatttatagaatgattcaatgagtctgtgtcctagaaaatccagaagccgtttatattcacttttctattgcattggatcatttctttgcactaatttattccccaatttgctctgcttatgctaatagtacaagtttcttgaatttcctaaatagataccatctgggtcgggatgagagtcattgaaggaaatcaacacagaattgaaaattagctacagagtagctacaggtgggtaactgggaattctctatattatcattaatcacattcattacttaacccataagaaaatcccctgtgattaaccaaaactcttctgtctgtctctcatattcttactccaggtagagaaagggatccacagatggctgagtgatggccccaggacacactgtagctcagtaatgaagcaagggacaggcttccgtctttcaaatcttctgtcctctgagtcaggcttcctctgtgttctgcaatgttgtcccctttatatttaataattctcaaagtgtaatccctgatgtcgctgcaaattagcatcgctgctgtaaactaatcagtatgcaaaatgagcaaatccctcaggggcaagaaataaaaacatgcagggtagaatgttagaacagcactcagtgccaatggggattcaggtgtccaagatcacaccyggaacccacagtgtcatacaggtctccatcggcaccaccccagtacgggaaaaatcttggccttttccatcaataatttaaaggaggataaaatccattcataaaataagatcctacatcacagaaaaaattagctccaaattgcacaggaaaaatgttttcattccattgacaatttttaccatgtgactgtttgaatgcatatttcaggaatattgaaaaaagaatgaagaaatcgtctaggtgtctgtggttcctgtgccggcttgttaaggggtgcacgcctgtgatgagcctacattgccacctccttcccagcccagcactcaggccccctgggccctctagtgcccttggcattgctcgagaggccaccttcagaaggctctgcaagtgagaatgttgacagggcaaggagaagccaggaaatccacctgtgagaaaatcctgcaccggaactgctagtgacagtgctgtggtttacgcatcttcacatgtaacacaggaggtccttctctgagacccctaatgttgttagagtaccagaaaaattgctttgtgccactgctggaatcgcagaattttagtctcagaaaggaccaaaactaacaaggccgatgttctcatcatcacagttagaaaaatgcggtcctgagggagtgccacctttcagatgactatttctggcaacaagagttgggtataactcttctgattaaggttgctaattgctgctccctactgatgactatcctatcaaatttatgtcatatgacttgtgtgtcccatctctccctctttgggaagatggtgataaagaaggggtttgggccagtcatagaaccaatgaagtgcactttacaccta

SEQ ID NO: 39703 - DNA, 1732 bp, Homo sapiens
tctggaagaaaaccatcctactactatcaggtactgatgtcggtgggaacgaaacgcacttcctcctctgggctgcagagtctcagcctgtttgcacagttactcgttcctgactgtgaacctggagggaagggactgagctcatctcatcgtgagggccccagtgcccagcacttagtaggggcttggcaaatatttatagaatgattcaatgagtctgtgtcctagaaaatccagaagccgtttatattcacttttctattgcattggatcatttctttgcactaatttattccccaatttgctctgcttatgctaatagtacaagtttcttgaatttcctaaatagataccatctgggtcgggatgagagtcattgaaggaaatcaacacagaattgaaaattagctacagagtagctacaggtgggtaactgggaattctctatattatcattaatcacattcattacttaacccataagaaaatcccctgtgattaaccaaaactcttctgtctgtctctcatattcttactccaggtagagaaagggatccacagatggctgagtgatggccccaggacacactgtagctcagtaatgaagcaagggacaggcttccgtctttcaaatcttctgtcctctgagtcaggcttcctctgtgttctgcaatgttgtcccctttatatttaataattctcaaagtgtaatccctgatgtcgctgcaaattagcatcgctgctgtaaactaatcagtatgcaaaatgagcaaatccctcaggggcaagaaataaaaacatgcagggtagaatgttagaacagcactcagtgccaatggggattcaggtgtccaagatcacacctggaacccacagtgtcatacaggtctccatcggcaccaccccagtacrggaaaaatcttggccttttccatcaataatttaaaggaggataaaatccattcataaaataagatcctacatcacagaaaaaattagctccaaattgcacaggaaaaatgttttcattccattgacaatttttaccatgtgactgtttgaatgcatatttcaggaatattgaaaaaagaatgaagaaatcgtctaggtgtctgtggttcctgtgccggcttgttaaggggtgcacgcctgtgatgagcctacattgccacctccttcccagcccagcactcaggccccctgggccctctagtgcccttggcattgctcgagaggccaccttcagaaggctctgcaagtgagaatgttgacagggcaaggagaagccaggaaatccacctgtgagaaaatcctgcaccggaactgctagtgacagtgctgtggtttacgcatcttcacatgtaacacaggaggtccttctctgagacccctaatgttgttagagtaccagaaaaattgctttgtgccactgctggaatcgcagaattttagtctcagaaaggaccaaaactaacaaggccgatgttctcatcatcacagttagaaaaatgcggtcctgagggagtgccacctttcagatgactatttctggcaacaagagttgggtataactcttctgattaaggttgctaattgctgctccctactgatgactatcctatcaaatttatgtcatatgacttgtgtgtcccatctctccctctttgggaagatggtgataaagaaggggtttgggccagtcatagaaccaatgaagtgcactttacaccta

SEQ ID NO: 39704 - DNA, 605 bp, Homo sapiens
atggaaattctcacaattttttatctctctctcccccaacaacagaggttctctctccgtgacacacagctgctgctgtgggatgtgggagtggtggcatcagcaatttaagattgactttcctaccctcttcagtgcctgctttaatgacattcggttgaaaccaggtactgagtgctcacctgatttggggttcttatgaaagtgcttttctrtatagacagttgttaaatttggtgatcctttcagggcagggtgggtggtgtgatgatttgtgaagcctactattcagccatctttctcttcctatcaaaaactcttaatcttgaagaaaagagataataggtgtgagaaatgtagaatataatgctaggttgtccaaagataacacataccataatatgtttttccacacttattttcaaggattagttcacttaatttgcacagagtttatatagctcactagaagtcacagtggagacaatgacttcctcactgctcagaaaccactttccttgtttgacaagatgctacatttccaacaaggcttggaacttcaagtcatggatccatgtcctacatatagaacatttctcaaaggt

SEQ ID NO: 39705 - DNA, 727 bp, Homo sapiens
ctgttaaccttttatcagaaggattccttcaaagcattagtttacggcactaaaatgtgggcagattatttgccaaatcacattgttatgcacagctaactaactgctttgcaaaaactggtacctgtggatgcacagtcaatggctttgagtcaaatatgtcaatcattaacattttctctaaaaattaacaagtgcaattagcatgtawcaatgaaataattgcttgagttcactatttttttaagctgaatctccatttgagtcacacaaaaagaaaatgaatcttaaaatcatttccattttagcagaggcacatgttaaaaacagctgaacttatttttccctcctcaatttctgcaaaattcactcccaggtttacttactgtgccaagtttcagagctgagcaaatttttatggtctagttataaaccctagaaaaacaaggtttataggaaatgttgacacaaccttaactaaagtggtgctagctgacacctctatattttcaatttggggatttctactgggaaagtataaacgctaattcagcaaaggaagccaactataataaaaatgttgtagtcttcctgttcaccccatgaagttctacttcaaaagatgccagtgcaacgtggaggtgagttagagttagaatgatcagcatggagagcacctgcaaatcgctcagcctcctggttacctataaacttcgcctgggaatgc

SEQ ID NO: 39706 - DNA, 727 bp, Homo sapiens
ctgttaaccttttatcagaaggattccttcaaagcattagtttacggcactaaaatgtgggcagattatttgccaaatcacattgttatgcacagctaactaactgctttgcaaaaactggtacctgtggatgcacagtcaatggctttgagtcaaatatgtcaatcattaacattttctctaaaaattaacaagtgcaattagcatgtatcaatgaaataattgcttgagttcactatttttttaagctgaatctccmtttgagtcacacaaaaagaaaatgaatcttaaaatcatttccattttagcagaggcacatgttaaaaacagctgaacttatttttccctcctcaatttctgcaaaattcactcccaggtttacttactgtgccaagtttcagagctgagcaaatttttatggtctagttataaaccctagaaaaacaaggtttataggaaatgttgacacaaccttaactaaagtggtgctagctgacacctctatattttcaatttggggatttctactgggaaagtataaacgctaattcagcaaaggaagccaactataataaaaatgttgtagtcttcctgttcaccccatgaagttctacttcaaaagatgccagtgcaacgtggaggtgagttagagttagaatgatcagcatggagagcacctgcaaatcgctcagcctcctggttacctataaacttcgcctgggaatgc

SEQ ID NO: 39707 - DNA, 611 bp, Homo sapiens
gtaaactatcgcaaggacaaaaaaccaaacaccacatgttctcactyataggtgggaattgaacaatgagaacacatggacacaggaaggggaacatcacactctggggactgttgtggggtggggggagcagggagggatagcattaggagatatacctaatgctaaatgacgagttaatgggtgcagcacaccagcatggcacatgtatacatacgtaactaacctgcacattgtccacatgtaccctaaaacttaaagtataataataataaaatttaaaaaaattaaaaaaaaaagaaaatgttcattaaagctactggcttgccccaattataaactaaaaaaaaaaaaaaaaagaatgtgctagagctagggctgagcccagggctatggggctgcatggccaatgcttccttcaacactcctgtttttcacctcttggtatttggagagcctgcaggcctcctaatctgttcataagacgtggccaccttatagcgctagggtttttacagccaaggtggctggtacctacctgagtggctccaaaccttcagggcttcagcattgtcaggctggagggcttcttaataagggatcaccaacaa

SEQ ID NO: 39708 - DNA, 575 bp, Homo sapiens
tggcagatattgaaaacactattttgatattttatgcactttcttgggactctatttcagaggcagagcaataagggaaatattcctgacttagaattataaatataatgctaccatttgggcatatttayttcccaggcaatcaatcaggaaatgttaggaaatatattcagagtgtttcaaacatgattccagttaaatgagtaatctttcccttttctttccatatgttagataattttttaaaagatgaaatagtaaaagaattagtaaaatttagaatcttgaactcagattataaatataaatacgacagtcaatttttaaagaagaaatggctttaattatgctgaaataaatgatggtagtaaaaccaaatactgctcattatatttatatgcacaatatttaaaatacaactggcgattctaggactttctggcaactcttttgattttgtcaagataaaggctgaactagctggtatctagtctcttcaaccaggtcccaggtggtccagaccaagaagagtcatgcactgtataacaacattgcagttaataacagacacatga

SEQ ID NO: 39709 - DNA, 961 bp, Homo sapiens
aggggtgactatgttgtttcatcttcccgggagtggctttttggtgtgtgtttttatttgttctggaaagaggtcagaagcaaagaggaagtgtcttttccatcctagaacacaccaaatcaggaatgaaacctatgataattccagccagctggacccaagtcccctgcaacaaaactgtctcaccccacagtggacccactaaacagatggaagggcagaggaaagacatactgacacagaagggtcagaaaagggactcacacattagttgcacatcaggttgtcagtcaccactgatgagtcgctgctctggattctgtctgatctttcatggacataaacctggggctcttgtggctttgtcagagtaaatatcgtgttttttgcagtctggaggatggttgtatatactcagaagaccctggaaaccgtgagtccagagtggctggccaccccagatgagattattcttgatcccagatttcactgaaggaaaccaaagccaataggctgtttgggggctctgcacgtgcgcgtgcgtgcgtgcgtgtgtgtgtgtgtgtgtgtgygtgtgtgtacgcgcatgtgcgcctaaccggctgttcaaaacgtccttcggaggattcctgctttgagactccagccctgcaggcagcacgcagcccctccaccacatcctgcctctccacttcctcccctcctttcccaactccgaaagccaagatgggaagtctctcacgaccctgtggcttggcggggaagaggcctgaacttgatacagctggcttttctggggcctggtaagagcatttctccctgagtctgggcttcttcgcttacctatttttagacgtgtgctgcagacttttttgagggctcagacaggagtctctggcgaggctagtccacgccaggcatgagactcgtgcacagcaaggtctgctgcacacctgagcag

SEQ ID NO: 39710 - DNA, 800 bp, Homo sapiens
acctcttaaaatttcaggttccaygtacaaaattccaactgaatctgccaaatatgcaaagccccagtgaaaggtattagttttgacagtgtgaagttattggtagcttaacactctgaaaatgaagtacctatattctttggccaaatatctttccttgtgataacttggaaacttcaggatagaacatgagaactttgccatgagcattcaagttctcacaaagcaaggcatgtattctaatactttccatgggattgacaaccttgataataatatgaacaattctcttagattgccaggcagggttttggatgcttagcagtgaatacctgatttttttcctgtcaaattcctcactgtgaattccacattattggagcaatattaaatgcacattcttatcaagtttttaaaaaatttaattattttatttttttagaggcatggtcactgtctgtcacccagactggagtgcagagataacaatcatagctcactacagcctcaaccttctgggcttaagcagtcctcccacttcagcctcccaggtagctggcacaagtggcatacatacaacaccatgcctggctaatgtttttatttttttttgtagggacagggtcttgctatgttgcccaagctagtctcgaactctgggcctcaagttatcctcctgcctcagcctcccaacatgctgagattacaggcatgagccagtacacctggtcctgttatcaatttttaatatctcatttgtttggaagaatttgacagagcttaaagatatatcaggttta

SEQ ID NO: 39711 - DNA, 1235 bp, Homo sapiens
gggggatctggatgggagatgtattaaatgggctttatcaccactgtcaccaccattgtggggttttgtatttgactcccaactgagttgcagttgctttagaaatgtctccatctttgtattccaatagaagaatagttaaggaaacaaaataataataataactttaaaattgtgaatagtgcattacagttcacatccaaagtaaatgtgacctcccctgagatgccttactgaattcctaggagacatgttttcactttgtgctcccaatgcgtcttgtcacactttcagtgtagcacctccaagaaagtattgtggttgatgtttcatacctgacttcttagcagacagacttcttcaaggatggggggcttggcttccttatttgctgcgtgctactaggacctaagtcacagcaaatctcagtacactttaaaaatacttttttttttttttcccgagatggagtctggctctgtcacccaggctggagtgcaatgacgccacctcagttcactgcaacctccacctctggggttcaaacgattcacctggctgcctccccaatagatgggattacaggtgtccatcaccattcctggttattttttgtatttttagtacagatggggttttactatgttgaccaggctggtctcgaattcctgacctcaagtgatctacctgcctctgcctcccaaaatgctgggattacaggtgtgagccaccgcacctggtcaaaaaaatacttaataggtaataaatgaatgaatgaaggaagggaggaatggtgtttctgtattatgtatttgataaagggatgctatagtatacacttattatgataaaataaaaataaaagctgatcaatctaatggtaggaaaaaatatttgtgggatgaaatgtgaagttataaatgtaattaagattctaaattttcctaagagttcttttgtccctagaatcaacagtaaggagttagttgtattaacttgggccagcacctctgcagagttataaaactgattcaattaagtcttacctttctgtaagagttagaaaagaaaaagtgtttgaagatttttaaaagtatagaacaaacagttaccgtgtaaattctggagtattaggtgcttttctgggtatttcctccttcatactaaaatgttaatctctgagttatrcactgtaataatagattccactgaaaaaagtgtttctggcactaatg

SEQ ID NO: 39712 - DNA, 488 bp, Homo sapiens
atggccaggaaccccttgcctctggcctcctgagggtttcagctagtgggacacagcagcaggagacaggtgggtgggaggggaagagatcaggctatgcacccactggtgcctgccctggcctgggtttcccatctctcaagatggcgactctatagagtcaccagccagttatttggaattctagttacctccctgctgcctgccccatccccatttcttagggcctggggtagttacagctgcaaccgccactttgtaaatagaccctttgtatacaggccctttgtatataaactctttttttttttaaattttatttttatttatttatttattattattatactttaagttttagggtacatgtgcacaatgtgcaggttagttacatatgtatacatgtgccatgctggtgygctgcacccactaactcgtcatttagcattaggtgtatctcccaatgctatccctcccccctcccccca

SEQ ID NO: 39713 - DNA, 488 bp, Homo sapiens
atggccaggaaccccttgcctctggcctcctgagggtttcagctagtgggacacagcagcaggagacaggtgggtgggaggggaagagatcaggctatgcacccactggtgcctgccctggcctgggtttcccatctctcaagatggcgactctatagagtcaccagccagttatttggaattctagttacctccctgctgcctgccccatccccatttcttagggcctggggtagttacagctgcaaccgccactttgtaaatagaccctttgtatacaggccctttgtatataaactctttttttttttaaattttatttttatttatttatttattattattatactttaagttttagggtacatgtgcacaatgtgcaggttagttacatatgtatacatgtgccatgctggtgcgctgcacccactaactcgtcatytagcattaggtgtatctcccaatgctatccctcccccctcccccca

SEQ ID NO: 39714 - DNA, 488 bp, Homo sapiens
atggccaggaaccccttgcctctggcctcctgagggtttcagctagtgggacacagcagcaggagacaggtgggtgggaggggaagagatcaggctatgcacccactggtgcctgccctggcctgggtttcccatctctcaagatggcgactctatagagtcaccagccagttatttggaattctagttacctccctgctgcctgccccatccccatttcttagggcctggggtagttacagctgcaaccgccactttgtaaatagaccctttgtatacaggccctttgtatataaactctttttttttttaaattttatttttatttatttatttattattattatactttaagttttagggtacatgtgcacaatgtgcaggttagttacatatgtatacatgtgccatgctggtgcgctgcacccactaactcgtcatttagcattaggtrtatctcccaatgctatccctcccccctcccccca

SEQ ID NO: 39715 - DNA, 598 bp, Homo sapiens
tgttctgacttgcatgatgaaatctctcactgtcccgctttgtccttcccaggatgtcaactacctctgtccggtggatccactctctagatgctatcctccccttagtcacttagcagctctcttggttctcagattgaaagaaaacatagtgtamactggggctggtcctatccaaggtttcagtcaccacttcgagccttggaacgtatttcccttggggaaggggagattactgtaaattgttttatcttactattatgtgaccttagcataatgttacagatgaccactctttccttaaaatattattgatttttggtcttaatgtcacctctgtttcctgttcttcctgatactcccttgttctccactccatccaacttttacatgacattactcttcaaggactgctcctaggcccttgttttagtaagtcctctaacctcatgattgtgtcatgctattttccaccaagtagcaagatccatgtttttaaaaatttgaataagaccatagcattgtcctaattaaggcctcagtaaattgaagtacttttacagcctagagggcccggcttgacagcacatcctactat

SEQ ID NO: 39716 - DNA, 598 bp, Homo sapiens
tgttctgacttgcatgatgaaatctctcactgtcccgctttgtccttcccaggatgtcaactacctctgtccggtggatccactctctagatgctatcctccccttagtcacttagcagctctcttggttctcagattgaaagaaaacatagtgtacactggggctggtcctatccaaggtttcagtcaccacttcgagccttggaacgtatttcccttggggaaggggagattactgtaaattgttttatcttactattatgtgaccttagcataatgttacagatgaccactctttccttaaaatattattgatttttggtcttaatgtcacctctgtttcctgttcttcctgatactcccttgttctccactccatccaacttttacatgacattactcttcaaggactgctcctaggcccttgttttagtragtcctctaacctcatgattgtgtcatgctattttccaccaagtagcaagatccatgtttttaaaaatttgaataagaccatagcattgtcctaattaaggcctcagtaaattgaagtacttttacagcctagagggcccggcttgacagcacatcctactat

SEQ ID NO: 39717 - DNA, 591 bp, Homo sapiens
tgcaggtgctgcagtcaaatcccagagacagtgcaggatccagaaacaaagtgccagaagccgggatgctgacatagagatggaagaagagggaactacttggcatgatccctgaaagcagagtggggccttagactcatataatctggtgacagtgagtatcagggggtttccccgcaccaaccaattccccaactctccagacaccaactgggtgcctcacaattcatttgcgacactgatcacctaatgtaagcacagactccacaggttaagggctcagccccacaagatcacccacgcttcagccaccaaccaccaagagtggatctccaggttactcacrgttccatccaacttggcaacaaatctggggttctcacaaccccctcctcaggttcaacaatatgatagctcacagaactcagggaaagacttactcacatttaccagtttatgacaaaggacttgatagaataaacacatgaacagccagatgaagatcttgcatgtagggcaagctccagagggcgtgagcacgggagcttctgtccccatggacttcggtcgtgccacctttccagcacatga

SEQ ID NO: 39718 - DNA, 591 bp, Homo sapiens
tgcaggtgctgcagtcaaatcccagagacagtgcaggatccagaaacaaagtgccagaagccgggatgctgacatagagatggaagaagagggaactacttggcatgatccctgaaagcagagtggggccttagactcatataatctggtgacagtgagtatcagggggtttccccgcaccaaccaattccccaactctccagacaccaactgggtgcctcacaattcatttgcgacactgatcacctaatgtaagcacagactccacaggttaagggctcagccccacaagatcacccacgcttcagccaccaaccaccaagagtggatctccaggttactcacagttccatccaacttggcaacaaatctggggttctcacaaccccctcctcaggttcaacaatatgatagctcacagaactcagggaaagacttactcacatttaccagtttatkacaaaggacttgatagaataaacacatgaacagccagatgaagatcttgcatgtagggcaagctccagagggcgtgagcacgggagcttctgtccccatggacttcggtcgtgccacctttccagcacatga

SEQ ID NO: 39719 - DNA, 1247 bp, Homo sapiens
tgcattgcgtgaggtgcagcggggcttggtgcaggatctctgcccacctggcaccagtaggtgtaagaagggatggcacatattgtwggccacaacacaacaaggcctctatgcttgttcagttgagaatgctggccatctgattccctcatctctcttcaatcactccttgctgactgatggagatatgtcctttccctttccttcccagtgaaaattgccctggtggttcataggtgtggggtttcactaggttgaaaaacaaggaggaagggctcttatcccagattccaccaccctcctttccctcccatgcaattttgcattaacatatggatggtgcgcatgcctttcaagagctggacagatgctgactcttgcatttcatgcagaggacggggcaggaggggtgttccattttttaccttaccccactgcctagggccactccaccctgatgctagtgctgatcatctgttccttggggttttgaaagtggtggaaatctgttcatctggggtagaatgttcttctcttttctcatcagaatgaacactgatactatatcctttttgataatccaattcaactaattaatgatgtgtaaatttcctgtgtaggaaagaagccatcttgatcttgggtgtgactctcatcattgccgtcacacccaggtgcagagagagacagcttcccctccacacactctgaccccacaacaacctcctcacctgcttcagttcaactttgtccctggtgcccctgagactggacttttttgtttgtttgtttttactgttgcttctttggttggttattgactatgtcatcattgaagtccccaaacttgtcctgatttgcctccacttctcaggcacattgagaagaataagagggccagtgattaaaagggagatggagggaaggaaagtggctaaggagatggaagaataaaggaagaaaggatgtgattcaaaggagagaaggataaagaaaaaggaagaggcagttaaatctggggatgtgggatagtacacttctactttttgagctgaataagagctgtattttgacgaagttcacacttgttccctttacttgcccaagaacccatgatgtggcttcatcatgtgatttgaaaggctgaaatgcaaggttgttaatgaccagaatggccaacacacatatagccaggtttgtcttagagaccttcaaggaaattggcactaaagctggtggaggctgga

SEQ ID NO: 39720 - DNA, 1247 bp, Homo sapiens
tgcattgcgtgaggtgcagcggggcttggtgcaggatctctgcccacctggcaccagtaggtgtaagaagggatggcacatattgttggccacaacacaacaaggcctctatgcttgttcagttgagaatgctggccatctgattccctcatctctcttcaatcactccttgctgactgatggagatatgtcctttccctttccttcccagtgaaaattgccctggtggttcataggtgtggggtttcactaggttgaaaaacaaggaggaagggctcttatcccagattccaccaccctcctttccctcccatgcaattttgcattaacatatggatggtgcgcatgcctttcaagagctggacagatgctgactcttgcatttcatgcagaggacggggcaggaggggtgttccattttttaccttaccccactgcctagggccactccaccctgatgctagtgctgatcatctgttccttggggttttgaaagtggtggaaatctgttcatctggggtagaatgttcttctcttttctcatcagaatgaacactgatactatatcctttttgataatccaattcaactaattaatgatgtgtaaatttcctgtgtaggaaagaagccatcttgatcttgggtgtgactctcatcattgccgtcacacccaggtgcagagagagacagcttcccctccacacactctgaccccacaacaacctcctcacctgcttcagttcaactttgtccctgrtgcccctgagactggacttttttgtttgtttgtttttactgttgcttctttggttggttattgactatgtcatcattgaagtccccaaacttgtcctgatttgcctccacttctcaggcacattgagaagaataagagggccagtgattaaaagggagatggagggaaggaaagtggctaaggagatggaagaataaaggaagaaaggatgtgattcaaaggagagaaggataaagaaaaaggaagaggcagttaaatctggggatgtgggatagtacacttctactttttgagctgaataagagctgtattttgacgaagttcacacttgttccctttacttgcccaagaacccatgatgtggcttcatcatgtgatttgaaaggctgaaatgcaaggttgttaatgaccagaatggccaacacacatatagccaggtttgtcttagagaccttcaaggaaattggcactaaagctggtggaggctgga

SEQ ID NO: 39721 - DNA, 1247 bp, Homo sapiens
tgcattgcgtgaggtgcagcggggcttggtgcaggatctctgcccacctggcaccagtaggtgtaagaagggatggcacatattgttggccacaacacaacaaggcctctatgcttgttcagttgagaatgctggccatctgattccctcatctctcttcaatcactccttgctgactgatggagatatgtcctttccctttccttcccagtgaaaattgccctggtggttcataggtgtggggtttcactaggttgaaaaacaaggaggaagggctcttatcccagattccaccaccctcctttccctcccatgcaattttgcattaacatatggatggtgcgcatgcctttcaagagctggacagatgctgactcttgcatttcatgcagaggacggggcaggaggggtgttccattttttaccttaccccactgcctagggccactccaccctgatgctagtgctgatcatctgttccttggggttttgaaagtggtggaaatctgttcatctggggtagaatgttcttctcttttctcatcagaatgaacactgatactatatcctttttgataatccaattcaactaattaatgatgtgtaaatttcctgtgtaggaaagaagccatcttgatcttgggtgtgactctcatcattgccgtcacacccaggtgcagagagagacagcttcccctccacacactctgaccccacaacaacctcctcacctgcttcagttcaactttgtccctggtgcccctgagactggacttttttgtttgtttgtttttactgttgcttctttggttggttattgactatgtcatcattgaagtccccaaacttgtcctgatttgcctccacttctcaggcacattgagaagaataagagggccagtgattaaaagggagatggagggaaggaaagtggctaaggagatggaagaataaaggaagaaaggatgtgattcaaaggagagaaggataaagaaaaaggaagaggcagttaaatctggggakgtgggatagtacacttctactttttgagctgaataagagctgtattttgacgaagttcacacttgttccctttacttgcccaagaacccatgatgtggcttcatcatgtgatttgaaaggctgaaatgcaaggttgttaatgaccagaatggccaacacacatatagccaggtttgtcttagagaccttcaaggaaattggcactaaagctggtggaggctgga

SEQ ID NO: 39722 - DNA, 1247 bp, Homo sapiens
tgcattgcgtgaggtgcagcggggcttggtgcaggatctctgcccacctggcaccagtaggtgtaagaagggatggcacatattgttggccacaacacaacaaggcctctatgcttgttcagttgagaatgctggccatctgattccctcatctctcttcaatcactccttgctgactgatggagatatgtcctttccctttccttcccagtgaaaattgccctggtggttcataggtgtggggtttcactaggttgaaaaacaaggaggaagggctcttatcccagattccaccaccctcctttccctcccatgcaattttgcattaacatatggatggtgcgcatgcctttcaagagctggacagatgctgactcttgcatttcatgcagaggacggggcaggaggggtgttccattttttaccttaccccactgcctagggccactccaccctgatgctagtgctgatcatctgttccttggggttttgaaagtggtggaaatctgttcatctggggtagaatgttcttctcttttctcatcagaatgaacactgatactatatcctttttgataatccaattcaactaattaatgatgtgtaaatttcctgtgtaggaaagaagccatcttgatcttgggtgtgactctcatcattgccgtcacacccaggtgcagagagagacagcttcccctccacacactctgaccccacaacaacctcctcacctgcttcagttcaactttgtccctggtgcccctgagactggacttttttgtttgtttgtttttactgttgcttctttggttggttattgactatgtcatcattgaagtccccaaacttgtcctgatttgcctccacttctcaggcacattgagaagaataagagggccagtgattaaaagggagatggagggaaggaaagtggctaaggagatggaagaataaaggaagaaaggatgtgattcaaaggagagaaggataaagaaaaaggaagaggcagttaaatctggggatgtgggatagtacacttctactttttgagctgaataagagctgtattttgacgaagttcacacttgytccctttacttgcccaagaacccatgatgtggcttcatcatgtgatttgaaaggctgaaatgcaaggttgttaatgaccagaatggccaacacacatatagccaggtttgtcttagagaccttcaaggaaattggcactaaagctggtggaggctgga

SEQ ID NO: 39723 - DNA, 1247 bp, Homo sapiens
tgcattgcgtgaggtgcagcggggcttggtgcaggatctctgcccacctggcaccagtaggtgtaagaagggatggcacatattgttggccacaacacaacaaggcctctatgcttgttcagttgagaatgctggccatctgattccctcatctctcttcaatcactccttgctgactgatggagatatgtcctttccctttccttcccagtgaaaattgccctggtggttcataggtgtggggtttcactaggttgaaaaacaaggaggaagggctcttatcccagattccaccaccctcctttccctcccatgcaattttgcattaacatatggatggtgcgcatgcctttcaagagctggacagatgctgactcttgcatttcatgcagaggacggggcaggaggggtgttccattttttaccttaccccactgcctagggccactccaccctgatgctagtgctgatcatctgttccttggggttttgaaagtggtggaaatctgttcatctggggtagaatgttcttctcttttctcatcagaatgaacactgatactatatcctttttgataatccaattcaactaattaatgatgtgtaaatttcctgtgtaggaaagaagccatcttgatcttgggtgtgactctcatcattgccgtcacacccaggtgcagagagagacagcttcccctccacacactctgaccccacaacaacctcctcacctgcttcagttcaactttgtccctggtgcccctgagactggacttttttgtttgtttgtttttactgttgcttctttggttggttattgactatgtcatcattgaagtccccaaacttgtcctgatttgcctccacttctcaggcacattgagaagaataagagggccagtgattaaaagggagatggagggaaggaaagtggctaaggagatggaagaataaaggaagaaaggatgtgattcaaaggagagaaggataaagaaaaaggaagaggcagttaaatctggggatgtgggatagtacacttctactttttgagctgaataagagctgtattttgacgaagttcacacttgttccctttacttgcccaagaacccatgatgtggcttcatcatgtgatttgaaaggstgaaatgcaaggttgttaatgaccagaatggccaacacacatatagccaggtttgtcttagagaccttcaaggaaattggcactaaagctggtggaggctgga

SEQ ID NO: 39724 - DNA, 636 bp, Homo sapiens
caggcctggtggagagaaccaatggaataattaaaacacaattggctaagttcacagaggcattttccctcccctcattcgaagcactcaccctagtgctgcttacactctgatcaaccccttttggaaaacatcaattgtccccttatgaaattatagtgggaaggcccatgtatatgggaacaaacataacaaatccaacttttctcaagggagatataytgcaatattgtgagcgactttttttatcaccttaaaaaagtcaagatttggtaagaaattcctttcatagtgtgctccctgaagataaggcacctggtcacaatctgcagcccagaaattttgtctattggaaaagacatctaataaagaattcccttcaaccccgatggaagggcccataccgggcactattgactaatccatgtgccacagaattagagggtatagactcttggattcacatcactcatcttaaaaagtcacaatctcctgagctggctgtaacttccaccaaagaccttcacctcaagttcactaaacatcgacttttaacccaggattagaagcagatgacagctatgctattgtggactgcttaaacccaagatacaggaccaggcctgtatacaaaga

SEQ ID NO: 39725 - DNA, 2644 bp, Homo sapiens
accaaaaaatattgccttcattattttggcctagtgggatggaaacatcaagattcagggggtcttcattctcgttctgattctgctgtgctagctgtgagacagtgagcaactgagcttcagttttctactctgtaaaatggggattataataactgccctggtgatctcataaggcttgtggagggtcagatggcataaaagcttaggtgacaaaagatgaaaggcattactattcccagcatcacccactagtgcattcccattatctactaccccttcttcaccagtgttacttagtccacctacatgttccatctttggcttcaaattttaaaacagagtccatgagaatgtctgttaaatgaacactggaaaagagaaagaagacccattttgggtgattcatgacatcaccatttgaccctgaaagctgtgagggcagggatcatggttgttcaatttgctttgttttgtttatcaagagcatggtagaccctccatgattgttttttgaatgaataaacataactcctgacttccagtattagatcatagagtcgagtagccattctgtgctccatgagggtggaagcagcagtcaccatcagatgctggagagtacagcatttcaactgctctgcttaacataatacagaaaccaacctgtgtggagggagagaagtgactatagagaaataatttcaagttgaaatagctaaagaatattggaattatagcttttctgtttgtttggaaagaattgaagccttggaaaatccttcttcacttcccttcaagtgtcttgacattggagaagagggtggagcagctcatctcctcacagcctgctcatatctcatttctacaataagcacttacctccctcctccctgctttgcaatggacataacaattcactgcctacctgaagttaaaaaatggaattgctgctctgtatggccaataaattagcctagagagcatgactttcacctgccagaagcttgctcaagtgggcatttcttgaaaacagcaatggcttctgctgttgaagcagaggatggcaacatgcagctattagagggtttctcccctccgtaaccaatagtcatagagccctgagtcatgtgcagaaggacctcacctccaacctaatttccaagtgaccaggaatcaacagctggtcatcagcttccctctaagattcttatacagaaaaataaaaaaactcattttaatccagtatttcttaaaaattgaamaatttcacaaaatacttcaacaaatatttggaaatccataaaaatgcatacagcaacttcctgatttagaaaaaataatatgagtagtaaagcagtaagacaatgttcacctagaaaaaataagccttgactttccccttggagtacagtagggcattggtatatgatttttctatgccacctgctgcttatgtttctttcccagctactcacccccaattgtgttcaatttatcttttgttgctcccctttggaactgaacttttgaaggcagcggaactccaatctggagatcaaagttatttcttagtcttcagcatccctaactttcacatagcaatgattccaaaggatttcctcctttcccaaaacctactgactatgctattgtgaggaggtttttcctaattctcccacttctctatccatacctgtctcttcctttccaaacgtaccatcactcacttcttgcagaaccttgttgatggcggcttaggtggtcttctatccatatgcccctctccaactcttaactgagctgctagagaattttgttaatatttattatgatattaatagcactctgttgcttcaagaatattcctcattgctggcctttacctactgagctagaaacagattttatgtcatgaaaggtacatgacaatatggcttccccctgcctccccaccgcctcatgtgtcagtcaggactcctgtagttcttttaatatgtagtaagctctcccctctgtatatatttgctcaataattttccttagcctggaatgttctctccaacccccagctaccccccactaccctttctctaaatgtctgctgcattcctctctacctattcaccaattctgcctgttcctgaagcatttcctgattctttctccagctaaatccctttctcctttgagtccccagagctctgcctattctcctcttcttctgatgtccacctccattctgggcctgggtgtccctgcataatcacagtgcctctcctccaccacccactcaggatgagtccttctgtccaactctgaatcatctaagaggaatcaggatagtttgcacatagtagcttctcaatatgttattttaaagagaaatatgtgagtttatatgtaagacttaaaagttaaaatactgtctttgttttataaatgtaccctcattcctttcctgagagtttatatgaagagtgcccctaaagaataaaatgacagaggaaaatggtttaatatccatggatattattcagacctgaatgataatcagcagcctttcccttatccacagtcaaaatatgtcattgatttatctaataattatcaggttaaaaaaatcccaagttagttttggata

SEQ ID NO: 39726 - DNA, 2644 bp, Homo sapiens
accaaaaaatattgccttcattattttggcctagtgggatggaaacatcaagattcagggggtcttcattctcgttctgattctgctgtgctagctgtgagacagtgagcaactgagcttcagttttctactctgtaaaatggggattataataactgccctggtgatctcataaggcttgtggagggtcagatggcataaaagcttaggtgacaaaagatgaaaggcattactattcccagcatcacccactagtgcattcccattatctactaccccttcttcaccagtgttacttagtccacctacatgttccatctttggcttcaaattttaaaacagagtccatgagaatgtctgttaaatgaacactggaaaagagaaagaagacccattttgggtgattcatgacatcaccatttgaccctgaaagctgtgagggcagggatcatggttgttcaatttgctttgttttgtttatcaagagcatggtagaccctccatgattgttttttgaatgaataaacataactcctgacttccagtattagatcatagagtcgagtagccattctgtgctccatgagggtggaagcagcagtcaccatcagatgctggagagtacagcatttcaactgctctgcttaacataatacagaaaccaacctgtgtggagggagagaagtgactatagagaaataatttcaagttgaaatagctaaagaatattggaattatagcttttctgtttgtttggaaagaattgaagccttggaaaatccttcttcacttcccttcaagtgtcttgacattggagaagagggtggagcagctcatctcctcacagcctgctcatatctcatttctacaataagcacttacctccctcctccctgctttgcaatggacataacaattcactgcctacctgaagttaaaaaatggaattgctgctctgtatggccaataaattagcctagagagcatgactttcacctgccagaagcttgctcaagtgggcatttcttgaaaacagcaatggcttctgctgttgaagcagaggatggcaacatgcagctattagagggtttctcccctccgtaaccaatagtcatagagccctgagtcatgtgcagaaggacctcacctccaacctaatttccaagtgaccaggaatcaacagctggtcatcagcttccctctaagattcttatacagaaaaataaaaaaactcattttaatccagtatttcttaaaaattgaaaaatttcacaaaatacttcaacaaatatttggaaatccataaaaatgcatacagcaacttcctgatttagaaaaaataatatgagtagtaaagcagtaagacaatgttcacctagaaaaaataagccttgactttccccttggagtacagtagggcattggtatatgatttttctatgccacctgctgcttatgtttctttcccagctactcacccccaattgtgttcaatttatcttttgttgctcccctttggaactgaacttttgaaggcagcggaactccaatctggagatcaaagttatttcttagtcttcagcatccctaactttcacatagcaatgattccaaaggatttcctcctttcccaaaacctactgactatgctattgtgaggaggtttttcctaattctcccacttctctatccatacctgtctcttcctttccaaacgtaccatcactcacttcttgcagaaccttgttgatggcggcttaggtggtcttctatccatatgcccctctccaactcttaactgagctgctagagaattttgttaatatttattatgatattaatagcactctgttgcttcaagaatattcctcattgctggcctttacctactgagctagaaacagattttatgtcatgaaaggtacatgacaatatggcttccccctgcctccccaccgcctcatgtgtcagtcaggactcctgtagttcttttaatatgtagtaagctctcccctctgtatatatttgctcaataattttccttagcctggaatgttctctccaacccccagctaccccccactaccctttctctaaatgtctgctgcattcctctctacctattcaccaattctgcctgttcctgaagcatttcctgattctttctccagctaaatccctttctcctttgagtccccagagctctgcctattctcctcttcttctgatgtccacctccattctgggcctgggtgtccctgcataatcacagtgcctctcctccaccacccactcaggatgagtccttctgtccaactctgaatcatctaagaggaatcaggatagtttgcacatagtagcttctcaatatgttattttaaagagaaatatgtgagtttatatgtaagacttaaaagttaaaatactgtctttgttttataaatgtaccctcattcctttcctgagagtttatatgaagagtgcccctaaagaataaaatgacagaggaaaatggtttaatatccatggatattattcagacctgaatgataatcagcagcctttcccttatccacagtcaaaatatgtcattgatttatctaayaattatcaggttaaaaaaatcccaagttagttttggata

SEQ ID NO: 39727 - DNA, 1360 bp, Homo sapiens
gcattgttctaactacagctaatgcttctctcctttagtaggagtgatactgtgatgtcattaacagtgatcagatttaagtccgtgacaggtggcagaattcaagaactcaattcttcagtagcagtaaatctggacacgaaggtgcttgaaatacaaaggtcttaactgaaggacatcagagtcctatgatttggcatttgcacaaaktaagatgtgctgaataactcctgaattacttttcattactgcctatgttagtttcacatttatgactttaaagcttaaaatgtggctgggcatgctagagaaataaaagcatagaatgctgtaattactgaacaaagtggaatggataaagaattggtccaaaaggcaggcccagtcttaacttataagtagaaattcttccttgaccgagatattgctatactttcaattcattccctctatctctctttgcattttaaattttctctataaaaagtagattacctaggactttatagcctgtaaggccttttgcttttaccctcagtgagatgggagtcactggagcattttgagcaaaggggagggaggacctgctttaccttttaacaggattcctctcattgcattgatccctctctcactgctgtatgggaatcaaggcaaagaaagaagaccaatacacaggctattgaaataataataaagagatgacaatagcttagtccaaacaagatggaagcagtggacatagtgagataggaatcttatattttgaaggaagcattaaatgaatgtattgatggagcagatgtacattgtaagaaaaaaacccatgaatcccctgaaatcactacaagattttcagcattagcaactagaaggaagagttgctatttcctgagatggagaagacttgagagaagttgccaggagtggtgatagggtgttggagatagatcatgaatttatttgacttctgacacgtcaagtttgaaatgccttgacatcaagtaggcatgtcaagtagaagatgaatatccaagtcaggcattcagggtgcaactcaggcaagagacatgcattaaggaagctgcagtgcatctgtggtgtttaaaggcatgagacatgatagggtaagagaggagggaaagataagatgcaagctgagtcctgggcactttaacttgaagttggagaaagaggagaaatcaacaaaggagcaataaggagccacaaagggaggtggagtcctaagaaccaaatgaagaaggtttcaacaaaggacgaacaacccatgtgtctaaggctggtctcttaaatattctaaaccaattcacaaatataatcaaagtcttttactcctttc

SEQ ID NO: 39728 - DNA, 670 bp, Homo sapiens
atcacagcttcataattcctgcctcctggggtggttactcttcctggttgatatttcagtgggggaattccctgcatgytggaggactgattcctggctgatgtaaatgtaaactttattcatttattaaatgttttaataagctgaggggtgcaggaacaaagagcatggaccttggaatcaagcaaaactgagttcaaatctaggttctcacctccttgggcaagttaattgagcctcattttctattttagcataagggaaagaatattgaacttgctggttgttataatgattgattgaaataggtcataaggatccctggcctatgataagcaggatttattatcaatgttgtcagtagaaactatccactaggtgggtaaccatattgttgctctggcaacctgagcacttacccagtcttcatgtactcacttcacttatctaagaccttattttgggtggttcagggttgtctttgcccagtggagagggtggcagacccttataggggaggctagcatagattgaggctgcattgtgtaggatttggagaccatctgcctggctttaaagctggcctttctacataccagcttgctacctgtgtgacactgggaaattgatttaacctatcaaggctctgtttccctgtctgtaaaatgtg

SEQ ID NO: 39729 - DNA, 670 bp, Homo sapiens
atcacagcttcataattcctgcctcctggggtggttactcttcctggttgatatttcagtgggggaattccctgcatgctggaggactgattcctggctgatgtaaatgtaaactttattcatttattaaatgttttaataagctgaggggtgcaggaacaaagagcatggaccttggaatcaagcaaaactgagttcaaatctaggttctcacctccttgggcaagttaattgagcctcattttctattttagcataagggaaagaatattgaacttgctggttgttataatgattgattgaaataggtcataaggatccctggcctatgataagcaggatttattatcaatgttgtcagtagaaactatccactaggtgggtaaccatattgttgctctggcaacctgagcacttacccagtcttcatgtactcacttcacttatctaagaccttattttgggtggttcagggttgtctttgcccagtggagagggtggcagacccttataggggaggctagcatagattgaggctgcattgtgtaggatttggagaycatctgcctggctttaaagctggcctttctacataccagcttgctacctgtgtgacactgggaaattgatttaacctatcaaggctctgtttccctgtctgtaaaatgtg

SEQ ID NO: 39730 - DNA, 1413 bp, Homo sapiens
  misc_feature (1)...(1413): n = A,T,C or G
atagtgtgattattgctgatttttaaaaatatttacttaactacattttctaaatttcctacaattactgtggattgcttttataatatgaaaaaatgtgaatgttattttttaaactatcaattccacaaatattgagggaggagctgtggcttggcaggagtcctgtgaaaagatccaggggttttattgaaggcaggctcaatgtgagccaagatcatgacacagcagctagaaaacaaaacaaaacaaaacctcaacagatcactggaagcaatggcctcagtgttctgcatgggtcaggcctctgctggaacataagccacattttattggagaaaataataaactagaaagtgtttgctgctgggaaaccaagatagaaggagtctagaagtcaagttatatgaggaacagttaggagaaaatggacatttttagcttggacttctttagaaaaaccagaaacctgtgatagctatcttcagcattgggaaatgtgaaatgtggtcaannnnnnnnnnnnnnnnnnnnnnnnnnnnnnnnnnnnnnnnnnnnnnnnnnnnnnnnnnnnnnnnnnnnnnnnnnnnnnnnnnnnnnnnnnnnnnnnnnnngaaacctgtgatagctatcttcacccttgggaaatgtgaaatgtggtcaagacagcatcgatttacccatttttcttgtagaaagccagaaagcaccattcatagcaacatggaaggagaccccactttcatataaaacagggatttaataatactaattcatgcaatagttattagtgggttaccttgtgcatgggaaagttctactttatgagaaatctttgggcagagactgttggcagcctgtttcaggtggatgtttaggtcagacaaacctgaatgtgccctccaaaacctgggcttctctcttcctttgactgggttcaggatactgacaactatccaaatgcagaccattgggatgtagccaggaaacgtcagctcctgtcaactttcacgaagacgtgaagcacgactgccaatggttactctgcctcactctccccaaagtcattttcagtggtaaggccaaacccagagcgttttccagaaatccacrtaagtgcaaggaacatcagctatatttgtgtggaagcgtggaagtgctgtcaacactcctgtggggaaagggctcaggaactcacattccgttaagccagggtttatattagccatactgccaagaaagcaatagtccccaggtttagacagcattcgatatttgcttcggtgatcagaattcagacttaatttaaacctatatcttcaaatcttatatttttaagtttctgggtcctgtagccaagtagtctgtccttgaatgaggacagatctcaaagctccctgacggattaccaat

SEQ ID NO: 39731 - DNA, 636 bp, Homo sapiens
  misc_feature (1)...(636): n = A,T,C or G
ttctttgtaataacagaaaatgaagtttaataaaaaggaagtagtttagtaagtgttggtgcttcctcactgtagaattgaatgaggagctaaaaagaatgaggtaaggccaggtgcagtggctcatggttataatcccagcactttgggaggccgangcgggaggattgcttgagcccaggagtttsattccatcctgggcaacatggcaaaattttatctctacaaaaaatacaaaaattagctgggcatggtggcacacacctgtagtcccagctactggggaggctgaggtggtgagaggatcatcttagccctgggaagttgaggctgcaatgagctgaggctccaatgagctcagtctgggtgacagagtaagagcctgtctcaaaaaagaaaaaaaaaaaaaaagcagatgaggaggaatatgagaaggaaacccaggaggactgctgggaccagcctggagggaccagtacttggggtcacagagttggaatggcatccatggcagagttgtgatctctctccaggagagatagcctgggctcagacagggagatatgaagatgaactcattgaagtttggggatttgccaggccaatgaggggcaagggaactgagatactgaagag

SEQ ID NO: 39732 - DNA, 560 bp, Homo sapiens
ctgggtgcagtgactcacgcctgtaatcctaacactttgggaggccaagcagatcacttgaggtcaggagtttgagaccagcctggccaacatgacgaaaccctgtctctgctaaaaacacaaaaaatcagccgggcagygtggtgggcacctgtgataccagctactccggaggctgaggcaggaaaattgcttgaacccatgagccggaggttgcagtgagccaaggttgcaccattgcactccagcctgggcgataagagcaaaactccatctcaaaaataaaacaaaacaaaaatacaggctcaggtgagattccctgtgggcccctgccctcagcttattttaatttgtatctttttcctgcaataaaccataactttgattataaccactttcagtaagtgctgtaggactttctaacacctgaatgtggtcttggagacccttgaacctgcaactggcatcagaagtggaagtggttttgaggaccccaaactttgtagtttttctacaatgtcatttaatcctcaaaaaccaaagaagcgggtgttagtccc

SEQ ID NO: 39733 - DNA, 560 bp, Homo sapiens
ctgggtgcagtgactcacgcctgtaatcctaacactttgggaggccaagcagatcacttgaggtcaggagtttgagaccagcctggccaacatgacgaaaccctgtctctgctaaaaacacaaaaaatcagccgggcagtgtggtgggcacctgtgataccagctactccggaggctgaggcaggaaaatygcttgaacccatgagccggaggttgcagtgagccaaggttgcaccattgcactccagcctgggcgataagagcaaaactccatctcaaaaataaaacaaaacaaaaatacaggctcaggtgagattccctgtgggcccctgccctcagcttattttaatttgtatctttttcctgcaataaaccataactttgattataaccactttcagtaagtgctgtaggactttctaacacctgaatgtggtcttggagacccttgaacctgcaactggcatcagaagtggaagtggttttgaggaccccaaactttgtagtttttctacaatgtcatttaatcctcaaaaaccaaagaagcgggtgttagtccc

SEQ ID NO: 39734 - DNA, 761 bp, Homo sapiens
agagttttttaaagatacactcatgggtaatggggctgacttttgtttaggaaatgttgggaggtttggcttatatttttggcccattgaagtcatcataatgggaggtaggtgccaggcctgactggaatgactatggggtgttccaagatggcaattcatctctttttaggaccactgctgtcttaaaaaccaattttgttttgttttcctattgttactttgaagtactttgactgcgcctggtttgacatacagaggaaaggtaagtctggtggcctctcttgatgaaatactgttgtgtcaaacccctatctactccaatggggatagygccaggatcaagaggcagaagaagagacccagagccagcaaatgagacatggggtttggctgggggcttacatacaggagacagagtccagtgatggtgggctggacaagataactgcaaagtgcagtggtggccggctggacagaagaaccacaactgattgcaaaaggcatgcagtttacatatctttttcacttagcatcctttccctaataacctccacctggcaaccttcactcaacccaaaactcagggcctcaagctgctgtacagcccatgtttcacaggatggtctgggggctcagatgttcctgacagacaaggaacgaatctcctggttggccacttccagattccctagctcagaacacacattcaggtgcatttgtcatacaagttcattctcagggtatgctttagttattgc

SEQ ID NO: 39735 - DNA, 675 bp, Homo sapiens
tgcttaggaaatttggatcatctggttcttatcacagctgcactgttgggagatatgatgaactgccagtgacacagtgcatggtctttcagaggccactgcatgaagcctgtcccttgctactgaagagaaaagtcaattctgtaacagggtgtaaaagctatacaggccaaggaggacttttgggtacctgtctcccttttgctttctcagcatctatgcacacattccagtgcgcttttgcgcattcctgttaaggcgmctaactgcactaagcctggagagttgatggtgagggaaaactggggtttcttaagtacctgcatgccaggaagcatgccaggatttagacaaatgatcgtatttaatcctcacaatgacccaggtcaggtgagaattttttttccttattttacaaataagaaaattgaggctgtgaggttgaacaacctgtatcatgctgcaggagaaagagcacagactttagagtgagacggactttcctagtcatatactggtaaacttgaacttagacatgttgtcagatctcgttaagccagagtttcttcatgtgtaaaatgggaacattggccgggcgcggtggctcatgccagcactttgggaggccgaggcgggcggatcagctgagggcaagactttgagaccagcctgacc

SEQ ID NO: 39736 - DNA, 423 bp, Homo sapiens
ctttggtggatgtatttgttaggctgggagtgctcagaagttgataatgatagacaagccatggaaaacttctgtcttggttcatactaaaatctttttgcactaggacaaaacgaaacttctgctgcaaacatgagcctcctctcttctttagccaaaagttcaccagggttcaaacaatttcttaatggattccagcaagattytgtggggctataagaaatgtttctggtttgcagcgtagaggaatgtgtcttgcacagtaccagcactggaatcaggacccacctggattcaagccccagactgggcttctaatctggttctgattttggggggacttggcagcctgcctttattgttccagggtattgctgccattctttaattcagagctcacatctcacctcctccatcaaccct

SEQ ID NO: 39737 - DNA, 821 bp, Homo sapiens
ggttgggttctgtgagcgtctggtcacaacgttttcatcagctgaaacaccatttgtgttacagaggtttgtttatcaacatcctagtagaacacgcaggtctcatcagcattgagaacctgcccttccacataactcttttcttgtatagcactcagcgggtatttttacaattctcccacagcctcctgatctgcaaaactcgcctcgcctgccctgcaggtttaacctttttcacattgtatcaccttctggaacatgagagccagtcagcactagctgagaagggcttgacatgttcctgactgtaaacttctttggctttcagactcacaacaatgttgctaccacgctttttgaaaaaaaaaaaaaaaaaaaaaaaaaaaaaagcatttattgtcagtctttgcattgctgtaaaggaacacctaggctgggtaatttataaagaaacgtttatttggctcttggttctgcaggctgtacaggaagcatggtgccagcatctgcttctgctaaggggttcaggctgcttccgctcatggcagaaggcgcaggggagccagcgagtcacatggtgagagaggaagcaagagagagaggaggagatgccaggctctttttaacaatcagttctcatgggaactcagaagagcaagaactcattcaytactgcaaggatgactccaagccattcatgagggaccagattccataacccaaacaccgcccaccaggccccatctcccacactggggatcacatttcaacatgagacttggatgggacaaacatccaaactgtatcagacatcatctcac

SEQ ID NO: 39738 - DNA, 494 bp, Homo sapiens
tcaagcttctgtgatgtacaaacattaaccactgtgcctggttaacaatgcggattattatcctcctgtctgtatgaattgtccaaatatgatccaaygtggtgatgaatgtagagtggatggggaaaaaaggaatgaaatgtaagaaaactagatcagactttactagtagcattagcaatggcagaagttctctgagggcggagcatgaagaattatgaatcagaaatatttcctccaaagtgaaagagaataagccaaagccaccagaaaactcatgaatggacatttcagaggagccaaataacctccctggcaaaacaacctgactttcattcaactggtggaaataatattttaattgctagaggtttttttttaattatatttttgaaaaatttaaagaggttataatacatacatatggttcaaaaacctaagaatataaaagatattaaggtgaaagccccccacagcctgatcctgtttacaca

SEQ ID NO: 39739 - DNA, 494 bp, Homo sapiens
tcaagcttctgtgatgtacaaacattaaccactgtgcctggttaacaatgcggattattatcctcctgtctgtatgaattgtccaaatatgatccaatgtggtgatgaatgtagagtggatggggaaaaaaggaatgaaatgtaagaaaactagatcagactttactagtagcattagcaatggcagaagttctctgagggcggagcatgaagaattatgaatcagaaatatttcctccaaagtgaaagagaataagccaaagccaccagaaaactyatgaatggacatttcagaggagccaaataacctccctggcaaaacaacctgactttcattcaactggtggaaataatattttaattgctagaggtttttttttaattatatttttgaaaaatttaaagaggttataatacatacatatggttcaaaaacctaagaatataaaagatattaaggtgaaagccccccacagcctgatcctgtttacaca

SEQ ID NO: 39740 - DNA, 633 bp, Homo sapiens
ccgggggcacttaaattctgtctgaacaaagaaccctttaaggatctgatgaaagctaaagcaaagcgcgtgcacacacatttcccacgtgccttcatggagccccgtgcccgccagatgaagagcttccaggcaggaggtgaaccacagaggcacagaggcctgggtggacccacacccgggagaatggggatggacactcagcacaggccaagcatcctgaattcacggccattggaggtgggacatggagcaaagcccgcaacttcccctctgctccctcccttctggtgggcatcgggagatggcccaaaaggaggtttagaaagagcacaggaagagccagttcmgccaggcaggcctggaaatcaggcagggagaagcgcgaagcccacgccagcccaagagcgcctctcacctctggatttagtgagttattctctgaggactttgtggataacaagatgtgggtgaagccatcctgcttcctgaccacaatatctctgtatctgtaggcactttctgtttgcctcacgctgaaacgcaatcgcttgtcaaaaggctggtctcttctgtcgtcaataaatttccttttgctggcagtcactcctgtaacagatgtctgtatgttgg

SEQ ID NO: 39741 - DNA, 690 bp, Homo sapiens
  misc_feature (1)...(690): n = A,T,C or G
ttcaaaaataagtatctagaagcctgaggaatatattagtaaacagctaattaaattatccctgcagtcacatgaataaggtcactattgatgccaaagggtattctntagacccgagccgcggtttancacccgaagccnnnnnnnnnnnnnnnnnnnnnnnnnnnnnnnnnnnnnnnnnnnnnnnnnnnnnnnnnnnnnnnnnnnnnnnnnnnnnnnnnnnnnnnnnnnnnnnnnnnnaaagagagatctgagctggcaagctcttgacctcttgccatgtgatgtcctccaccatgttatgatgaggaagaaggccctcaccagatgccagcccctctcccttgggcttcccagcctccagaaccatgagctaaataaaattccactctttacaaattacccagtctgtggtattctgttatagcaacaaaaaaatggactaagggcwattatggttcttgctataaaaatgtggggaaaagcaagagagatcagattgttactgtgtctgtgtagaaagaagtagacataggagactccattttgttatgtgctaagaaaaattcttctgccttgagattctgttaatctatgaccttacccccaaccccgtgctctctgaaacgtgtgctgtgtcaactcagggttgaatggaataaaaacggtgcaggatgtgctttgttaaac

SEQ ID NO: 39742 - DNA, 554 bp, Homo sapiens
ccgtggggagctggaatgacttatctcactgccaattttggaagagcaactagaactagayatgcactaccctatccttcctctcctctggctcttaggagccagccagtccaagagagcatgtgttctcaactgctctgggttttacaggaagcttagtacaggatctattctcacatccagaggcctgtaggtgcctggatgcttaagtctttctaactctgggggttacatatttaggaggcccagggtttgcagatataagccacattctccaatatcagctttaactataatgaaagtaatatttaccaccctctgccttccttacccctttgtccaatttaccaattggttcagattttggacagtcaaagggggtactagttcttgatctccattcaaaagccctaacataaaccccaatgttgctactgccagaccagatacaagggtgatgtgacccttggatccactggggatgcattaagcccaaacagcagcactctcttgtcctctgtgatacagagaatgagttatgagatctagatctg

SEQ ID NO: 39743 - DNA, 838 bp, Homo sapiens
cttatccccaaacaataagagaagttgccagaacatattcagtctttccagagcccaagctccttcacaatgggatagatgctattttcaggctgggcrtggtggctcacacctgtaatcccagcactttgggaggccaaggtgggaggatcacttaagcccaggagttcaagagcaacctggacaacatagtaagaccctgtctctacaaaagaattaaaaattagctggccgtggtggcgcacaccaagcctccttactcaggaggctaagcctgggaggtcaaggctgcagtgagccacgattgcaccactgcgctccagcctgggtgacagagcaagatcctgtctcaaaatgaataaaaattaaaaatcaaatgaaaaaaaaggattccattctctcctgattactctgatgatacctcattgcacatctccagcacataccatctgctaagctcaggagcaccctgtgactctgtccagatgtcccataagcacctgcatccacatgcattcctaatggaggtccccacctcccccagctctgaggcctgtgtctcctcctccagtcccctttctggccaatggcaccatcacccaccagtctctcaggtctcaaagtcaccctggacagctcccatctcctcactcccagaaccacatccttccagttgatcctgcctcctaccaatctaggcaaataatagtttcacagtaacgacccctgtgagaccatgaacttctcaaatacaaccatgttgattgatttctcctgtctcctctccctaacacaatgcctagcacagtgtttttgaccataactcacagtgagaaat

SEQ ID NO: 39744 - DNA, 556 bp, Homo sapiens
ctctctctctcaaagattttagccaggcacaaatgaatcactagcaattcagtatgtattttgcagcaaaattcaacaacttaagttgctcctttaaactctgcaaatatttcaggatttcaaaattcagggtggatttctcatggaattcctgtctgaaatttcttaaggtaatttccatatttgattatccaagttatttaaaattacattgggcctartttgatctcattttctctggatctagcctactgttacaaaaattatgatattaggaacaaggcaggaaggaagataagtagttagccagaagtcacttgggagagctaatgattttaaagacagtccagggcttaggaattcaggaagggtggaatcccttatttatggttttagttaatcctaatttcaattcagcctggcaacttggatgatactagtaggatagaatcaaagcagtattttcatccacatcacttcatcatgtttcataattacctgttgataaattcccaaaacacaatgatcacagttgagacaaccagcattgacagaa

SEQ ID NO: 39745 - DNA, 449 bp, Homo sapiens
gacttctatttcctccttccttctggctgaaaaatgtcaaagtctggagcaaccatggaattcatgagttaggaagatggagtttctctgctagccctagaccctcccctatggtctcctacaggaagaagaagtatttaatgtcaataagttctcagtctgaattcctactttgccaattactagctgtgtgacctcaggcaagaaacaacttctctaaacctatttcttcatttataaactaagcaaaacaacatctatttacagggtgttctaataattaaacttatgtatatataggaatttttaattatatgaagtaaatcacagccattatttcatctgtaagaatttcagttgtgtgttactaaaagatgagaacttttgctaaaatacaaccatgataccattacgamagtccctcaaattgacaaaaaaattcttaaaat

SEQ ID NO: 39746 - DNA, 631 bp, Homo sapiens
caacctgatcccatcaggcagggaagcttccagtcaagctgaatgctgtgtgtggcaatttgaactttgtttcctttccccccgtgtggaatctatatttcctccacatgtgaatattaacccatggggttaacccacctcattgctgggtggaggcctcttctcttcaatgatgtgactcttgaggtcttcagtgtcttattttacttatttctgggagttcagaaattttaggccatttttggctaaactcctaggcaatatgtcaaagcagaagaaagtcccatagtaatcctaggtgtaccatgaaaggcactaagctaagaggagataacagaggctccccatggttgatagagaaaagtctaaagctcttaagattgctaaaataaaattcagagaaagagactaacttaatcgagtgattattgtgtgacatacaccctctcctttcattctcctgttaacttgcgttaatagatattatcttcaggttacaaatgataaagttaagattgaaataaacaaattttcctaggtacacggatcagatccaggcctcctgaatcctgaatcatcttttcttgtgtcatgagtccmaaaaaaaaaaaaaaaaaaaaaaaagcccaat

SEQ ID NO: 39747 - DNA, 811 bp, Homo sapiens
tccattaactctgttctctgtaggataaatatcattgtccccacatacagatgagaaaagtgaggcactgggaagttatatacatgtcttctaatactacagagattattactggttaggagggaatttttatcttttcagatccccaagtccacgaatttctactttcatgttattttcccttatactgaattatagcagtaccacaagtaccaaaaaacaaacaaaaacaaagcaaaacaaaacacaacagcaccttaacttgggtgagaaatatcaccaaatggaaccaagcgctgtccaataaagaagtctagagtctgtttttaagcaaccaattttgcaaaggttctcagtgtgtccaagaaataagacaatagaaaagtagatctatatatgtataaggcaatctctctctctctgtctctctttgtgtctctctctctctttcccttactctctccctctcatgcccctccctcctgctccgatagccagcttggttcatttatttattttccatgttctggacacctttgatgagccacccagcactgactcagcggagctggaccttcacttggggcccagttctcggcagctgctgcagctctgcgtttgcctacagcgatgtgccagctgtytctgactgcattacaccacagtaatgtgaacaactggaagcaataatgtgtctccccatttgcctaacaataccaacatggacaataactcagaagactgaagatttgtgctgtaatttaataaaccccatgcacatttctacaattgagtatcacatctgtgcaat

SEQ ID NO: 39748 - DNA, 1626 bp, Homo sapiens
tggaaaagtttttaggacccacataagtcatcatgctctccagggattttcctctcttcttttaagacagtcattcagaaaatactaacagagcatctactgtttgggtacaggcaaaagatactgcattctaggagtttgtggtctgtctgaagatgctgaactcatgtatcctcattttattttccttttgaaatatgctaacttatgcttctcattctctaagctgggaactttgcgtcttttggggaggcaaatagaagatataataatctcatgcatgttaatgttggaatcatagagaatactccaaaggcctcctatgtcctttgaggtactgggagcagttgacaggtgacctctggagacaatctcatggcttgtgttcaggtaccatcttccctgagttgttaaattcccactacaaaaaatgaagagacctacatgaaacaagttaggaagatatttttaagaggcttatactcttcctatttaattgtctggtgctggatcacaaggtaactttttaaatttgattttatatatttatataaatgatatacattatataccggtgtgttttacacattgaattagtcaaagtcatatctgctttaaagttctctgtatttactgagactcattagagaaagagatagttgaaatgctatgaaaaaacacatcagcattacaagtacagctagcaccatttttcattcagtataatgctgttctgattggaaatccataatctgctgttaaccctgaaattttccttccaaccagtggacaaacaaaatgatcttttttctctttagaattactgttctctggagcctcctatcctaaaatgtgcagagtttaactctttattcttatcacaatgtattgtgcctgcaagaatgttgcaagatttaaaggcccacagtagacagatgtctttcaggggcttaagctgctgctgctcattactttgcacacatactttattcaatatgaggaagaagatttgggggatcttctctcaatacttaccattccaagactggatcaacatatcctgacatttggtaaaatatgtcatttattctgtctctgttgcatctctaggacttgagaattcaaagtacccacctgggaggtgagtgggggctggaatccagctttcactccccaagttgtgtgccctgcatgatgctgaatacactcagaggaagggccatccaattctaatttgcaccaaggcatcagatcatctgctagcagacctgtgcaaagcaggattcacacaaaccaagcttaggggaccaattcagccttcatgcttttagatgctcccttgccttcctaagcacatagctcattcttgccatctgtagaatcaggcctcaaataaatccatgacatctcttaatttcaactagtttggaggagtacaagtttttatgttgcccttacatttgaaactctttttgatggcttgaatttgctattacagtatggcatggcttatccatattccgtagcatttcaagtttaggacaattagtgcagtatagctagcactaggttagatgctactaggaatggaaaaagaraaagaattgtaggcatgtatgtctatat

SEQ ID NO: 39749 - DNA, 855 bp, Homo sapiens
agtgtgaccatttggaccatgagaaccagttagttcaagttgatgacttgttataccagactgaccagaaagtttagtcaaaagggtggaactagttgccacaaggagatgcgcagaaaagttctgcttctgatgggaccaacatgctttctttttctcaaatatagaggtatcagatcacctttatagtaaaatgttaaatgtctatagtaagaaggaagaagattgaggagaagactctccctgtgtcctatgatgtctttgttagtgtgatctgagtacttgtctacatgggtgcaaaggaatgggggtgtaagggttagaaagaagacagaacatgctccctatttcagggagtctagggtcaaaagaagtaaaacatttacatgtaaatttactaactaatgttaattatcattgagaggcagtaaagaatttttcagaaggaaaaatgcaaygcagaaagaagaatcaagtaagatggtatctggaaatgctcttctggagcaaagccaaagaaggtgtatagatttatctctcatggaattgcctgaggcttgacccccgggtaggtatataagtccacaagttcacgggtgaacaagtgcattgccaaattatgctggggcaaaaagcagcggccagatgcccaactgcccctcttccttcagctctacttctgtaatcactagacagcacaaggtggggacagaagcctaaggatcttcatctataggagctctgtgcagaggcctaatgctacccaaataggagatccagccctgggtgcaatttgagtcatatctaagtgcaaaactttacaacccgattatattagaggaactggtactctgt

SEQ ID NO: 39750 - DNA, 1543 bp, Homo sapiens
tagcacagtactcactgagaacaaagagacaaagtccagagttaatactgtaaagcattactttcaacttatagatagcctaaaagaacaacattttcacagcaactcggaggttcatttgggactgacttaaggaacccccaccccaccaacaaccacccccacccttcacacaaaggtcacctggcctctgccacctcagcactcccgatatttttgcatcctgaacagccagccccactgtctgaccaggtagcagtcttatcactatgcccttaatggacttggttgtcatttgttgatgaraaataaaatagcaaaaacaacagcatataaagaaacaaagttttccccagagagcagatgggattccaccaggacccccagtctccatataatctctccctcctccaagagagatcaattcccaatctcttcccagggaattacaggttcggtcgtgacattggtgagccttttagaatggcatgcccaaggtagtaattttgtaatctaccgcacctgaagtaagtatagacctgggcttgctccagcctccttctctctcctccatccagcactgggtcctcacgtaggtgaaaatactttgcatgtaaacaaactcctctcaaagacacctcaaccttgacatttctttctccttttccaaacttgcttccttttaaaacacctcgcgactgccgtgctcccacatgaggcccaattatcagaataataattaacaggctctcattatttaggatcaaacaatgcccccttaatgaagcaagccaagaatagccaatgtaatcccttaaaacagggcgtgagttttccttacaccttggggcgtctaatccactgaaaccattaggcaccgagctgcccataacggcctggataacattgagtcaaggacagttaatggatgccagagcacagaccaaagtgctccaagcatgtcagtcaagactaaccggaggcaaaaacatcaaaatgcaggttggagttttgacattcctgcaggctctgaacgcctcgccagtaaatttttaaagtcaatatcccccttatgctcatgaacacttttctgtctgatgagtaggactaatgtggatctgattgaactgtgactaaagtaggactttaaaggcagctttgaatgtgtgtagggcggaaagggtttttttgtgtgtgtgttttgtgtgtgtgtgttttcttttttttccccagaaatgtctgtgataataacgaagacagtgtacacagattatcacaggctgtgtctttcgattcaaggttatgtgattagaaaattagaaaagcgacgagattagaaaaaccgcagaacattttgaaagaaagcttttttacaaattatctgtgtgctggatttacacagaatctgatagatggatcttctaatgtttggaaatggataaatgcaacaatgcaaataggaagaactggctttggagcctactcctggcagaagttcaaaacccatattaagtattctaattcactcaaagtctgttactta

SEQ ID NO: 39751 - DNA, 1543 bp, Homo sapiens
tagcacagtactcactgagaacaaagagacaaagtccagagttaatactgtaaagcattactttcaacttatagatagcctaaaagaacaacattttcacagcaactcggaggttcatttgggactgacttaaggaacccccaccccaccaacaaccacccccacccttcacacaaaggtcacctggcctctgccacctcagcactcccgatatttttgcatcctgaacagccagccccactgtctgaccaggtagcagtcttatcactatgcccttaatggacttggttgtcatttgttgatgagaaataaaatagcaaaaacaacagcatataaagaaacaaagttttccccagagagcagatgggattccaccaggacccccagtctccatataatctctccctcctccaagagagatcaattcccaatctcttcccagggaattacaggttcggtcgtgacattggtgagccttttagaatggcatgcccaaggtagtaattttgtaatctaccgcacctgaagtaagtatagacctgggcttgctccagcctccttctctctcctccatccagcactgggtcctcacgtaggtgaaaatactttgcatgtaaacaaactcctctcaaagacacctcaaccttgacatttctttctccttttccaaacttgcttccttttaaaacacctcgcgactgccgtgctcccacatgaggcccaattatcagaataataattaacaggctctcattatttaggatcaaacaatgcccccttaatgaagcaagccaagaatagccaatgtaatcccttaaaacagggcgtgagttttccttacaccttggggcgtctaatccactgaaaccattaggcaccgagctgcccataacggcctggataacattgagtcaaggacagttaatggatgccagagcacagaccaaagtgctccaagcatgtcagtcaagactaaccggaggcaaaaacatcaaaatgcaggttggagttttgacattcctgcaggctctgaacgcctcgccagtaaatttttaaagtcaatatcccccttatgctcatgaacacttttctgtctgatgagtaggactaatgtggatctgattgaactgtgactaaagtaggactttaaaggcagctttgaatgtgtgtagggcggaaagggtttttttktgtgtgtgttttgtgtgtgtgtgttttcttttttttccccagaaatgtctgtgataataacgaagacagtgtacacagattatcacaggctgtgtctttcgattcaaggttatgtgattagaaaattagaaaagcgacgagattagaaaaaccgcagaacattttgaaagaaagcttttttacaaattatctgtgtgctggatttacacagaatctgatagatggatcttctaatgtttggaaatggataaatgcaacaatgcaaataggaagaactggctttggagcctactcctggcagaagttcaaaacccatattaagtattctaattcactcaaagtctgttactta

SEQ ID NO: 39752 - DNA, 613 bp, Homo sapiens
gtgggaaatcgctcacaacctgctcccatccaagaatgaccattaatgtctattttggccacttctcaagtaattgtcaaagcccagctgggagatgcccgcacacagagccctgggcccaggccacaggggcacaccrttcctaccttcctttgaatcaattgtttcatttaaactcaaagcaaaatatttaaacagaccaagtaatatttctttttctaatccaggtgtgcacacgtgcgtgagccctgtgttttccctttctgcctccacttttacagatctgtgaagtggggcattcggcacggtggtggtgagacacatggggtctgggggccaggctcctacatcctcactgtgctgactgcatagaccaggggcagcctgggaagaagaggcaccaggcggcagaacaggccagattgtgtccaggaattgaaaaagcatgtgtatttttctcatcccttatgtttagagaaaaaatatttattgctacttctttcttaaagcttcatttttagttagcttcttatgagttccacatatggaaacgtttccatattttcacaaatctaagttaatgatacctttacaaccagccccccaatgccca

SEQ ID NO: 39753 - DNA, 581 bp, Homo sapiens
acttccaacaccgtggttgtctccatcctggaatgccaagtgtccagtgggtgatttccaaggagctcaccctctctgagtgctaagtcctgtgcaggcagagacaatctgcataaaaacacctcagagccagaaagacctgcaataartggctgacggaaattcacattttaaactcaacagggagaaacaataaaatgatccctttttatttgttaatatgattttattatttccaaatgtttgattataactacattcaaaaggaaacattgatgccatattaaagaatattaaaatatatgagaataaaaactacagtgccaaataaaccttgtttaattctcctgaatggaactcaggccaaggaaccccggaaaggggaggaggcaggtgtcttcagtttgcttctttttaatgaaatataactaaaaaatattagcttctttcaaatttatgaaagaaactgaattcaatttcaattgaattgcctgatagagcagtcgttattccttagcaatatctagtgtcaacagactacaagaaaacaaggacccttcttgttaagcaggcatttcccc

SEQ ID NO: 39754 - DNA, 581 bp, Homo sapiens
acttccaacaccgtggttgtctccatcctggaatgccaagtgtccagtgggtgatttccaaggagctcaccctctctgagtgctaagtcctgtgcaggcagagacaatctgcataaaaacacctcagagccagaaagacctgcaataagtggctgacggaaattcacattttaaactcaacagggagaaacaataaaatgatccctttttatttgttaatatgattttattatttccaaatgtttgattataactacattcaaaaggaaacattgatgccatattaaagaatattaaaatatatgagaataaaaactacrgtgccaaataaaccttgtttaattctcctgaatggaactcaggccaaggaaccccggaaaggggaggaggcaggtgtcttcagtttgcttctttttaatgaaatataactaaaaaatattagcttctttcaaatttatgaaagaaactgaattcaatttcaattgaattgcctgatagagcagtcgttattccttagcaatatctagtgtcaacagactacaagaaaacaaggacccttcttgttaagcaggcatttcccc

SEQ ID NO: 39755 - DNA, 994 bp, Homo sapiens
ccctgtgcagagacccaaatgcagaacccccagtgcagaacgcccaatgtaagacccaaatgcagaacccacagtgcagaatcccaaatgtgggaccccaatgyggaacccaaatgcaggaccccaaatgcaggaccccaatgcagaaccccaatgtaggaccctagtgcagggccccaaatgtgggaccccagtgcagaacccccaatgcagaaccccaacgcatatcccccaatgcagggccccaaatgcaggacccccagtgcctacagacggctgtcttctctgtgtccacatatggtctcccactgtgtgtctgtgtcctaatctcctcccgttaggacgcccgcctctcagaactggatcaaggtccaccccaatgacatcattttaccttcatcgcctcagtaatgacccgatctccaaatacagtggcattcttaggtattgtggcttaggacttcaacacatgaatttcaagggaatacagtctagcccagcacagcagccttccctgtcctggccccgacaagtgatagcaggaaaaggggtgttttggaacccaagagggggctgcattttgccctgaggctgcaagtcaataccatcagaaattgtggcttcatcctcgtgactttggtcgtcttgatcaaccacatcttatgaataagaacatcactttctattttcaaatgtctaaaactagcctccatgttattttctttttaggctttctatacatttttcataacttaaaattataagaagcttaaatcattaaatgttttcaaaatcagaaaaattgtcctgaggaatttggagcctcggtcgttttaaatcactctacgtatgcctttcccggggctgtgtttaggaggcaggctctcctggtgggcttcttccagttcctgtgcctccttctgaccccttcctgtcatccaccttccacggatctcggcagggaaacctttcccacaattaaggtgcgccgaga

SEQ ID NO: 39756 - DNA, 679 bp, Homo sapiens
agtagttgacagcataccctgtaaaaaagtgtttaatatttgttatacaaggaactatagctatacatacccactgcaagatgacattttaaagcattcagatggaatctatagttaagacacaagacatttttttattatattttgattttcttaaaaagttaaaaattaaatcatatacatatatcaactataacaaaactatattttctacgctcaatattttagtctgaaaattatgacattgtgaataggaaaaaatataaacagccagaataagacaatcatgaagaaatgagataacagtcttcagatgaaacaattaaatatgaattatgacataattayagacgccccgatgggtaaagaagaaagctactgatgatataatagtgttgtctgaaatgtcaactgctgtttaggctaaaaatacatttattccattgcaaattcttctattttgttgtttttaaactttctcaaaatgttcctttagacgggagattctatgcttcaattaggtcaaaagtaataatattgaaaaaagtttaatcaaagttccagtggatttttacaccagaaggcattcccttcagtgccctgcttctagacatggagacgaagaattccttacatgttagttaatttgaccatcatatcaaaatatcaacagaataaa

SEQ ID NO: 39757 - DNA, 679 bp, Homo sapiens
agtagttgacagcataccctgtaaaaaagtgtttaatatttgttatacaaggaactatagctatacatacccactgcaagatgacattttaaagcattcagatggaatctatagttaagacacaagacatttttttattatattttgattttcttaaaaagttaaaaattaaatcatatacatatatcaactataacaaaactatattttctacgctcaatattttagtctgaaaattatgacattgtgaataggaaaaaatataaacagccagaataagacaatcatgaagaaatgagataacagtcttcagatgaaacaattaaatatgaattatgacataattacagacgccccgatgggtaaagaagaaagctactgatgatataatagtgttgtctgaaatgtcaactgctgtttaggctaaaaatacatttattccattgmaaattcttctattttgttgtttttaaactttctcaaaatgttcctttagacgggagattctatgcttcaattaggtcaaaagtaataatattgaaaaaagtttaatcaaagttccagtggatttttacaccagaaggcattcccttcagtgccctgcttctagacatggagacgaagaattccttacatgttagttaatttgaccatcatatcaaaatatcaacagaataaa

SEQ ID NO: 39758 - DNA, 609 bp, Homo sapiens
ggcatttaatgctataaattttcctctaaacagtgctttagctgtgtcctagagattctggtaccttgtgtctttgttctccttggtttaaagaacttaattatttctgccttaatttctttatttacccagtagtcattcaggagccggttgttcagttgccatgtagttgtgcagttctgagtgagtttctttcttttcttcttttttttttggcatttctgaaccataaggtgtttattattattattattattattttattattatactttatgttctagggtacatgtgtacaacatgcaggtttgttacataagtatacacgtgccatgttgatttgctgtacccatcaactcgtcatttacattaggtatttctcctaatgctatccctccttcagccccccacwcccaacagtccctggtgtgtgatgttcccctccctgtgtacatgtattctcactgttcagctcccacttatgagtgagaacatgtggtgtttggttttctgtcattgtgatatttttctgagaatgatggtttccagtttcatccatgtccctgcaaaggacgtgaactcatccttatttatggctgcatagtattc

SEQ ID NO: 39759 - DNA, 609 bp, Homo sapiens
ggcatttaatgctataaattttcctctaaacagtgctttagctgtgtcctagagattctggtaccttgtgtctttgttctccttggtttaaagaacttaattatttctgccttaatttctttatttacccagtagtcattcaggagccggttgttcagttgccatgtagttgtgcagttctgagtgagtttctttcttttcttcttttttttttggcatttctgaaccataaggtgtttattattattattattattattttattattatactttatgttctagggtacatgtgtacaacatgcaggtttgttacataagtatacacgtgccatgttgatttgctgtacccatcaactcgtcatttacattaggtatttctcctaatgctatccctccttcagccccccactyccaacagtccctggtgtgtgatgttcccctccctgtgtacatgtattctcactgttcagctcccacttatgagtgagaacatgtggtgtttggttttctgtcattgtgatatttttctgagaatgatggtttccagtttcatccatgtccctgcaaaggacgtgaactcatccttatttatggctgcatagtattc

SEQ ID NO: 39760 - DNA, 592 bp, Homo sapiens
ataatctacatgagtagaataatatagacactgcagtcaaatggaaacaattataaataagtagaaaatacaaaatatcctaccacaaactgaagatgratatcaatattgcacatagattatgtgacaatggaaaagaatggcttatcataaatgggcttcctgtatgccctgcacattgacatagcccttaatatattttcagtgtggaacagaagaaaggtttcagatggaatgagtagtttgtggagaggtgagtggtgggaaagagttggtggatggaagagagaaggtttaatttagtgtaacctaaaatgaatttgcacaaaggagttggaggttgatgtttatcaggtaacctgtgagagtgaatcctgttttcattgaactatttattgaaaaagtatattttttcctattgaattgtcttgacaacctcattaaaaaccagttgagtataaatgtgaggatttgtttgtgggctctcaattctactccattggtctgtctgtccttatgtcagtagtacctcattttgaagtcttaattactgtagttttgtgtcaagttttcaaatcaaaaagtatgagtc

SEQ ID NO: 39761 - DNA, 656 bp, Homo sapiens
tatatatatatatatacacacacatatatgtaacttatgcacacatacatatagggttaaatgtttattacaatattgggctcatatcacacatcttgtattaaaacttgttattttcctatcaagtaatatggcagcaaaacctctaaggtgatagaaacatagggaaatgattgagagagataatagaagagaaagtggaaatgagtattacattaatgggaagatccaaatggaaattatacattatacctttcaaccttcttcattgggaaatgcaaatgtattaatgtagtgttagtagaggtgctggcaaacacccctaggtgagataaatcaagtagatgtcaagtctgttttctcctagagactgtagtgaataatctgttttcctgcctatttcacctsctaaaggctgcctgcattccttggctcatgaactcttccttctttcactccaaacacttgcttctgttgtcacatctcctactcctactactgactcttattctcacatctcccttacattagaaatgcaaaatgctttttccctggtgtcacaaagaaatagcactcaaacataaatttaattttctcggcaaggcaatttttactttctgcagaaagagtgctccttgcagatggaacaatggtga

SEQ ID NO: 39762 - DNA, 537 bp, Homo sapiens
  misc_feature (1)...(537): n = A,T,C or G
tggtccaaaaactaggtttccaaactcagtgggggacaggggatgagagataatgaggttggagccaagactgagtcagcagctgaggaagtagactgcaaaggagaagaatgaggaggggcagaaggcataagtagccaatgactttcagctctcctgggggcgaaagtacaatcacagtctgaagtggatgaagatgtgatcagaatcagtgaggaggggagtaggattacttagcagagatgacataccatgttccaagccaggtcatgcagatattattctctatgataaagtaaatcaggagtgagggctaacctaccaggaatataaggctggcatagatacatggggaagcagacaaggatcttgaggatgataccccttgaatatcagactccaaacagcaggtgaggaagccaagcccagtccattgctccatgtgaaaagttataataatttgatgactgtgggtgcatagggatggcaggctagcaggtatgagtttgggstggagaggcnaagcctgatgaagaa

SEQ ID NO: 39763 - DNA, 582 bp, Homo sapiens
tgtcgattaaatctgagtagtttattactctttgctaaatattcaacgcaaccatgtaattctccagatacttgctgtccgtctcccattcccacccctgtggttctccctctgttccctttcctgggctcccacaaaatctatgctttcctccatagcaacatttgccctcttgatggaaaactgatggtttctcttgtacatgtccacaagtacctcaagggcaggaaggagcttggatttctgctgtgcacaaacttyttctacctatagatatctgtcaaacaaaatcaaagtatgtgttgggcaagtggaaaaagtaaattaactcaacaggaccatttcgatctttatctcgtcttctctggggctcctttcctggtgcacttggggatggagaaataaaatgactcaatgattttcactgaacagtaactattattgacagtggcagagcagcttcttacatatatcttggtacgtagcttacatagattctgcagaaaaataacaaaaccttaaggtctataaacagttaaaactctcacattcaaacatgggcacttattgtggtaaatgcag

SEQ ID NO: 39764 - DNA, 547 bp, Homo sapiens
tgaggctgagacctggaaggctgcactcccagacagttaaggctttctaagtcacaggatgagatagggggtaggcacacgatacaggtcataaagaccttgctaataaaacaggttgcagtaaaaaagccggacaaatcctaccaaaaccaagatggccacgagagtgacctctggttgtcctccttgctacactcccgccagcgccatgacagtttacaaacgccatggcaacctcaggaagtcacccggtatggtccaaaaaggggagacatgaataatccacccctcgtttagcatatcatcaagaaataatcatcaaaatgggcaggcagcagccttggggctgctctgtctgtggagaagccaatctttattcctttactttcttgataaacttgctttcactttacagagtcaccataattctttcttgtgygagatccaaaaaccctctcttagggtctggattgggacccctttccagtaacagaagcacaaatacggttttgtcgcccacattctagggcttctggatgtgcaaata

SEQ ID NO: 39765 - DNA, 611 bp, Homo sapiens
  misc_feature (1)...(611): n = A,T,C or G
atttataactctgttatcataggccatgtgacaaaatttgtgtatgaaacatacaacttcactaagattaaaaaaggttattaggggctgggtgcrgttattaggggctgggatcacacctgtaatcccagcactttgggaggctgaggtgggcagatcacgaagtcaggagatcgagaccatccttgctaacacggtgaaaccctgtctctactaaaaatacaaaaaattagccgggcgtggtggcaggcgcctgtagtcccagctactcgggaggctgaggcaggagaatggcatgaacacaggaggcggagcttgcagtgagctgagatagtgccactgcactccagcctgggcgacggagcaagactccatctcaaaaaaacaaaaaaaagattattaggaaactttgaattacatgaatgagaactaatttccaaaaccatggcgcagactatcacttctttggcaagtgaattggatatacggtttagttcacagttctatcctgttactagaatgtttataattcaaggcatctatgtcattgtagacatgaagtaggaggaaggagatggaaaataaattggagaagttctaccatnatagaa

SEQ ID NO: 39766 - DNA, 611 bp, Homo sapiens
  misc_feature (1)...(611): n = A,T,C or G
atttataactctgttatcataggccatgtgacaaaatttgtgtatgaaacatacaacttcactaagattaaaaaaggttattaggggctgggtgcagttattaggggctgggatcacacctgtaatcccagcactttgggaggctgaggtgggcagatcacgaagtcaggagatcgagaccatccttgctaacacggtgaaaccctgtctctactaaamatacaaaaaattagccgggcgtggtggcaggcgcctgtagtcccagctactcgggaggctgaggcaggagaatggcatgaacacaggaggcggagcttgcagtgagctgagatagtgccactgcactccagcctgggcgacggagcaagactccatctcaaaaaaacaaaaaaaagattattaggaaactttgaattacatgaatgagaactaatttccaaaaccatggcgcagactatcacttctttggcaagtgaattggatatacggtttagttcacagttctatcctgttactagaatgtttataattcaaggcatctatgtcattgtagacatgaagtaggaggaaggagatggaaaataaattggagaagttctaccatnatagaa

SEQ ID NO: 39767 - DNA, 611 bp, Homo sapiens
  misc_feature (1)...(611): n = A,T,C or G
atttataactctgttatcataggccatgtgacaaaatttgtgtatgaaacatacaacttcactaagattaaaaaaggttattaggggctgggtgcagttattaggggctgggatcacacctgtaatcccagcactttgggaggctgaggtgggcagatcacgaagtcaggagatcgagaccatccttgctaacacggtgaaaccctgtctctactaaaaatacaaaaaattagccgggcrtggtggcaggcgcctgtagtcccagctactcgggaggctgaggcaggagaatggcatgaacacaggaggcggagcttgcagtgagctgagatagtgccactgcactccagcctgggcgacggagcaagactccatctcaaaaaaacaaaaaaaagattattaggaaactttgaattacatgaatgagaactaatttccaaaaccatggcgcagactatcacttctttggcaagtgaattggatatacggtttagttcacagttctatcctgttactagaatgtttataattcaaggcatctatgtcattgtagacatgaagtaggaggaaggagatggaaaataaattggagaagttctaccatnatagaa

SEQ ID NO: 39768 - DNA, 1287 bp, Homo sapiens
tggcttgtttgtcatgtggaatttggaaccaggatcactgagagtcacctgagtgcctacgcctgggcctcttcggttccatctgctttgcctggagggctcttccggctccttcacagcccatcccacgcttcactgagcacctgctccaatgtcacccgctcggagaggcactcgccaaacgtgagcagagaagcacccctcgccgtcactccagtttttcttatagctcttatacacagggtatattgtttagcatgtctattatctgttatcacttccctaaaagaacggttgtgaaaacaggattttggtctgttttactcactgctgctgtcagtgcccaccacagagcccccagagggcctgcaaaatgaagggacaaaatcatgtctgttgaacaaacttagagaagcagaagtcaaattgccaaggaagagtaatattctaaggcgatttgctaaggaagggtaataccctaaggcgaggaaatgaaggcactgcaggaagacttcatagaaagagatatggtcacatctgaggattggctgatgggagaggtccaaggaagtatcagagctttgtgaacagaggttggttgttaattatggattagtggattactcctctgggaagacctttcctgccaaattttgtcttgaatgctgatctggctggtatatatattaataatgtgaatgaatgaagacctatccaatttgcttattgtatttgtagatattattgtcagaatgaagattcaaaactgcctagtcaatgggtcaaaagacaggtaagatgaggtttagcaaagctaaattggaggtcccacccttaagctgagagccagatgaagaagccctgtagagagcccattagcaacatctcctaaggcaatgcactgggaattaaggcagtggcttgggaggtcacagacgtttgtctacactgagttccactaccttctctctgagtgtccttggacaaagktatgaggctccctgaattttattttctcctctttaaattggagacacagataccctaccctatagcatctttctgaagccaactgagaaaatccatgtaagaacatgaaagagcaggtgatacagggaaagtgatacaggaaagtggtacagggaaagtgcatgattattagtgggtattccctactactgtttactgcagaattccaacatgaatcaaaaggcttatgtaactgccaaaaaaaacaaggaaatcagagattccaccagtgaaaccatagttctctgcaacaggagg

SEQ ID NO: 39769 - DNA, 683 bp, Homo sapiens
ttgaataaaaatagatgacaaggaatagacaacctgaaaacatgtctctttcttggatcacataagccttttataaaggatgctaataaaatgtatccataatatgtcagaacaattatttaacttgactatcaaagaactagaaactgaagtagagtaattacaattaattcagtggctgtagtttttttttttaacagggacttaaatcattaagaaattaaagttggcaataatttgttttgtactgggagccctataagaaatatctgagaaaaatgaaatctgtgaaagattaataaaaaacaagaggaaggcagttggatttacatgacttaatgtcagtaaaatacattgtcctcattgayaccagtcagatattttctagcagtgaaaataggttgtatcaactatctattaacatatgaggtaggctttaaaacaattaaattagtttttaaccaaatatctggttctttcacattggatagacatgttgtttatttaatttgaaacttagagacttaatggtgagcattttaattttttaggggaaaacatactttattatgtagtcattaactattttattagacttttttattattttgaaggaaggatttattatattttactcaaagatagaacttttggtttttaaattagtaagaaaaaggacctga

SEQ ID NO: 39770 - DNA, 683 bp, Homo sapiens
ttgaataaaaatagatgacaaggaatagacaacctgaaaacatgtctctttcttggatcacataagccttttataaaggatgctaataaaatgtatccataatatgtcagaacaattatttaacttgactatcaaagaactagaaactgaagtagagtaattacaattaattcagtggctgtagtttttttttttaacagggacttaaatcattaagaaattaaagttggcaataatttgttttgtactgggagccctataagaaatatctgagaaaaatgaaatctgtgaaagattaataaaaaacaagaggaaggcagttggatttacatgacttaatgtcagtaaaatacattgtcctcattgacaccagtcagatattttctagcagtgaaaataggttgtatcaactatctattaacatatgaggtaggctttaaaacrattaaattagtttttaaccaaatatctggttctttcacattggatagacatgttgtttatttaatttgaaacttagagacttaatggtgagcattttaattttttaggggaaaacatactttattatgtagtcattaactattttattagacttttttattattttgaaggaaggatttattatattttactcaaagatagaacttttggtttttaaattagtaagaaaaaggacctga

SEQ ID NO: 39771 - DNA, 866 bp, Homo sapiens
ccacaagtaagtgagaacttgtaatatttgtctttctgtgcctgccttatttcacttagcataatgacctccagttctattcgtgttgttgcaaatgacaggatctaattttttgtatgtctgaatagtactccactatgtataagtaccacattttcattattcattcatctactgatggatacttaggttgcttccaaattttggctattgcaaacagtgctgcaacaaacgtgggagttcaaatatctctcaatatactgatttgtttaaatcataaactatatccaagggtagtaacttggcaaaatatgtaaaatacaaatcactgtgcattgcttttattttgttaaaaagtaaagaggtatgtgaatagatatcccycaattcagtaaatatcccaccattacatacaaatatatgtaaatatatatgtatacatacacacattccgtgggttaagtgaaaggcagaatatgatatacataaaattgttaatatatttacttataaatgtagattggaaggggtatgtgaggagaaactattagttgtcctcatgtagctctatatttggtcaatttgtttcaataagcaagtattttacttttttaagttaaaagagtaatttattaataaattcaattgttatgtctttcaggtttttgttttcatttctcatttaaatgttcttggacttagttgtatttaatgccaattttcatgacagctcaaaatcattggtagactttgttgatcatcctgaagccactccaaacatatatagtcctgtaaatttttgttgttttattgctttcaaggtggaaattggttcaattctttgacactattttattcatatcctg

SEQ ID NO: 39772 - DNA, 545 bp, Homo sapiens
ctgtcattatctagctggtattgccaacttcctattgaaaccctgtttttgattaaactttttcaaaaaaacaaaatcttacaaaccaagaagacttgaataataaaatgtaaattaataattccaatagaaaatacactctgggatacttccgcccmaaaaaaattattcacatgaaaatatatgactttattgtgataatttaaatatatattttttctgtataacgttttaataactcctttgtctaacttactttgttgtatgactatagtatacaaaacatgtaacatacaaaatatgtgtcatctacagtgtgatcagaagacatctgatcgacagtaggttattagtaattaagttttgggggagtaaaaagttacatggcagatttttaactgctgctaggagacaagagaaggccagtgcccctaacccctgagttgttcaaggccaactgtaatgagaagagtatatatcatttaaactacttacacatttttaggaaatgtttacaaattaaatacaaaaaagatttttaacag

SEQ ID NO: 39773 - DNA, 621 bp, Homo sapiens
agagatctaaagatgtctgaattcctctaagcgcatcctttagtrgacatttcccaaagcaaggctggcccctaaggatgacaatgcattagaactcagtttcttggcagtgttctctgtaaatctataaggaagtttacttcaaaagcaaaaatctgggatatatctctgatcataaaattggacttgcagagaatttcatagtggcatgagacattgaggtatagggttcattaatggtactgagctacgcttcatggtttggctgtgggatggattcaccaccctgcccagcttagaatcatctggcctcaaggtgtgaattagggactgtcaggtaattcaagaaggaatcttgcagaaatttctgaattgtaatacatacatcgtttttaactgaactagtatcaaatggttaatatattaaaactttccagactgcaaaaaatacacacataaagcttctattatgcacaaatataaaaacattccatggttagaatgcataatatatgattcacatttgttttacatgtcttgctttgagaaacttaaaagtataagtaaaccagagaacactggctaatgtctagattaaaacaatctgtatgtcactatttg

SEQ ID NO: 39774 - DNA, 590 bp, Homo sapiens
ctaatattattattagtattgttgttcctctggcattttgctggacatgagatgaaaaatgaaaagggtaaatattatccccatatgctattatgaattctgtccttcatagtttgtcttgttccatctaatcttaatttcatccacattataatcccataaaccatgtttttgaattacaaaaatgttaactttacagtgcccaattttaagttaagtaagtctaatactgaacctgaagaaactcagatgagtagaaaccttttgaaaggtcactttttccattcttctcttagaatattctcaaggcgcagtagtttttttgttttgttttgagatggagtctcgctctgtcacccaggctagagtgcagtggcgygatctcgcctcactacaacctctgcctcccaggttcaagcagttttcctgcctcaagctcccaagtagctgggagtacaggtgcccaccaccatgcccacctaatttttgtatttttagtagagtcagtgttttgccatgttggccaagctggtctcgatctcctgacctcaagtgatccactagtctcggcctcccaaattgctgggatt

SEQ ID NO: 39775 - DNA, 1312 bp, Homo sapiens
cctggtgggagatggttgaatcatgggggcaggtctttcctgtgctgttctcatgacagtgaatgggtctcaggagatctgatgagtttaaaaatgggagtttctctgcrcaacctcttgttttttgtttgtttgtttttttgttttgtttttgttgttgtttttggttttttgtttgtttttttcctgctctcatccacgtaagatgtgaattgctcctccttgccttcgaccatgattgtgaggcctccccagccatgtggcactgtgagtccaattaaacctccttcttttgtaaattgcccagtctggggtatgtctttatcagctgggtgaaaacggactaataaagtttgctaacatgtaaaagtaatttcaatcttttttcagttttccacaaataacatgtgaattacactaactgggatccctttcactttctcaatcaccatgcgaaaataagtaaccagaagtttaaaatcactgcaatgcaatttttttgcaatagattaagagtcatacctcacacattttttttcttttctcccaattgcttggtacagtgtagtatatttctcatggtccagcagcaataagatggtatacttttaaataatttatacttacctattttatagtaatctcagcccaatatatttgctttttgaggtggtgtggaagtgattttgttcattcaggattgttgaatgtaatattttctaattaattgttttatcttctatagacacttagattctttaccatttttaaaagtttattgcctaaaaaagagtaatactatctatattagattttgcaattattattgcactactgagccttctacagtggattggcaggctaactccacaacatacattttgacaggtcatgtttatttaataggtgccttagacaaggcagaaaatacagaggcagatacagacatggaaaacatgtttggatggtgtttcactctgaatttaagttaattttcagtgactttagagtttaagtaacagaaggctattgtcactgctggatggtttattcagaaatttattatatttatcttggagctaatgagtcagtgtgttcttagccaaaacaagcaacaacggggtcacataaagtataggaaactgtatataatgtacattaattaactatatatgtatccttgaataacacgtacacatttttatatgtacattctgggcactgcactggtagctttagacaacagtagcatctttgtagtgcatgatcttgacatttagttgtacacttgtagctttaccagatatggtag

SEQ ID NO: 39776 - DNA, 1312 bp, Homo sapiens
cctggtgggagatggttgaatcatgggggcaggtctttcctgtgctgttctcatgacagtgaatgggtctcaggagatctgatgagtttaaaaatgggagtttctctgcacaacctcttgttttttgtttgtttgtttttttgttttgtttttgttgttgtttttggttttttgtttgtttttttcctgctctcatccacgtaagatgtgaattgctcctccttgccttcgaccatgattgtgaggcctccccagccatgtggcactgtgagtccaattaaacctccttcttttgtaaattgcccagtctggggtatgtctttatcagctgggtgaaaacggactaataaagtttgctaacatgtaaaagtaatttcaatcttttttcagttttccacaaataacatgtgaattacactaactgggatccctttcactttctcaatcaccatgcgaaaataagtaaccagaagtttaaaatcactgcaatgcaatttttttgcaatagattaagagtcatacctcacacattttttttcttttctcccaattgcttggtacagtgtagtatatttctcatggtccagcagcaataagatggtatacttttaaataatttatacttacctattttatagtaatctcagcccaatatatttgctttttgaggtggtgtggaagtgattttgttcattcaggattgttgaatgtaatattttctaattaattgttttatcttctatagacacttagattctttaccatttttaaaagtttattgcctaaaaaagagtaatactatctatattagattttgcaattattattgcactactgagccttctacagtggattggcaggctaactccacaacatacattttgacaggtcatgtttatttaataggtgccttagacaaggcagaaaatacagaggcagatacagacatggaaaacatgtttggatggtgtttcactctgaatttaagttaattttcagtgactttagagtttaagtaacagaaggctattgtcactgctggatggtttattcagaaatttattatatttatcttggagctaatgagtcagtgtgttcttagccaaaacaagcaacaayggggtcacataaagtataggaaactgtatataatgtacattaattaactatatatgtatccttgaataacacgtacacatttttatatgtacattctgggcactgcactggtagctttagacaacagtagcatctttgtagtgcatgatcttgacatttagttgtacacttgtagctttaccagatatggtag

SEQ ID NO: 39777 - DNA, 1312 bp, Homo sapiens
cctggtgggagatggttgaatcatgggggcaggtctttcctgtgctgttctcatgacagtgaatgggtctcaggagatctgatgagtttaaaaatgggagtttctctgcacaacctcttgttttttgtttgtttgtttttttgttttgtttttgttgttgtttttggttttttgtttgtttttttcctgctctcatccacgtaagatgtgaattgctcctccttgccttcgaccatgattgtgaggcctccccagccatgtggcactgtgagtccaattaaacctccttcttttgtaaattgcccagtctggggtatgtctttatcagctgggtgaaaacggactaataaagtttgctaacatgtaaaagtaatttcaatcttttttcagttttccacaaataacatgtgaattacactaactgggatccctttcactttctcaatcaccatgcgaaaataagtaaccagaagtttaaaatcactgcaatgcaatttttttgcaatagattaagagtcatacctcacacattttttttcttttctcccaattgcttggtacagtgtagtatatttctcatggtccagcagcaataagatggtatacttttaaataatttatacttacctattttatagtaatctcagcccaatatatttgctttttgaggtggtgtggaagtgattttgttcattcaggattgttgaatgtaatattttctaattaattgttttatcttctatagacacttagattctttaccatttttaaaagtttattgcctaaaaaagagtaatactatctatattagattttgcaattattattgcactactgagccttctacagtggattggcaggctaactccacaacatacattttgacaggtcatgtttatttaataggtgccttagacaaggcagaaaatacagaggcagatacagacatggaaaacatgtttggatggtgtttcactctgaatttaagttaattttcagtgactttagagtttaagtaacagaaggctattgtcactgctggatggtttattcagaaatttattatatttatcttggagctaatgagtcagtgtgttcttagccaaaacaagcaacaacggggtcacataaagtataggaaactgtatataatgtacattaattaactatatatgtatccttgaataacacgtacacatttttatatgtacrttctgggcactgcactggtagctttagacaacagtagcatctttgtagtgcatgatcttgacatttagttgtacacttgtagctttaccagatatggtag

SEQ ID NO: 39778 - DNA, 869 bp, Homo sapiens
accccccgacccccgcaccaggttctgagacccaccaagatacagagtgtgatagaactcagaccccgacctcgaggagcagagggggaaattgaggcctggagagggaggagaccagtcctcatgtatctgacagccttctcctgagacagacgttaagaaacagttcctggtggggacacaggacacctggtcactgagcagaagcttcagagaaaatgtaattcaaagcagagacctggagactgcataaggactgaccaatggaagaggtggtggaatgggtagagtcccagaaaggagaggcacaggtgcaagcaaggacacacactggagggaggggcggctggggaggtgggcggaggccgagtcccccagggcatcgcgtggtgggaggtggggtctgggacttggcgctggggtggaccctcattgcaggagaggagacctggagtgcactctggctgcagtgcwaggcatgggctggaaggcagcaggccgagggtcatcagaaccagaaggtccaggacaggctgaggcctggagaggggcacagagcgatgcagggcagtaggtagagttgggggagactgtggaggactcgaagcacgcctgggatggactcaccgtccatagggcaggagcagagacatccggagggtgctgcttgggaggcagcgtccctgacatgccgttcaccatatggagctcccgggggtttgtggggtgggggcagtgcggggagatgaaattagggtgcggcggctctgagaaccctgtgttgtgtcctcttggcagctggaacttagatctggaaatctgaggccccaagaggcagattttcccatcgtccttccacagggatgatt

SEQ ID NO: 39779 - DNA, 869 bp, Homo sapiens
accccccgacccccgcaccaggttctgagacccaccaagatacagagtgtgatagaactcagaccccgacctcgaggagcagagggggaaattgaggcctggagagggaggagaccagtcctcatgtatctgacagccttctcctgagacagacgttaagaaacagttcctggtggggacacaggacacctggtcactgagcagaagcttcagagaaaatgtaattcaaagcagagacctggagactgcataaggactgaccaatggaagaggtggtggaatgggtagagtcccagaaaggagaggcacaggtgcaagcaaggacacacactggagggaggggcggctggggaggtgggcggaggccgagtcccccagggcatcgcgtggtgggaggtggggtctgggacttggcgctggggtggaccctcattgcaggagaggagacctggagtgcactctggctgcagtgcaaggcatgggctggaaggcagcaggccgagggtcatcagaaccagaaggtccaggacaggctgaggcctggagaggggcacagagcgatgcrgggcagtaggtagagttgggggagactgtggaggactcgaagcacgcctgggatggactcaccgtccatagggcaggagcagagacatccggagggtgctgcttgggaggcagcgtccctgacatgccgttcaccatatggagctcccgggggtttgtggggtgggggcagtgcggggagatgaaattagggtgcggcggctctgagaaccctgtgttgtgtcctcttggcagctggaacttagatctggaaatctgaggccccaagaggcagattttcccatcgtccttccacagggatgatt

SEQ ID NO: 39780 - DNA, 716 bp, Homo sapiens
cttgtagtggtgaactgttgacttcttcttgattgtatgaatgccaatatcataattgtgacattatgctatagttttgcaagatgttaccactgggggaaactggttaaaggtacctattatctctctatatyaattcttatataactgcgtgtgaatttaccataatctcataataaaaaatcgaagtaaaaacttaaatacatagatagggaaaaaatatatatcctaatgttcaagccacagcttagaccttttaaatcaaaatgtctaagggtgggaccaggtattaatatttataagtttttcagatgattccagtttgaaacttgcagccaagtttgaaaaccgatatcttagccaactgtgtggagcatgaggagccagcataggaggccgtggagagctttggggctgtacacatcagtggagacgagttgtgtggtctcgggcaagccatttaaactcttgtagccttgggctcttctttgtaaattggttataacctgtccttacttcccagcactgatttgcagatcaaggagaaaatgcaggttaagtgttttataaattgtaaagtgtaatgtaaatctcctgatcaacgggcaatgtatattgtacatatgtacaaatatgtgtgtttttaagtatgtgctgtaggcagatattttcatgtttagtatctcatttaatctcatcaacaactcagcagtgta

SEQ ID NO: 39781 - DNA, 723 bp, Homo sapiens
catgagaaatatgtttataaaatctcatgatatgcttgtcacacagtaaggtttggtaaagtgaatccttcaacagcgttccccaattctttctcttgtgctgaaagtggactatctatcttagaaaagaccatgcaaaccaaaatagaatgacttggctacagagcagtttcactgtctactgattaccaacctgtcttaatccagtgagatagaacactcctccacgcaggttacctgaagccagtgtattrcttacagataggacaacagaagcctatgattcgtaaaagcctcaagaaagctagtttggcagatggggtttcatctgcatgtgccacatttgcactgcagtcgagggtcccaagaaagcactccaccctaggttttataccccagcataacatgattcactgtgctaatgtgttgaaggacatgctgtttctatgagggattagaacagaacctaggctgttcaggctagtttctccctatcttaagatgttgcattctcagcatattctatatttattcttgagaactatgagtaaaaaagaggggtaactgtgtcagtccaaagatacctgaagaattgtcctgtgctaacagcagaaaagtttccagttgatttaaaatcaagtgatttgcaatgtagttacaaacaaaattattaagtgcctattttgtatttgaccccatggtaatactgattatgataataat

SEQ ID NO: 39782 - DNA, 1394 bp, Homo sapiens
tgtattgaatgagamatttcccataagctaagccccagctcaaattctgtataggaagctcccgatgctgtcccagaactcacaggccaatgtgctctactttgttgctgaagtttggtcacctggttcccttaacttcaactcctccagctcctcatcatttggcaatccattgctgacagtcgttctgggcttcccaatcactgctggagtacttcagccctttatgcctaaggctgcagcgacaggcataaagctctcctccaggccctggattccatttttccttcccttctgtaacctcgcagtgtatgtactgtgagttttcgacactctcagtttaaagccatgctctgactctggcctttcgatgaggcatcatcctctcgcttcagcaaagagcctgatacagagtgccctgcagagaatagtttcaagatgtctccagagccctggagctgcctgagtgagagggcaacccagctgtcttaaggacttttttttttttttttttccaaatcaggatcttactacctggcccagatgggagtgtaggggcatgatcatagttcactgcagcctcaccctcatgggctcatgcaatcctcctgcctcagcctcctgagtagctagcactaaaggagtgcacaaccaagtccagctaatttctaaaaccatcaaggtcctgctatagtgctcatggtcccactacattgctggtctggaactcctggtctgatgcaatcctccccctccacttcccaaagtgctgggattataggcaggagccactgtgtccaacctcataaggactttttgatccagcttcagtttctgctccaatgttggtacaaccctgcttttgaaaaccctttggatcacattggtgctgcatcaaagccttcagccaacctgggaactgaccaggatgctacaaattccttatgtaaataccagatctgctttatggacagggcacctggcgcctccatttacctccaaatttgttgatatcagattgcatttttctgtcatttcagggcaccgaggaagagaaccaatggcagaggccacatgtgcaagcaagatgggagtctggagagcctcaggctaaatcacgagtgctcagccctctcctctttgtaagggcaaccgggtcatatctgccagcatagaactgctctgtccacagccctaaaatctaatacctagaacaataaatgcacttaagcacgtcaaactctctcaaccagtgatgaaatctgtcactagcgaagggacttgtcccaagggagctgaacacctgccgctgcaccctgacaatgtataagaaacaagcaccactgtggatgcagccccagaggcctagtgtcatgggggtgcaaggccctgct

SEQ ID NO: 39783 - DNA, 1394 bp, Homo sapiens
tgtattgaatgagacatttcccataagctaagccccagctcaaattctgtataggaagctcccgatgctgtcccagaactcacaggccaatgtgctctactttgttgctgaagtttggtcacctggttcccttaacttcaactcctccagctcctcatcatttggcaatccattgctgacagtcgttctgggcttcccaatcactgctggagtacttcagccctttatgcctaaggctgcagcgacaggcataaagctctcctccaggccctggattccatttttccttcccttctgtaacctcgcagtgtatgtactgtgagttttcgacactctcagtttaaagccatgctctgactctggcctttcgatgaggcatcatcctctcgcttcagcaaagagcctgatacagagtgccctgcagagaatagtttcaagatgtctccagagccctggagctgcctgagtgagagggcaacccagctgtcttaaggacttttttttttttttttttccaaatcaggatcttactacctggcccagatgggagtgtaggggcatgatcatagttcactgcagcctcaccctcatgggctcatgcaatcctcctgcctcagcctcctgagtagctagcactaaaggagtgcacaaccaagtccagctaatttctaaaaccatcaaggtcctgctatagtgctcatggtcccactacattgctggtctggaactcctggtctgatgcaatcctccccctccacttcccaaagtgctgggattataggcaggagccactgtgtccaacctcataaggactttttgatccagcttcagtttctgctccaatgttggtacaaccctgcttttgaaaaccctttggatcacattggtgctgcatcaaagccttcagccaacctgggaactgaccaggatgctacaaattccttatgtaaataccagatctgctttatggacagggcacctggcgcctccatttacctccaaatttgttgatatcagattgcatttttctgtcatttcagggcaccgaggaagagaaccaatggcagaggccacatgtgcaagcaagatgggagtctggagagcctcaggctaaatcacgagtgctcagccctctcctctttgtaagggcaaccgggtcatatctgccagcatagaactgctctgtccacagccctaaaatctaatacctagaacaataaatgcacttaagcacgtcaaactctctcaaccagtgatgaaatctgtcactagcgaagggacttgtcccaagggagctgaacacctgccsctgcaccctgacaatgtataagaaacaagcaccactgtggatgcagccccagaggcctagtgtcatgggggtgcaaggccctgct

SEQ ID NO: 39784 - DNA, 1394 bp, Homo sapiens
tgtattgaatgagacatttcccataagctaagccccagctcaaattctgtataggaagctcccgatgctgtcccagaactcacaggccaatgtgctctactttgttgctgaagtttggtcacctggttcccttaacttcaactcctccagctcctcatcatttggcaatccattgctgacagtcgttctgggcttcccaatcactgctggagtacttcagccctttatgcctaaggctgcagcgacaggcataaagctctcctccaggccctggattccatttttccttcccttctgtaacctcgcagtgtatgtactgtgagttttcgacactctcagtttaaagccatgctctgactctggcctttcgatgaggcatcatcctctcgcttcagcaaagagcctgatacagagtgccctgcagagaatagtttcaagatgtctccagagccctggagctgcctgagtgagagggcaacccagctgtcttaaggacttttttttttttttttttccaaatcaggatcttactacctggcccagatgggagtgtaggggcatgatcatagttcactgcagcctcaccctcatgggctcatgcaatcctcctgcctcagcctcctgagtagctagcactaaaggagtgcacaaccaagtccagctaatttctaaaaccatcaaggtcctgctatagtgctcatggtcccactacattgctggtctggaactcctggtctgatgcaatcctccccctccacttcccaaagtgctgggattataggcaggagccactgtgtccaacctcataaggactttttgatccagcttcagtttctgctccaatgttggtacaaccctgcttttgaaaaccctttggatcacattggtgctgcatcaaagccttcagccaacctgggaactgaccaggatgctacaaattccttatgtaaataccagatctgctttatggacagggcacctggcgcctccatttacctccaaatttgttgatatcagattgcatttttctgtcatttcagggcaccgaggaagagaaccaatggcagaggccacatgtgcaagcaagatgggagtctggagagcctcaggctaaatcacgagtgctcagccctctcctctttgtaagggcaaccgggtcatatctgccagcatagaactgctctgtccacagccctaaaatctaatacctagaacaataaatgcacttaagcacgtcaaactctctcaaccagtgatgaaatctgtcactagcgaagggacttgtcccaagggagctgaacacctgccgctgcaccctgacaatgtataagaaacaagcaccactgtggatgcagccccagaggcctagtgtcaygggggtgcaaggccctgct

SEQ ID NO: 39785 - DNA, 1328 bp, Homo sapiens
gttatatttcttaaatgaatgaaaaccttgtttaaacaggggagcaatataatgatcacctcacctgtttaaatgactgtatgagtatgctttgtttatcatcattaaaagagtgtttacttggcaagttctactgctttatgaattactctacaataattctcccataatagktattagtcaatgaaaatgtagtttagtgactatttcatgtattttaaaattcaaggcaacagtttaataaaatgaaaaaggaatgggttttggagttagagcttagttctgattctaggttttctatttacttcttgtgtgaccttgggcaagatatatgacctcagatatgaagaactcagatgcctcatttatgaaatgagaataaaacctactttgttgggtcacaatgagaaaaaggcactaggttaaaatacctggcagggttctggcacagagtagacgacataaaaataattttttgcttcttttagacttttcgttttcctattttaaatcttctacttcagaattcgccggagatgttttattttattagatttaaagttgactttgttcgcattttgcaagaataagtcaaatttgcgttttcttaagatacaagataccagacattgagaatgcaaccatggagctggtgagtcagggcaagttttggctctggtgatatttctcttggctttttggtcatttaagatctttgcattttaatttcaaattctccaaatgttagcaaaactagcactttccagttctttacaaaaccgtttagaatttatattctagagaggactaaatgggtggcaacattttgaatacttgcaaaaacagtttgacaagttcagtttaaagaaaagggacacgagtaatgggcatgcaaacaaacttatgggtacaaattcaagctgcttgcctttttttccagaatgactggtttgcagttttaaaagacccaaacaaagaaccctttctatagagaataataacttacaatatcactgtggtcggcaggtcagctggggaaggggctaggtaacagagaacatgttactgggcttcgttttcttctaagcaagggcatatcccatatttcaagagaatacctatcattttctaatctaaaaagaaaccagctttagaaacagtgtgatgtagtaaaaggatatgagctttggagctagatagacttaggttcagccctcggcagaggccataagccagctggacacatttgaggggctgtttatccatctgtgccttcgtatctgaaaaaggggatgcttccatccaactcgctggctggttgtgagaat

SEQ ID NO: 39786 - DNA, 1328 bp, Homo sapiens
gttatatttcttaaatgaatgaaaaccttgtttaaacaggggagcaatataatgatcacctcacctgtttaaatgactgtatgagtatgctttgtttatcatcattaaaagagtgtttacttggcaagttctactgctttatgaattactctacaataattctcccataatagttattagtcaatgaaaatgtagtttagtgactatttcatgtattttaaaattcaaggcaacagtttaataaaatgaaaaaggaatgggtttyggagttagagcttagttctgattctaggttttctatttacttcttgtgtgaccttgggcaagatatatgacctcagatatgaagaactcagatgcctcatttatgaaatgagaataaaacctactttgttgggtcacaatgagaaaaaggcactaggttaaaatacctggcagggttctggcacagagtagacgacataaaaataattttttgcttcttttagacttttcgttttcctattttaaatcttctacttcagaattcgccggagatgttttattttattagatttaaagttgactttgttcgcattttgcaagaataagtcaaatttgcgttttcttaagatacaagataccagacattgagaatgcaaccatggagctggtgagtcagggcaagttttggctctggtgatatttctcttggctttttggtcatttaagatctttgcattttaatttcaaattctccaaatgttagcaaaactagcactttccagttctttacaaaaccgtttagaatttatattctagagaggactaaatgggtggcaacattttgaatacttgcaaaaacagtttgacaagttcagtttaaagaaaagggacacgagtaatgggcatgcaaacaaacttatgggtacaaattcaagctgcttgcctttttttccagaatgactggtttgcagttttaaaagacccaaacaaagaaccctttctatagagaataataacttacaatatcactgtggtcggcaggtcagctggggaaggggctaggtaacagagaacatgttactgggcttcgttttcttctaagcaagggcatatcccatatttcaagagaatacctatcattttctaatctaaaaagaaaccagctttagaaacagtgtgatgtagtaaaaggatatgagctttggagctagatagacttaggttcagccctcggcagaggccataagccagctggacacatttgaggggctgtttatccatctgtgccttcgtatctgaaaaaggggatgcttccatccaactcgctggctggttgtgagaat

SEQ ID NO: 39787 - DNA, 1117 bp, Homo sapiens
aagggtccttgatggtgaaactccagcaggcaggaaaccagtggctccaagatccttttcatctctaagcctcagtggctcttacatctttccaccactttggcacacagctcaatgccagacacataggagctattcagtatgttttggatttaattgaagctgattaagcttcagcactcagacactacacattatggagcacyccttaaaataccatcaaaactacctatctccagcctcttaactctagaggtctcacagcactttgctcacaaatccttaaaacaggaatgtgaagtaagaagatgaaatgtaatatactgtcctcttaatgggtactcattaccaaataaggatatattttcaccctcacttgctctcactttctctttgtctgtcaaaactttaaacctaaagaacaattcaattttatggagagaggtcaagtgttcttattttccccagtcccacattttaaagctatcacttcaaatgcctgagtaatttctattaaaccgatctctttaaataaaaagcaccatataataaaatatgactcctctgggactagagattcagttaaggattttctgtaaattgatgtgggtgctttctaacacgtacctaaagcaacaaaaccatagtggttgctgggtagagttttgtatcagaagtatagactgaattagacagttctggctgactgtttcaggagtaagatgaaatcgaagtggtggaaagattcctaaaatcaagagtgagttccttgaaggctggatcaggtcacagttgtatatgagcttagaatatgtgatgaataaacacgcaagcctggctgaggtcacaaaacaaaaaaacaaaaaaacaaaaaaacagctggcacgttcgggtttaagaaaaatgctaagtcaggaatgtttatttgccaaagagcacccaactcttccctgcatttgggttctagtgaccttaagttatccccccagtaacccgaattccctagtgaccttaagttatccccccagtaacccgaattccctagtgactttaagttatcccccagtaacctgaattctctagattttcagcattcagatctttatcttttcttaga

SEQ ID NO: 39788 - DNA, 1117 bp, Homo sapiens
aagggtccttgatggtgaaactccagcaggcaggaaaccagtggctccaagatccttttcatctctaagcctcagtggctcttacatctttccaccactttggcacacagctcaatgccagacacataggagctattcagtatgttttggatttaattgaagctgattaagcttcagcactcagacactacacattatggagcactccttaaaataccatcaaaactacctatctccagcctcttaactctagaggtctcacagcactttgctcacaaatccttaaaacaggaatgtgaagtaagaagatgaaatgtaatatactgtcctcttaatgggtactcattaccaaataaggatatattttcaccctcacttgctctcactttctctttgtctgtcaaaactttaaacctaaagaacaattcaattttatggagagaggtcaagtgttcttattttccccagtcccacattttaaagctatcacttcaaatgcctgagtaatttctattaaaccgatctctttaaataaaaagcaccatataataaaatatgactcctctgggactagagattcagttaaggattttctgtaaattgatgtgggtgctttctaacacgtacctaaagcaacaaaaccatagtggttgctgggtagagttttgtatcagaagtatagactgaattagacagttctggctgactgtttcaggagtaagatgaaatcgaagtggtggaaagattcctaaaatcaagagtgagttccttgaaggctggatcaggtcacagttgtatatgagcttagaatatgtgatgaataaacacgcaagcctggctgaggtcacaaaacaaaaaaacaaaaaaacaaaaaaacagctggcacgttcgggtttaagaaaaatgctaagtcaggaatgtttatttgccaaagagcacccaactcttccctgcatttgggttctagtgaccttaagttatccccccagtaacccgaattccctagtgacyttaagttatccccccagtaacccgaattccctagtgactttaagttatcccccagtaacctgaattctctagattttcagcattcagatctttatcttttcttaga

SEQ ID NO: 39789 - DNA, 537 bp, Homo sapiens
tttttctgttgcttttttgagaaaacatagatatggtgctaaattaaatggcttaygttctgagccctcaccagtgttattatttattaaatgtcattattcattaaaatcctaataattcactaggtttttaaaaaattaaacacaggaccttgaaaaaattaaatttaaataagtaagttgaatattaatggagtgggaagcctaagggagtatgttctgaaaactagttatttatttattttaccaaaaaaagagctgtagttataaatagtattaataataacagtaataatagccagcatttattaagcattatccacattccaggcagtgtgctcagtgggttacatgcgccatttcattgcatatatagatgtgtgggaaggcattcatactggtggtcctctcctctctggattagctctctctcttatacttctttccccccaattacttatcccatgtagccagtactctgagaaggacatggcctcctccttcttgggaaaagatgcccaattccaatattcctgc

SEQ ID NO: 39790 - DNA, 537 bp, Homo sapiens
tttttctgttgcttttttgagaaaacatagatatggtgctaaattaaatggcttacgttctgagccctcaccagtgttattatttattaaatgtcattattcattaaaatcctaataattcactaggwttttaaaaaattaaacacaggaccttgaaaaaattaaatttaaataagtaagttgaatattaatggagtgggaagcctaagggagtatgttctgaaaactagttatttatttattttaccaaaaaaagagctgtagttataaatagtattaataataacagtaataatagccagcatttattaagcattatccacattccaggcagtgtgctcagtgggttacatgcgccatttcattgcatatatagatgtgtgggaaggcattcatactggtggtcctctcctctctggattagctctctctcttatacttctttccccccaattacttatcccatgtagccagtactctgagaaggacatggcctcctccttcttgggaaaagatgcccaattccaatattcctgc

SEQ ID NO: 39791 - DNA, 374 bp, Homo sapiens
atgatataatatgayatataattatatatgagtaaaggaaaaggtaaagtgttttatcatcttggattggataatgcggttcttaacgtgaaaccaagttgagaaaccaataactactttgattacataaaaaataaactgggcagaaagagatagcataaatagtttaaatacaggtgcttgcctggggaagaggggcggacatcaactgaaagggagctcaatggggggttctggaaatgttctatatcttaatctagatggtggtttcgtaggtgtatacatgtgtaaaattcgctgagctgtacagttaagatttgtgcatttatcatgcataaactattcctcagtaaaaaagaaaaaataataaagaa

SEQ ID NO: 39792 - DNA, 374 bp, Homo sapiens
atgatataatatgacatataattatatatgagtaaaggaaaaggtaaagtgttttatcatcttggattggataatgcggttcttaacgtgaaaccaagttgagaaaccaataactactttgattacataaaaaataaactgggcagaaagagatagcataaatagtttaaatacaggtgcttgcctggggaagaggggcggacatcarctgaaagggagctcaatggggggttctggaaatgttctatatcttaatctagatggtggtttcgtaggtgtatacatgtgtaaaattcgctgagctgtacagttaagatttgtgcatttatcatgcataaactattcctcagtaaaaaagaaaaaataataaagaa

SEQ ID NO: 39793 - DNA, 1309 bp, Homo sapiens
cagacacacacacgcgcgtacacacacacatgcacacgcaagctgagttccaagtgtgacatggctgccataaatcagcctggaatattaaactcaagctgccatgaaagagcctctcaactccacagcacacagaagaccaagaggtatgggacccatcttcagggaggaagccttttgcagttcaattcacttccccgggttcaagttttgtctaccaccctcgccagctgggtaacctggtgttacctaatttctcagcccgtggctcctcatcaataaaccaaagctgacctctgttgtgaggattcactgaagtgatgcttgcagagctccaagcatagggcccggcacagagtgagtgctgagtgggcactggcaagaggctctctagggattgcccgggctctctggacaatgcaaggcatgattctagtgtccagaacagcctctgacacacagggtctgaaacagccttctttattccaaaagctcagaaacccaaagctaaaagccaaccgagtaggccagagccaggaggcccaggccgccctgtttggctggaacacccgggctgccggcgtggctcggagccagcactgcaggcaggcagccttgacttcctccttcccagtcctgatagacatgagccatgcgaccctgggcaggccaccctgtctccatgagcctcagtttcctcatctgtcacatgataacagcatttaccccacagggttactgtgaggactgagtgaaacaaaatacccgaggacctttgtaccgggcacaggtgggcccctccataagtgagtcactgccactgtcatgtaacacggtaatagttcagcctgggaatgtcttccacagtctgaccacagaaccccctcacctgtgacggggtcactcgcatctccgcccactctacccggggaytcagtctaagtggagcctccctcttacccttcccagcctagcctcacgccccaccagtcccctgccacagccacacatacctggaaggccacaccttgccactgaccctgttcccacatcaaatgattttgtcaacatgaaaccaaaccacaaccaggtggatgcagagcctctgtcacactcagtccttgctcctcagtttccttcctgtgtgaccatgggagagtcattcaccctctctgggcacaaactcaatcatttgtaaagaacaggcttcagatcagatattcaagttccttccaccttgagaaacactgcagagattctactatgaagccctaatgaagacgccccatgtaactggctaactccaatg

SEQ ID NO: 39794 - DNA, 1230 bp, Homo sapiens
atttgttaattagctagatttaaccattctgcaatgtctatatatgtcaaaacatcatgttgtacatgataaaaacatacaattttttctgtcgatttaaaaaaagaaataaaacattaaaataaatttttttaatgtaaattggtttctcactcttcagaaattagcagcctgagccctcaccacaagacttccacatatgtgaagggagccaagtcgcttgttcagttcctctctttttaaaaataatccctgttctcagtattcctccctgggagcactttgaaatctgtccatcattttatctgggcatttttacacactattcacgacacctccaagcaacattgaacttccctgaaattgagaaaggcatggggagtgctgggtgggtccttgtgctgggaggaaccttgtttgggggcttctctctttgctcctggtgttggaaagatgaaaggccttatttcctgatcagcactggggacaggaaccacagatcaagtggacaagctccacctgcatcaggcatggaggcttgtccataacagaacctcagaattaggagctacagcatcagaggggccttagcaacatccattttacagatgagaaaactgagacccaaaaaagggagcgggtgcctgtggtttcctgggaagttaatgacagaaggagactggaatctagggctctgagctcaaagagctaaaatgactgatgaatggagagatggacagatgcctggatggcacagagacagacagactcaggggatgactaattggcatcttggtataaaatgatgaatgaggagaaagtcttctcccaaggctgtgttggcccatggttccaaaacctgtcctgagaccccaccccaccatcttaaaatttcctgccatggtttacaatggacaaagagagtgaatggttggatcaaacccaatgctgacttggatggaggagggaggattaaagcctacatactctttatacagcaagagtgccaggatctcatcagttcctcttcagtcattgatcatccaatggaaaaatttgctacagctacactggagtgtctgagatcattgagagacaccagccacaagggcttccctgcctggcttgcagtgagagctctttgttgaacattttgagattcaaggaggggtacacccayattaatcagctccttggtcagggttcaggcagagatggtagctggatgtg

SEQ ID NO: 39795 - DNA, 1238 bp, Homo sapiens
tgctgctcataaatgcctcacataaagttactattaaagggctctctctttttttttttaaacacacactttaaagaaagcaaaaataaaaataaaaaacttacaagtataaatgaaatgtgaacaagtaaatatactggtctgaaatcagaactgcaatgacactttatgatcattctatgtaacgatattcaattttaaaataatattttttcaagaagtttagcttgtcaaatgtcactcttttttttttttaaacttcggaacagaaataaaattagaaactcttgtggccaagactcaaaccatcaagtccatgtaaagcagcatttcattttattttgaccrtttcattttggtcaacttttagctttgactaaatgattaaactaaatttaaaaataccttagagattataaacacgcatatgcaaaaagtctaacagcaagcatattctctgcatttttctcagcactagcagtagtcaaaccccaaagtgagcacagagaaataaattattatcaaacaacaaataaccacgttacaattatttcacattacactttagtactgaactattctccaccagaggcaataaagcactctggtattaaacaatactccagtagccagcatagagactgaggaagcctaccttattttcctttaattaaaatgaaagaataaagaaaaagaaagagggaaagaaggaaacctttgaggcaaataccttttctaatcaccatttccgataatgaacaggcatacatcaggcagtttgcattacagaaccatcagcacagaacaacagtcagaggtgagtgaccccagggactatctccacagctacagcaaagcttctccctgacactaatcctccctgtcattctcccactgtgctctaaccacactgacatccgcctgcctcactgcaagcttaacggggcccttcctgactttttactgtctcccccaatcaatggttcaagcgtgctcttttcaccatgtccaaatggcagcttcactcataatcaaagtgcattgcccctgttaaagggctttccgaaaggctctcccatttgcattcatttgcaaagcaaactacttttattcactttgttctgctatcaagaatgttcgctgaagcagataaattggcataaatacaacctgccacttaagagtcagtaaataatagccaatagtagggaggattttatcaatcattctattttgta

SEQ ID NO: 39796 - DNA, 1238 bp, Homo sapiens
tgctgctcataaatgcctcacataaagttactattaaagggctctctctttttttttttaaacacacactttaaagaaagcaaaaataaaaataaaaaacttacaagtataaatgaaatgtgaacaagtaaatatactggtctgaaatcagaactgcaatgacactttatgatcattctatgtaacgatattcaattttaaaataatattttttcaagaagtttagcttgtcaaatgtcactcttttttttttttaaacttcggaacagaaataaaattagaaactcttgtggccaagactcaaaccatcaagtccatgtaaagcagcatttcattttattttgaccatttcattttggtcaacttttagctttgactaaatgattaaactaaatttaaaaataccttagagattataaacacgcatatgcaaaaagtctaacagcaagcatattctctgcatttttctcagcactagcagtagtcaaaccccaaagtgagcacagagaaataaattattatcaaacaacaaataaccacgttacaattatttcacattacactttagtactgaactattctccaccagaggcaataaagcactctggtattaaacaatactccagtagccagcatagagactgaggaagcctaccttattttcctttaattaaaatgaaagaataaagaaaaagaaagagggaaagaaggaaacctttgaggcaaataccttttctaatcaccatttccgataatgaacaggcatacatcaggcagtttgcattacagaaccatcagcacagaacaacagtcagaggtgagtgaccccagggactatctccacagctacagcaaagcttctccctgacactaatcctccctgtcattctcccactgtgctctaaccacactgacatccgcctgcctcactgcaagcttaacggggcccttcctgactttttactgtctcccccaatcaatggttcaagcgtgctcttttcaccatgtccaaatggcagcttcactcataatcaaagtgcattgcccctgttaaagggctttccgaaaggctctcccatttgcattcatttgcaaagcaaactacttttattcactttgttctgctatcaagaatgttcsctgaagcagataaattggcataaatacaacctgccacttaagagtcagtaaataatagccaatagtagggaggattttatcaatcattctattttgta

SEQ ID NO: 39797 - DNA, 1043 bp, Homo sapiens
atgcattctaacccaagtttctgcctgagccagtacccatcagctcagccccagaaagtcaagcccattgttgtggtttatgccaacctctaaacaatttctgagccaagagcctgcctcccatttctgcacacacccctcaccacctccatcccccaccgaggaaaaggtcctgtctacttggtctacctggagagaaagatccaggccggatggacagtcagtgcagacrggcacagtccttccctcggcagccccggcacctcttctgcttaactgggatgaggctgtctgcggtaacctcccccagactgggggcgagctgagccctgggctgatttcctccctccttccctcccacaagcacccgcgaatctcgtgctctaggctatgcgtgggactgggctctggggacacagagtggacacagacctaggcctgcctcttcaggagctcacagcctacaggtgacagatgcagacagggcagtgaccgctacagtgctcagggctgtgatcatgggaatcactgggggccaaaggggcccagaagacacctctaactcagcctggggcactgaggaggctgggcggaaggaggatggcatcatggaaggaggatggcatcaaggaaaatgccatcaaactgagaacaagatggagaaagaagtctaagaaggggaaacagcacacacacagggctggaggcatgacaccacagttaggaggtacaagcgttctggaagggcttggaagacagaggctctgcaaggccagctaaatggaggggtgaggctgcggtggctagagagctcaggaaggctggagacatccgccccatttgacttaataatagcattaacaaccaaccacccatcgccacaaagagattaccacttcaacttatttaaattgatgactgcattatttcactcagtcctgccagcaggcacccttatctgtctttgatagatatggcagggacaggcagtgaagacaggaacgcagtcaggctcctctcaggagcctgggagaagacaaaaa

SEQ ID NO: 39798 - DNA, 1105 bp, Homo sapiens
ggggcaggcagggtgagaagagataaaggagtctcaacaaacaaaaagagagagtggaagtgccaggtgcagtgttctctggggcggcactccttactcctctatgccctccctttcttacccagtwccagggaggcaatgaaggctgtggccacgctgctagcacagagcaggaaggcgtgcggaatactgaagtggccatcagggatccagccaaagacgacggctgcgatggacgccaggaagcccaccaccgtggcctgcacctggggacaggagtggtaactcagaaagccctgagagcagtgggcttcctaagctgaggtcataagcatctgggcagacctcttcctggctggcagtagccccaggaggcaggctggactgcatggtccagtcctcccaggctggaaggatgtctttatttatttaggttcacaccagccactagtactgggcagtgcactctgcaggagcccagaacatgttactggctgaatgagtgtgcctctggggatgggagtgaggttcaacagagccggagacttccacccagagtcaaggcctgggcctcaagggggaaggctcccagtctgaacctgtgtggtctcatggggagatgggacagcagtggcacaggacatctcagcactcctgagtctgctcatattgccaggatctgctgggactcaaaggcacgtgcaccaccaagaactgagaaccagaatgggtgatgctgggccctcctcatcttgggcgttttcctgggtaacctagttacctcctagagctactctgggggaagccagctcagtgggatactggagattcactcaggagcctgctggggctgacctaagcctttcagagattcctgactaaggggaagcttagcccaccctctctggtccctgccttcttacctggatgagggccatgttcccagtgatcatccgccagagctccttgggtgtgtccatgtgtccaatgttggcctgggaaagggagggcaaggggctggagcttcaggctggaaaaggcctgaagctccatccattaggctcctgcctagatcatgaggcagtacatgtggcctaagactctg

SEQ ID NO: 39799 - DNA, 555 bp, Homo sapiens
caaacctgcatgtgtacccctgaacctaaaataaaagttaaaaaaaataaaacacatatttttgagttggtgatgaggtggtagtggtgctgggtatagggggaggtaagagagtaggtggggatggttgatgtctgaccaaatgaattcttgcatcttcccttgcctgttaggtaaagactttgcaaggtgtaaytggtcaaaattggtgaactcctgcagaacttcaaaaaagaggatttgtttatttattgatgctgactatagggtcttactgtatagcttaagctgaaatgtatctttggcccaatagattgctgataattcttgaaacattaaacatttatattcaaacattcatctgcacattggtcatgtaaactggcaggtcagggttctgtactctttccattcaacaaatattcattgtagtcttgcttgtgaatagcaaacttttagtcctattagagagataagctataacccatataaaatattaaaatacagataaataattcaaataaaaaaagaccctactgtggtctgaaaatgttt

SEQ ID NO: 39800 - DNA, 562 bp, Homo sapiens
aacattcccattctgacaagatatgaaaggtctttaaacaactttgagactttgctggaccagacttcttgagaaaatgatttactaaaatcaagttgttaagattaccattgaacttcaaaatagtgttgctattttgcagtgctgttacagcatggagctgagccaaccatccgaaatacagatggaaggacagcattggatttagcagatccatctgccaaagcagtgcttactggtaagtctgtatactctggttattccaggaagcctgtaaagaacaaccttgccaggtaggaaatttgcctcctatgattaatgacttcagctagatttttaaaatagtgtcagttcwgtagctatccttttctacgtctagatagctgacattttattctcctctaagaaaaataaagctttctttttattttctaattgctgtttaagtatgtcattgttgccttattgggggtgagggtgatagataattgtatgttgctttagtatattcaggacattttttaaatacccctgagtttttcagataacttatgcctgccct

SEQ ID NO: 39801 - DNA, 562 bp, Homo sapiens
aacattcccattctgacaagatatgaaaggtctttaaacaactttgagactttgctggaccagacttcttgagaaaatgatttactaaaatcaagttgttaagattaccattgaacttcaaaatagtgttgctattttgcagtgctgttacagcatggagctgagccaaccatccgaaatacagatggaaggacagcattggatttagcagatccatctgccaaagcagtgcttactggtaagtctgtatactctggttattccaggaagcctgtaaagaacaaccttgccaggtaggaaatttgcctcctatgattaatgacttcagctagatttttaaaatagtgtcagttcagtagctatccttttctacgtctagatagctgacatttkattctcctctaagaaaaataaagctttctttttattttctaattgctgtttaagtatgtcattgttgccttattgggggtgagggtgatagataattgtatgttgctttagtatattcaggacattttttaaatacccctgagtttttcagataacttatgcctgccct

SEQ ID NO: 39802 - DNA, 1215 bp, Homo sapiens
tgtaaataagagcttttgtactagcccagtatttatttacattgctttgtaatataaatctgttttagaactgcagcggtttacaaaattttttcatatgtattgttcatctatacttcatcttacatcgtcatgattgagtgatctttacatttgattccagaggctatgttcagttgttagttgggaaagattgagttatcagatttaatttgccgatgggagcctttatctgtcattagaaatctttctcatttaagaacttatgaatatgctgaagatttaatttgtgatacctttgtatgtatgagacacattccaaagagctctaactatgataggtcctgattactaaagaagcttctttactggcctcaatttctagctttcatgttggaaaattttctgcagtccttctgtgaaaattagagcaaagtgctcctgttttttagagaaactaaatcttgctgttgaacaattattgtgttcttttcatggaacataagtaggatgttacatttccagggtgggaagggtaatcctaaatcatttcccaatctattctaattaccttaaatctaaaggggaaaaaaaaaatcacaaacaggactgggtagttttttatcctaagtatattttttcctgttctttttacttggttttattgctgtatttatagccaatctatacatcatgggtaaacttaacccagaactataaaatgtagttgtctcagtcccctccaggcctcctgaatgggcaagtgcagtgaaacaggtgcttcttgctcctgggttttctctccatgatgttatgcccaattggaaatatgctgtcagtttgtgcaccatatggtgaccasgcctgtgctcagtttggcagctatagaaggaaatgctgtcccataaaatgccattcctattttctaatataaaactcttttccaggaagcatgcttaagcatcttgttacagagacatacatccattatggcttggcaatctcttttatttgttgactctagctcccttcaaagtcgaggaaagatctttactcacttaatgaggacattccccatcactgtctgtaccagttcacctttattttacgttttattcagtctgtaaattaactggccctttgcagtaacttgtacataaagtgctagaaaatcatgttccttgtcctgagtaagagttaatcagagtaaatgca

SEQ ID NO: 39803 - DNA, 1027 bp, Homo sapiens
acatcctcatttaacccataccatactgtattctacttgcagtatttgctaactactccccagatagatgggctcactttgaggccaaggattgtgttctaccataatctcattccttcagcacagctcagcacctggcaaattggaggcaacaaatgtctatggatccctctgtaaccatgaacaagtcagtcagggtamctgcactgtcaaaacttacaattaactggatagtatgtatttgatgaggggaactgaattacagggaaacctaggttaggccaagtgttgctttcgtcaccaattcacagttaaggaaactgaggccacgggccacccagcttaggacttttgactataaaccctgagatctctctcccttacataagcattttgttttcattgctgttgacactttgttaatcttgcttacttaaaactaatttctgctaatagcttcagggtctttagcaactgtcagcatgtaatgtgtctgcatttcatatatataattagttttcatggcaacagtccacttttagtcaatcaacattataaacttatttatttatttatttatttatttatttattggctgatacggagttttgctcttgttgcccaggctggagtacaagggcccaatcttggctcactgcaacctccgcctcccgggttcaagcaattctcctgcctcagcctcctgagtagctgggattataggtgcccgccaccacacccggctaatttttgtattttcagtagagacggggtttcaccatggcagccaggctggtctcaaactcctcacctcaggtgatccaactcgcctcagcctcccaaagtgctgggattacaagtgtgagccaccgcgcctggcaacattataaacttataatgaatttatggagtgttactagtaaacaaaatgaatattctttaaataaaaaaaatttctaaaagcctctcaaatgtgcttgtctttctccttgcatttgctagtctctgcttaatatatgtttagctt

SEQ ID NO: 39804 - DNA, 1027 bp, Homo sapiens
acatcctcatttaacccataccatactgtattctacttgcagtatttgctaactactccccagatagatgggctcactttgaggccaaggattgtgttctaccataatctcattccttcagcacagctcagcacctggcaaattggaggcaacaaatgtctatggatccctctgtaaccatgaacaagtcagtcagggtaactgcactgtcaaaacttacaattaactggatagtatgtatttgatgaggggaactgaattacagggaaacctaggttaggccaagtgttgctttcgtcaccaattcacagttaaggaaactgaggccacgggccacccagcttaggacttttgactataaaccctgagatctctctccyttacataagcattttgttttcattgctgttgacactttgttaatcttgcttacttaaaactaatttctgctaatagcttcagggtctttagcaactgtcagcatgtaatgtgtctgcatttcatatatataattagttttcatggcaacagtccacttttagtcaatcaacattataaacttatttatttatttatttatttatttatttattggctgatacggagttttgctcttgttgcccaggctggagtacaagggcccaatcttggctcactgcaacctccgcctcccgggttcaagcaattctcctgcctcagcctcctgagtagctgggattataggtgcccgccaccacacccggctaatttttgtattttcagtagagacggggtttcaccatggcagccaggctggtctcaaactcctcacctcaggtgatccaactcgcctcagcctcccaaagtgctgggattacaagtgtgagccaccgcgcctggcaacattataaacttataatgaatttatggagtgttactagtaaacaaaatgaatattctttaaataaaaaaaatttctaaaagcctctcaaatgtgcttgtctttctccttgcatttgctagtctctgcttaatatatgtttagctt

SEQ ID NO: 39805 - DNA, 588 bp, Homo sapiens
tatatrtgtgtgtgtgtgtgtgtgtgtgtatatatatatatatataaaagacagccacaaaagtatgtctactgtgtggtttcatttatatgaagtttaagaacagggaaagttaatctacaagatagaaatcagaacagtggtttcctctggggggataaagattaactgaaagggaatactgggaaactttccagatgacagaatatattttgtctgggtggtggttatgtgggtgtatacacttatccaaatccaaatgtatcttgtatattcaacatacagctgtgtgtttcactgcatgtaaattttaatttactgtataataatgcgtaagtatacaggtgcatacttatatttgtgatggacatcccaacaactgaaaagtaagttctacttaaagatgaaaaaatacgatacatttaactacgtattttatctcctctttttttgaccattgtaaacataggatatcttaaaataaataataaagattttaaaaatgtttatgttgtcttttccttggtatttttctccgtgtaatttaagcttaaagagattttgcccagctagaaatttgggaaaaag

SEQ ID NO: 39806 - DNA, 588 bp, Homo sapiens
tatatatgtrtgtgtgtgtgtgtgtgtgtatatatatatatatataaaagacagccacaaaagtatgtctactgtgtggtttcatttatatgaagtttaagaacagggaaagttaatctacaagatagaaatcagaacagtggtttcctctggggggataaagattaactgaaagggaatactgggaaactttccagatgacagaatatattttgtctgggtggtggttatgtgggtgtatacacttatccaaatccaaatgtatcttgtatattcaacatacagctgtgtgtttcactgcatgtaaattttaatttactgtataataatgcgtaagtatacaggtgcatacttatatttgtgatggacatcccaacaactgaaaagtaagttctacttaaagatgaaaaaatacgatacatttaactacgtattttatctcctctttttttgaccattgtaaacataggatatcttaaaataaataataaagattttaaaaatgtttatgttgtcttttccttggtatttttctccgtgtaatttaagcttaaagagattttgcccagctagaaatttgggaaaaag

SEQ ID NO: 39807 - DNA, 588 bp, Homo sapiens
tatatatgtgtrtgtgtgtgtgtgtgtgtatatatatatatatataaaagacagccacaaaagtatgtctactgtgtggtttcatttatatgaagtttaagaacagggaaagttaatctacaagatagaaatcagaacagtggtttcctctggggggataaagattaactgaaagggaatactgggaaactttccagatgacagaatatattttgtctgggtggtggttatgtgggtgtatacacttatccaaatccaaatgtatcttgtatattcaacatacagctgtgtgtttcactgcatgtaaattttaatttactgtataataatgcgtaagtatacaggtgcatacttatatttgtgatggacatcccaacaactgaaaagtaagttctacttaaagatgaaaaaatacgatacatttaactacgtattttatctcctctttttttgaccattgtaaacataggatatcttaaaataaataataaagattttaaaaatgtttatgttgtcttttccttggtatttttctccgtgtaatttaagcttaaagagattttgcccagctagaaatttgggaaaaag

SEQ ID NO: 39808 - DNA, 588 bp, Homo sapiens
tatatatgtgtgtrtgtgtgtgtgtgtgtatatatatatatatataaaagacagccacaaaagtatgtctactgtgtggtttcatttatatgaagtttaagaacagggaaagttaatctacaagatagaaatcagaacagtggtttcctctggggggataaagattaactgaaagggaatactgggaaactttccagatgacagaatatattttgtctgggtggtggttatgtgggtgtatacacttatccaaatccaaatgtatcttgtatattcaacatacagctgtgtgtttcactgcatgtaaattttaatttactgtataataatgcgtaagtatacaggtgcatacttatatttgtgatggacatcccaacaactgaaaagtaagttctacttaaagatgaaaaaatacgatacatttaactacgtattttatctcctctttttttgaccattgtaaacataggatatcttaaaataaataataaagattttaaaaatgtttatgttgtcttttccttggtatttttctccgtgtaatttaagcttaaagagattttgcccagctagaaatttgggaaaaag

SEQ ID NO: 39809 - DNA, 588 bp, Homo sapiens
tatatatgtgtgtgtgtgtgtgtgtgtgtrtatatatatatatataaaagacagccacaaaagtatgtctactgtgtggtttcatttatatgaagtttaagaacagggaaagttaatctacaagatagaaatcagaacagtggtttcctctggggggataaagattaactgaaagggaatactgggaaactttccagatgacagaatatattttgtctgggtggtggttatgtgggtgtatacacttatccaaatccaaatgtatcttgtatattcaacatacagctgtgtgtttcactgcatgtaaattttaatttactgtataataatgcgtaagtatacaggtgcatacttatatttgtgatggacatcccaacaactgaaaagtaagttctacttaaagatgaaaaaatacgatacatttaactacgtattttatctcctctttttttgaccattgtaaacataggatatcttaaaataaataataaagattttaaaaatgtttatgttgtcttttccttggtatttttctccgtgtaatttaagcttaaagagattttgcccagctagaaatttgggaaaaag

SEQ ID NO: 39810 - DNA, 469 bp, Homo sapiens
ttagatctctagctcttggtccagcctctctcttgagctacataaacyccttatttttagctgtgggcctgacctttcctctaggcagttttttctggagctcacactcagcctggccaaaactgagctcatgtcatttctctcttcttccaaaatgaaccccacttccgatgtttctatttctggcccaatgacaccattgtcctgaggaataaggtttgaaatcttgagctttttcatccctgttccattatatgctgcctaatatactatttttctccttttacttcctttaccatgcctgccccattccaccaccaccccaccccaccccacctgcctgcacatctatctaaggaaatgtgggctctcttagcagggaaatgtgatataaatccttccttatccatccctcagagcacatgctacaaaactgacccagaataatattttgaaagttgatgaatca

SEQ ID NO: 39811 - DNA, 620 bp, Homo sapiens
gcacacacacacgtacctacatgtcaacagacacacatgcacacaccacacactcaccatacacacacacacaccccagggctgcctacccttctaatctcctacctcatggcatttgccacctcttatcttatatcacaattatttgtgtacagattttagcttctagagggcaggagccttgtctgttttgtagcacctggcacaatgtcctaaattcattaattgaaaaatcgatgtgttaggtctttcctgtgtaccatgctctatgcttgacactgaagttagataaataggacacgaactcttagaaactcacagtctgcctcaaggttctcaacagaattcaagaggtctgtgagcttagatgagaaaacaatttaccttttaattttactaatctctaaccaaagtttaacatttccttttcytctggaggtaggaaattgactagagtaagctgagcagtacctgtgactctgtcacctgtaggagtcacagatattttcgtatcgcccacagttgttataaatatctcacaatctcatatcatcaattagtgttattacaggctaagcatctccaatccggaaatccgaaatccaaaatgctctgaaacc

SEQ ID NO: 39812 - DNA, 670 bp, Homo sapiens
tatcagaagacactaactttaaaacggtacaaaacagtgagatgcaacctgaattacagaacagaaagtcaaatctatttaatgaaaaactagaagaaaaaactagcaaatacacacaaaaaaaaccccacatagtagcactacgtattgactcacaaagcggaaaagcagtggtccatgaccactcaaaatggcttgtcagttaaaggaaaaaaaaaaaaaaaaaacagccgagctcggtggctcacgcctgtaatcctagcactttgggaggccgaggtgggcggatcactaggtcaggagatccagaccatcctggctaacatggtgaggtgatgggtgcctgtagtcccagctactcgggaggctgaggcaggagaatggtgtgaccccagaaggcggagtttgcagtgagccgagatcgcgccactgcactccagcctgggcgacagagctagactccgtctcaaaaaaaaaaaaaaaaaaaaaaaaaargaaaaaagaaaaaaaaaaaccaaaacacacacacacatacacacacactcacagacccaaaaacaaaacaaaacaaaacattatttttcaacaatacaatcaatctacaacacaaaattcaaaattattttataatgctttcttaatgcaaaatatgctcatcttaatatatact

SEQ ID NO: 39813 - DNA, 1345 bp, Homo sapiens
tgcataggctcccaacaaagccaggatgcccaccctttgatatcatggcacttctgggtgtagtcataaaatttgctcacagctagtgtaagtctttgtttatctttaaggttatgttctttgtttagcaacttgaggactgagatttttatctacatttctagattctgtcagagtgcttggcaccgaataggtgctcaatattgtttgctgtcagatattaaccgctatagtgggataaattaattttttttttttttttggaacggagtgtcactctgttgccaggctggagtgcagtggcatgatctcagctcactgcarcctctgtctcccgggttcaagtgattcttctgcctcagcctcctaagtagctgggactacaggtgagcaccactatgcccagctaatttttgcattttagtagagacagggtttcaccatgttagccaggatagtctcgatctcttgaccttgtgatctgcccacctcggcctcccaaagtgctgggattacaggcgtaagccactgcgcccggcctagattaacattcttactgagaccatcaggacagtgaagtgatagcaaggtattgaaaatgcggtctataaaaaaagaaacaggctgagcgaagtggctcatgcctgtaatcccagcacttgggaggctgaagtgggcagattacttgagcccaggagttcgagaccagcttggaccacatggcgaaaactctgtctctacaaagaataaaaaattagctggatgtggtgatgtgctacttggtggggggctgaagtgggaggatcatttgagcccaggagtttgaggctggagtaaacagtgattatgcccctgcactccaacctgggcaacagagagagaccttgtctcaaaacaaacaaacaaacaaaaaggagcaaaagaaaaataaaaagcaaaaagaaataaattggggtctgaaaaggatagttgtcaccaatatacatcttagaatttgggtctattctgttgaactgaaaaaaaacaaaacaaaaccaaaaaaaacaccaaaaaaagaaaacccagcatccatgtgctagatattacttcaacatgatgggaataattatataaacacaacagaaaattttagttttattgctttttaggcaactttttgatattccactgtaatgagaagaatggagaaaaatgaacaactcttcagaatgtatatgaggttaagtacaactacatgagactgcaaaacaaaaagcgggggatggggagccagtttatatttacagacacatcttaagtaccttaaaataacatgaaatctttttgttgtgataaaatacagaca

SEQ ID NO: 39814 - DNA, 1345 bp, Homo sapiens
tgcataggctcccaacaaagccaggatgcccaccctttgatatcatggcacttctgggtgtagtcataaaatttgctcacagctagtgtaagtctttgtttatctttaaggttatgttctttgtttagcaacttgaggactgagatttttatctacatttctagattctgtcagagtgcttggcaccgaataggtgctcaatattgtttgctgtcagatattaaccgctatagtgggataaattaattttttttttttttttggaacggagtgtcactctgttgccaggctggagtgcagtggcatgatctcagctcactgcagcctctgtctcccgggttcaagtgattcttctgcctcagcctcctaagtagctgggactacaggtgagcaccactatgcccagctaatttttgcattttagtagagacagggtttcaccatgttagccaggatagtctcgatctcttgaccttgtgatctgcccacctcggcctcccaaagtgctgggattacaggcgtaagccactgcgcccggcctagattaacattcttactgagaccatcaggacagtgaagtgatagcaaggtattgaaaatgcggtctataaaaaaagaaacaggctgagcgaagtggctcatgcctgtaatcccagcacttgggaggctgaagtgggcagattacttgagcccaggagttcgagaccagcttggaccacatggcgaaaactctgtctctacaaagaataaaaaattagctggatgtggtgatgtgctacttggtggggggctgaagtgggaggatcatttgagcccaggagtttgaggctggagtaaacagtgattatgcccctgcactccarcctgggcaacagagagagaccttgtctcaaaacaaacaaacaaacaaaaaggagcaaaagaaaaataaaaagcaaaaagaaataaattggggtctgaaaaggatagttgtcaccaatatacatcttagaatttgggtctattctgttgaactgaaaaaaaacaaaacaaaaccaaaaaaaacaccaaaaaaagaaaacccagcatccatgtgctagatattacttcaacatgatgggaataattatataaacacaacagaaaattttagttttattgctttttaggcaactttttgatattccactgtaatgagaagaatggagaaaaatgaacaactcttcagaatgtatatgaggttaagtacaactacatgagactgcaaaacaaaaagcgggggatggggagccagtttatatttacagacacatcttaagtaccttaaaataacatgaaatctttttgttgtgataaaatacagaca

SEQ ID NO: 39815 - DNA, 572 bp, Homo sapiens
  misc_feature (1)...(572): n = A,T,C or G
annnnnnnnnnnnnnnnnnnnnnnnnnnnnnnnnnnnnnnnnnnnnnnnnnnnnnnnnnnnnnnnnnnnnnnnnnnnnnnnnnnnnnnnnnnnnnnnnnnnatacaatagagaatgtggtctaaaatatgttgagcagtgtcagtctagcaattgctccatccactactgagaactagaatttttaccaactcatttgggattttaaaaaagtaactgtctcttgagaataagaatataaataataacagctcatattgatatgccttttcagtggatgaagttccatcatgcaacactgttgcattcagttttcacagccacttgtgacataggtgatttttgtatttgctttaacagatgagtaaactgaggcttggaaaarttcaaggactgtcacataagtagtgaggggtggggtcgggcctgcagctgggtttccaaatggggaaggaggcctagaatcagcatctgctttgggatgtggcttgcagacatgctcaccatttattagcctcctcatctcttgaggaatcacttaatctttcttatctgtaaagtagaattaaatgc

SEQ ID NO: 39816 - DNA, 753 bp, Homo sapiens
ctcttctgtgttggttcctcccacagccctcaccttcacctctctccaatgttctcttcctctctctctccttgcctaggccctcttcccctaactggccgtctatggaaccaagwgtcgattttgtttcatggagtaaattcatatttggtttcttatccttaatttttacaacaattaggtggaataatctttcttttcttttttcatttttttttttgagacagtctcactctgtcattcagattgaagtaagtagcgcgatctgtgctcactgcagccttgaactcccaggctcaagtgaccctcccaccttggcttcctgagtagctgagactacaggcatgcaccatcaggtccagctaatttttaaattttctgtagagataggggtctcactatgttgctcaggctagtctcaaactcctgggctcaggcagtcctcccgcctcggcctctcaaagtgctgggattacaggagtgagctgccatgcctggcctggtggaataatctttctgtctaaagctgccttttgctttcatagccctcaatggggtgtgtgtgttgcaagggaggtgaattatcccggcacgcggggaggtgccccataaacgggtccaaccaccaggtgggcttcctggtcctccactccctggctctttccacctgtccaggcatcactccgtgcatcacttaggcaagctgaggaacaaccactgtgaggggaggggctcctataaaagcccgttacc

SEQ ID NO: 39817 - DNA, 753 bp, Homo sapiens
ctcttctgtgttggttcctcccacagccctcaccttcacctctctccaatgttctcttcctctctctctccttgcctaggccctcttcccctaactggccgtctatggaaccaagtgtcgattttgtttcatggagtaaattcatatttggtttcttatccttaatttttacaacaattaggtggaataatctttcttttcttttttcatttttttttttgagacagtctcactctgtcattcagattgaagtaagtagcgcgatctgtgctcactgcagccttgaactcccaggctcaagtgaccctcccaccttggcttcctgagtagctgagactacaggcatgcaccatcaggtccagctaatttttaaattttctgtagagataggggtctcactatgttgctcaggctagtctcaaactcctgggctcaggcartcctcccgcctcggcctctcaaagtgctgggattacaggagtgagctgccatgcctggcctggtggaataatctttctgtctaaagctgccttttgctttcatagccctcaatggggtgtgtgtgttgcaagggaggtgaattatcccggcacgcggggaggtgccccataaacgggtccaaccaccaggtgggcttcctggtcctccactccctggctctttccacctgtccaggcatcactccgtgcatcacttaggcaagctgaggaacaaccactgtgaggggaggggctcctataaaagcccgttacc

SEQ ID NO: 39818 - DNA, 578 bp, Homo sapiens
ctgccacaatacagtcctcaccctgcatcaggagctcagatgggggaagccagcagggctgsaggcctgagagtcacaggtgcttggaggggagagaaaagcaccacagagagccaggccctgcctacaagtcacatttttaggggtctagtggtctgggcaggctgggagatgctctctaaaggaaaggcaagaaatattgcccaacgtctcccaccacaaacagaaagtgcaggtggtcagccccagggctcacctgccctttgccagggtcacgagtcaggcccaggctgcaccctccacacaatcctcaaggagagttcctgccaggctgggacaactgcaccgggacctgatgccctgggaaggacagggttgcatttaacagaaacagttaaacctgaaaggatgagcttgcttttccccggggccatcggatggtttatagaaagttctgcccatcaggacaagacctcacatgacaccatcagaggaactgatttcacaccacagagggaggaagagggcacatgcagtaggtccactggtcacagcacacacatgctcctgggagcttc

SEQ ID NO: 39819 - DNA, 578 bp, Homo sapiens
ctgccacaatacagtcctcaccctgcatcaggagctcagatgggggaagccagcagggctgcaggcctgagagtcacaggtgcttggaggggagagaaaagcaccacagagagccaggccctgcctacaagtcacatttttaggggtctagtggtctgggcaggctgggagatgctctctaaaggaaaggcaagaaatattgcccaacgtctcccaccacaaacagaaagtgcaggtggtcagccccagggctcacctgccctttgccagggtcacgagtcaggcccaggctgcaccctccacacaatcctcaaggagakttcctgccaggctgggacaactgcaccgggacctgatgccctgggaaggacagggttgcatttaacagaaacagttaaacctgaaaggatgagcttgcttttccccggggccatcggatggtttatagaaagttctgcccatcaggacaagacctcacatgacaccatcagaggaactgatttcacaccacagagggaggaagagggcacatgcagtaggtccactggtcacagcacacacatgctcctgggagcttc

SEQ ID NO: 39820 - DNA, 578 bp, Homo sapiens
ctgccacaatacagtcctcaccctgcatcaggagctcagatgggggaagccagcagggctgcaggcctgagagtcacaggtgcttggaggggagagaaaagcaccacagagagccaggccctgcctacaagtcacatttttaggggtctagtggtctgggcaggctgggagatgctctctaaaggaaaggcaagaaatattgcccaacgtctcccaccacaaacagaaagtgcaggtggtcagccccagggctcacctgccctttgccagggtcacgagtcaggcccaggctgcaccctccacacaatcctcaaggagagttcctgccaggctgggacaactgcaccgggacctgatgccctgggaaggacagggttgcatttaacagaaacagttaaacctgaaaggatgagcttgcttttccccggggccatcggatggtttatagaaagttctgcccatcaggacaagacctcacatgacaccatcagaggaactgatttcayaccacagagggaggaagagggcacatgcagtaggtccactggtcacagcacacacatgctcctgggagcttc

SEQ ID NO: 39821 - DNA, 578 bp, Homo sapiens
ctgccacaatacagtcctcaccctgcatcaggagctcagatgggggaagccagcagggctgcaggcctgagagtcacaggtgcttggaggggagagaaaagcaccacagagagccaggccctgcctacaagtcacatttttaggggtctagtggtctgggcaggctgggagatgctctctaaaggaaaggcaagaaatattgcccaacgtctcccaccacaaacagaaagtgcaggtggtcagccccagggctcacctgccctttgccagggtcacgagtcaggcccaggctgcaccctccacacaatcctcaaggagagttcctgccaggctgggacaactgcaccgggacctgatgccctgggaaggacagggttgcatttaacagaaacagttaaacctgaaaggatgagcttgcttttccccggggccatcggatggtttatagaaagttctgcccatcaggacaagacctcacatgacaccatcagaggaactgatttcacrccacagagggaggaagagggcacatgcagtaggtccactggtcacagcacacacatgctcctgggagcttc

SEQ ID NO: 39822 - DNA, 550 bp, Homo sapiens
tgaggtctatgtattaacatcacactgaatataaactctataagtgggaagcattgtttccaggaagagcaaataccacattccaaccatattgatggtygttgagtcagggccctcttcttctatgagattcctgtcgaaactaccttatcagcaactgtctggctgagagcaagaataatcttttgcctcttttatacacagattttatgtagttaattaaataaatgttaatttaaattaataaaaatcatactaaagcaatttctaaaaatatatttatcagccacttttttttgtaggtcttcaatagaagaatgaaatccatgaaaaatcctcgggttttcagagtttcatcttgatatcttagcattctgtcaagctataggctgagggagaaacattctgcagcttcccttagaagacccactttggatccacctttcctcagaggcatttttcaggatttctgtgtctagatttctccctgggaaaaccagggataaaaccatcagtcacatcacttgcagcccagggaatgttcagctgg

SEQ ID NO: 39823 - DNA, 550 bp, Homo sapiens
tgaggtctatgtattaacatcacactgaatataaactctataagtgggaagcattgtttccaggaagagcaaataccacattccaaccatattgatggtcgttgagtcagggccctcttcttctatgagattcctgtcgaaactaccttatcagcaactgtctggctgagagcaagaataatcttttgcctcttttatacacagattttatgtagttaattaaataaatgttaatttaaattaataaaaatcatactaaagcaatttctaaaaatatatttatcagccacttttttttgtaggtcttcaatagaakaatgaaatccatgaaaaatcctcgggttttcagagtttcatcttgatatcttagcattctgtcaagctataggctgagggagaaacattctgcagcttcccttagaagacccactttggatccacctttcctcagaggcatttttcaggatttctgtgtctagatttctccctgggaaaaccagggataaaaccatcagtcacatcacttgcagcccagggaatgttcagctgg

SEQ ID NO: 39824 - DNA, 550 bp, Homo sapiens
tgaggtctatgtattaacatcacactgaatataaactctataagtgggaagcattgtttccaggaagagcaaataccacattccaaccatattgatggtcgttgagtcagggccctcttcttctatgagattcctgtcgaaactaccttatcagcaactgtctggctgagagcaagaataatcttttgcctcttttatacacagattttatgtagttaattaaataaatgttaatttaaattaataaaaatcatactaaagcaatttctaaaaatatatttatcagccacttttttttgtaggtcttcaatagaagaatgaaatccatgaaaaatcctcgggttttcagagtttcatcttgatatcttagcattctgtcaagctataggctgagggagaaacattctgcagcttcccttagaagacccactttggatccacctttcckcagaggcatttttcaggatttctgtgtctagatttctccctgggaaaaccagggataaaaccatcagtcacatcacttgcagcccagggaatgttcagctgg

SEQ ID NO: 39825 - DNA, 1059 bp, Homo sapiens
cagccagctccctctttgcctggtctccacttttctgcagaagctgtcttgagagtaccgcaatctcctgcacacagctgtctatctcatggtctgtttcctaagcatagttgtccctctgcccctccgattccatctgtgaaatgggaatggaacacctagccagaggtagtctggaggcaagcatgccagtgtgcgtgtgatgtgtgcacaagattcctggcacacactaagtgttcataaatatttgccaaaatcccygccaggtcatctggagctgagaaagtcacagagaagggattcttcacctctattcatctgcaacgtggggccgataagcctgtcttatgggtcattgtaaactctgctgggcagtgctggggacagtgggggtgagtggttcctcctcagacttcatctctggtccctctttctttccctgcagggtgctcagtgaaagccccgggcagaaggctggccacttctttatctcacaggagccagccactggccagctgttatcggggatttgtgagcttgtaaaacatggccagctatcacgccatctccccagggcacagtgctttctcggctgggcctaatcaccgggtgatcttggcctgtgattgaggggagagctgggttaccctgggaaggcagcagccaagtcctctggaaaaggctcgggtgggtggaggagctggggggcatcagggccaggcctgctggggctgacacatcgctggaatggaccatggcagattccatgccccactcttccttcttctcttccctgcagggagatggtagagtgtggggggaccctgcgaggctccagggacccagaaggagataattccagaaaaaacattcagaactgcatcaatgtcagtggccccctcacccattcctcgttaagcacccactcagtgccaggccctctgctaggctatccaaagtgctggactttgctgtgtgacctcaggccagtcacttgccctctctgagcctcaagtgtccaataggaataatagtgcccgtctcaccaggttactatgg

SEQ ID NO: 39826 - DNA, 559 bp, Homo sapiens
tagcaggtcggtgattacaggtgtatttagaaaaagaaagacaggacagggatagggagtgctgggagtggagggggcgcttctatttaaaatttgaaattgctgggaggtcagggaggcttcactgaggagcaaagtcctgacaaaggggagacaagtaacatctggtgtagaatagatgaaacaaatgcacaatcgctgagcttatattaagtaccaaaactttgctagacatacttacattcgtcatctcctagtgaattccttggaacaacttaatgagaggaacaacagtacataaatttttaatgaagtagcagaagctcagagccaaagtcaaagacaaagtttcatcttcacgggcttacagcctgtgtaaagaagttaaacaattcagcagctatgcttcttttcatagtartagttactatgatagtttcctggacacatggttgcccaaaatagagactacacttcccagttaccattgcagcaggtggccatgtgactaagttctggcagagggatgtaagtaggtgtgttacaaacaaattcctaa

SEQ ID NO: 39827 - DNA, 593 bp, Homo sapiens
aacaaatattctatactttagctctcagtccctggcttgcttgaacttattaaacacccagttattcctcactgatgtgggtgacagcagttgcagcagcccacaagtttcaggtgggtccaacctcaagcccatttctaaaactctgtgggatctttatatgtgatggtgaccatatctgaccccctgcttcttggaggtgctagtttttctttatttggaaatccaattcatccaaagtagctggagctttgaatgaagaccaactcctttcatagcaaattattcatgtattcaggcaatgattcagcagcaggtagcaaatgctgactgtgtgcaaagggcttgactgtctcacttcagagaattagaaaggaagtcagacatttagtccyaggctcaagggaaagaacagatgcaaatccacatgaaccctcctaccagaagtgaatgcatgtgtagcaaatgaatgtgtaactaaattaatacattaagtagtataagtcaaccttggactacttatctatatctctaatgcatcctcccattggcaaacacgaggaatttacttatggaatcgtatgtggcatata

SEQ ID NO: 39828 - DNA, 1180 bp, Homo sapiens
actattatatttgctttcatttaatccttagagtaatcctaaaagattatatattattatctctattttaacacaattacttacaccttagaaaggttcaataacttgcccaagggagccactattaagtgacagcccagatcagaaccctcatctgactttaaagagcttgtttttatctgctattatagctcacgttctttcagcacaatgctgtgtgccaggtactatgctaaatcttacattattgtcttcattttgaagatgagatcactgaggctatgagatgttaactcttcaaggtcacaccaagctgaccttaaagtgtgtcaaatgctagctgtcttctttaaagaggcaggtcttgaacctaggatttcttactttcagtttccctgcctttctgcactaactgcctagattaaccccayggtccaggatgcgccagccatggcacactgtaagtttatatttgcaattctggtctcaattgactcttgtgagacagaaaattttgactgataaagcaacttagtatgaccattaaaaatattgacaaacgttatatgacctaatcatttttaaaagattgttcagtcactcccaggttaggtctgcttctttgtacctattctctttcttcttagatacctggcaaaatgtacgtgtgtttcactccggctctctcccttcctctaatggcatcacttaggttcaatagtggagaagggtaattgaatctatttttcagactttcattggtgggctctcttctgggcacatattattagaattgtgggaatcagacatttctttaaagtagagattgttgggctgagccaaggagattattaaaagacattacaatgccagccttagaaaatatatgggacacctagattccccactctgtccctcccttcccagcacaaagcttattcaaacacctttccaggaacagcattcttccttcagccggtcctcagcagcctgcccttgcaatccacttgcccaccacacattgggccaatgattctcagtgtggtcccaggttcagcagcatcagcatcaccagggaacttactagaaataaagaaactcaggcttcatcccgaagccacttaatcagaaaccctgggagtgaggccagccctctgttttcacaagcccttctggttat

SEQ ID NO: 39829 - DNA, 1180 bp, Homo sapiens
actattatatttgctttcatttaatccttagagtaatcctaaaagattatatattattatctctattttaacacaattacttacaccttagaaaggttcaataacttgcccaagggagccactattaagtgacagcccagatcagaaccctcatctgactttaaagagcttgtttttatctgctattatagctcacgttctttcagcacaatgctgtgtgccaggtactatgctaaatcttacattattgtcttcattttgaagatgagatcactgaggctatgagatgttaactcttcaaggtcacaccaagctgaccttaaagtgtgtcaaatgctagctgtcttctttaaagaggcaggtcttgaacctaggatttcttactttcagtttccctgcctttctgcactaactgcctagattaaccccatggtccaggatgcgccagccatggcacactgtaagtttatatttgcaattctggtctcaattgactcttgtgagacagaaaattttgactgataaagcaacttagtatgaccattaaaaatattgacaaacgttatatgacctaatcatttttaaaagattgttcagtcactcccaggttaggtctgcttctttgtacctattctctttcttcttagatacctggcaaaatgtacgtgtgtttcactccggctctctcccttcctctaatggcatcacttaggttcaatagtggagaagggtaattgaatctatttttcagactttcattggtgggctctcttctgggcacatattattagaattgtgggaatcagacatttctttaaagtagagattgttgggctgagccaaggagattattaaaagacattacaatgccagccttagaaaatatatgggacacctagattccccactctgtccctcccttcccagcacaaagcttattcaaacacctttccaggaacagcattcttccttcagccggtcctcagcagcctgcccttgcratccacttgcccaccacacattgggccaatgattctcagtgtggtcccaggttcagcagcatcagcatcaccagggaacttactagaaataaagaaactcaggcttcatcccgaagccacttaatcagaaaccctgggagtgaggccagccctctgttttcacaagcccttctggttat

SEQ ID NO: 39830 - DNA, 726 bp, Homo sapiens
cattgattcttgctgagcctcaccatgaaccaggcactaatctgagcactgtacacatgttgattcattttaascccatgagaaaggcatgattgtcagtcttgatgtacagataaggaaataagaggcccagagtgattatgggacttgcccaatgtcacctggcaaagttttgtttgaccccagcagtctggttccagaacctaggcttttaaccaaaactacactgcctttgtattagttcattctcacccttctaataacaaatacccaagactgggtaatttataaagaaaagaggtttaattgactcacatggctgggaaggcctcaggaaacttacaatcatggcagaaggcacctcttcacagggcagcaggagagagagtgaatgccagcaagggaaatgccagacgcttataaaaccattaggtcttatgagaactcactcactatcatgagaagagcatgagggaaaccacccccatgatcaattcacttcccatgaggtccgtttctcaacatctggggattacaactcaagatgagatttgggcggggacacagccaaaccatatcagtcttgcatgtgatctgattgatttttcatttaattttcagaagtcagtgccttgagtgcttaactttgcacccagggttctagttacttctggatgcttatctttcttttggactataaactcctggaaggcagatgcttatcta

SEQ ID NO: 39831 - DNA, 554 bp, Homo sapiens
agttttagatcctctgtgaaagaagtcattgctactgccctctaatgaacagaacaaaggagaatccaggctcctcccagcctgccttctctctcttgttaaacagtaaaattagcgccaaatgcccaagtattaattcatctgcttccaagcctttataaaacaatgtgtttatatgaatgaaactgtacttaaaaagggtaagtctatttcagtatgtccccatagctcctaaaagtacaatttttttaaaaaaaatcagtttyaaatgcttacttccataaacagtacacttatttttcccaggctatcaatttcgccttcatctttgactcactgaatttccacagtccctgatattctccatgccaggccaccagcacaaaatgacctttcactcctgacaaaatgtaattaatgctttttgtgaaataaagcagcaggcaggaccagaaatatgggaagaaaaatgagagggaaatgtttatggcattgtcccccagggcttttcccaaaaacaggatgctgtttgtagggactgggtttctctataa

SEQ ID NO: 39832 - DNA, 554 bp, Homo sapiens
agttttagatcctctgtgaaagaagtcattgctactgccctctaatgaacagaacaaaggagaatccaggctcctcccagcctgccttctctctcttgttaaacagtaaaattagcgccaaatgcccaagtattaattcatctgcttccaagcctttataaaacaatgtgtttatatgaatgaaactgtacttaaaaagggtaagtctatttcagtatgtccccatagctcctaaaagtacaatttttttaaaaaaaatcagttttaaatgcttacttccataaacagtacacttatttttcccaggctatcaatttygccttcatctttgactcactgaatttccacagtccctgatattctccatgccaggccaccagcacaaaatgacctttcactcctgacaaaatgtaattaatgctttttgtgaaataaagcagcaggcaggaccagaaatatgggaagaaaaatgagagggaaatgtttatggcattgtcccccagggcttttcccaaaaacaggatgctgtttgtagggactgggtttctctataa

SEQ ID NO: 39833 - DNA, 766 bp, Homo sapiens
tccaattttctgtgttagtccattcttgcattactataaaggaatacctgagactgggtaatttatgagaaaagaggtttcattggctcatggttctgcaggctgtacaggaaccatagcagcttctgcttctggggaagcttcaagaagcagggcagaaggcaaagggggagaaaagcatctcacatggccagagcaatagcaagaaagagagcggggacgtgctacacagttttaaataaccagatcttgtgagaactcactcactatcatgagagcagcaccaaaggaatggtgctaaaccattcatgaaggatccacccccatgatccaatcacctcccacccagccccacttccaacattggggattcaacgtgagatttgatgggacacagatctacaccatatcaatttgtaacactttttctgctgactctcacactgtgggatatttcctaatatatttgcaattgtttatttagagatcttttttttttcctgractcattttactgatgggttggtctttttataatccacacttttactgatgatgcagcccttaaaggctttatgcagagattttagctccgacatctccggttgtagaaaccaaagatctaatcttctacccacaaaacatcaaaaccctagtttataggtcatctatttattgagtactgtacccacttacttaccactctggcctcatctttctctttttcttttagtgcctggcttactttcttgtgaatttagctatg

SEQ ID NO: 39834 - DNA, 596 bp, Homo sapiens
gagaaatacacaagaaaaagaatctaaaacccctagtacattgtgtaatacaactaggcgttcaataggtaccatcaccactcactctgctgtttgaaatcaggcagacctacatttgaatcccagcaatccatttaattgctgtgcatcctgaaccccagccccctcatctgtaaaatgaaagctaaccaatagccaactcttaagggtataaagaagatttagaaacaaacatgccaacaacccattagtgatattgtgatttccccaaatgaaaatggtatctatgggctttggatcctactaatattgcctaacttctaggtgattttgtcaactgcagctacrccctgttggatcagaggagcctgctgatgacaggtttaagacctgctaggctcctagaacttgtgcaattgcctcctaattctcagctaagacccctgggaagattgtcgagatattcagaaaaaaaacactcaggagctcccaaagcctgggaagtttatgcaagggaaatgtaacatttttgtgtctgaagctcagtattcccaggcccccagaccccatcccagatgtggtgggcaatcatgatg

SEQ ID NO: 39835 - DNA, 518 bp, Homo sapiens
tcaagctctgatattcagtgtgtccttccagggccctctcaggtttctactgygggaggcaaggcacctatttcccacacaatgtcctaccaagacacacaatggtgtaagctaatgaaatttccccaatgaaattgagtgctgttaggaagtagaaatcaatgctgggaagctaaacaatggcaaatgtccactccatcactgatgctgctatcgtcccaacttataattccaaccagaacctctctcctttacctcctatggagctgggactacagtgaggtaagcaaggcccccagggtacaatatttagggagacactcattctcacatgctaacctgtgcttacaggaccctgagagtgagtgcctccttaaattttggtccctgtgtgcctgcttgcctaactctagtcctgacacttaaccctcaggcctgtgtattggccattgatccataggcctctcaagttcatcacgattacaatggatcctaccaccttccactgacaaccttgt

SEQ ID NO: 39836 - DNA, 574 bp, Homo sapiens
ccaataacaaaaacaacaacataatcatacattgtttgygagcatagtagtacttactgacattttggagggagaaatttacatttaagacacaaataacttcaaattgaagtgaaggtgtaacctgctctctcatgccctttgcctccctgcattccatttctgccccttgctcctgcttgctggctttcccacccatgctgcaatctctgcacctctccctcccttctccttttctagagagaaaaacaaactcctctcactttctcaggcagagaagcttgactgttcttttgttgctgaagctcttgctaaaacttttattccaaaatagtttattgagggttttgttttgttttgttttgtttttttgagacgaagtttcactcttgttgcccaggctggagttcaatggcacgatctcagctcaccgcaacctcagcctcccgggttcacgcgattctcctgcctcagccaccccagtagctgggattacaggcatgcgccaccacgcccggctaattttgtatttttagtagagaaggggtttctccatgttggtcaggctggtctc

SEQ ID NO: 39837 - DNA, 574 bp, Homo sapiens
ccaataacaaaaacaacaacataatcatacattgtttgcgagcatagtagtacttactgacattttggagggagaaatttacatttaagacacaaataacttcaaattgaagtgaaggtgtaacctgctctctcatgccctttgcctccctgcattccatttctgccccttgctcctgcttgctggctttcccacccatgctgcaatctctgcacctctccctcccttctccttttctagagmgaaaaacaaactcctctcactttctcaggcagagaagcttgactgttcttttgttgctgaagctcttgctaaaacttttattccaaaatagtttattgagggttttgttttgttttgttttgtttttttgagacgaagtttcactcttgttgcccaggctggagttcaatggcacgatctcagctcaccgcaacctcagcctcccgggttcacgcgattctcctgcctcagccaccccagtagctgggattacaggcatgcgccaccacgcccggctaattttgtatttttagtagagaaggggtttctccatgttggtcaggctggtctc

SEQ ID NO: 39838 - DNA, 674 bp, Homo sapiens
ttcaaatgttggagaaggaggctgctgctgtctacttcagcacttctgttgtagcctttctttttctcatctatcagtgcctctatacaccccaaattagctatgagtctttgattcactctggctttttccgtaacttgttaactaaaagcactagcttaaatgactagaatttgttggcagcaggattgagctgaaaagaagagaccatttaaacccccaaacatttgaatgctaatataacacccaaattgaacagtgggagtgtaaaatataatttggtgctgtgctctgtagtttggagttctttcgagaactaacagtatgtaggtttcatagagattcataactaagtattttaagcacaaaggaatgagtacgtgtgctgcttatttgtgctgatttattcccacctactgagttgcagcatcttattttcagggaaacctactgacagcagcagcaacaggggtgtaatcaacctgcatcaacaattcaacaagcaaactccaacaagaaagcattatgcaacctaagaaatgccgccgccgccactgcactctgttacagaagtgtccacgtttctaacaaacacagtgcagctgtttagatacagcttattaggtacacgcgygcgtgtgtgtgtgtgtgtgtgtgtgtgtgtgtatgtgtgt

SEQ ID NO: 39839 - DNA, 674 bp, Homo sapiens
ttcaaatgttggagaaggaggctgctgctgtctacttcagcacttctgttgtagcctttctttttctcatctatcagtgcctctatacaccccaaattagctatgagtctttgattcactctggctttttccgtaacttgttaactaaaagcactagcttaaatgactagaatttgttggcagcaggattgagctgaaaagaagagaccatttaaacccccaaacatttgaatgctaatataacacccaaattgaacagtgggagtgtaaaatataatttggtgctgtgctctgtagtttggagttctttcgagaactaacagtatgtaggtttcatagagattcataactaagtattttaagcacaaaggaatgagtacgtgtgctgcttatttgtgctgatttattcccacctactgagttgcagcatcttattttcagggaaacctactgacagcagcagcaacaggggtgtaatcaacctgcatcaacaattcaacaagcaaactccaacaagaaagcattatgcaacctaagaaatgccgccgccgccactgcactctgttacagaagtgtccacgtttctaacaaacacagtgcagctgtttagatacagcttattaggtacacgcgcgygtgtgtgtgtgtgtgtgtgtgtgtgtgtgtatgtgtgt

SEQ ID NO: 39840 - DNA, 674 bp, Homo sapiens
ttcaaatgttggagaaggaggctgctgctgtctacttcagcacttctgttgtagcctttctttttctcatctatcagtgcctctatacaccccaaattagctatgagtctttgattcactctggctttttccgtaacttgttaactaaaagcactagcttaaatgactagaatttgttggcagcaggattgagctgaaaagaagagaccatttaaacccccaaacatttgaatgctaatataacacccaaattgaacagtgggagtgtaaaatataatttggtgctgtgctctgtagtttggagttctttcgagaactaacagtatgtaggtttcatagagattcataactaagtattttaagcacaaaggaatgagtacgtgtgctgcttatttgtgctgatttattcccacctactgagttgcagcatcttattttcagggaaacctactgacagcagcagcaacaggggtgtaatcaacctgcatcaacaattcaacaagcaaactccaacaagaaagcattatgcaacctaagaaatgccgccgccgccactgcactctgttacagaagtgtccacgtttctaacaaacacagtgcagctgtttagatacagcttattaggtacacgcgcgcgtgtgtgtgtgtgtgtgtgtgtgtrtgtgtatgtgtgt

SEQ ID NO: 39841 - DNA, 674 bp, Homo sapiens
ttcaaatgttggagaaggaggctgctgctgtctacttcagcacttctgttgtagcctttctttttctcatctatcagtgcctctatacaccccaaattagctatgagtctttgattcactctggctttttccgtaacttgttaactaaaagcactagcttaaatgactagaatttgttggcagcaggattgagctgaaaagaagagaccatttaaacccccaaacatttgaatgctaatataacacccaaattgaacagtgggagtgtaaaatataatttggtgctgtgctctgtagtttggagttctttcgagaactaacagtatgtaggtttcatagagattcataactaagtattttaagcacaaaggaatgagtacgtgtgctgcttatttgtgctgatttattcccacctactgagttgcagcatcttattttcagggaaacctactgacagcagcagcaacaggggtgtaatcaacctgcatcaacaattcaacaagcaaactccaacaagaaagcattatgcaacctaagaaatgccgccgccgccactgcactctgttacagaagtgtccacgtttctaacaaacacagtgcagctgtttagatacagcttattaggtacacgcgcgcgtgtgtgtgtgtgtgtgtgtgtgtgtgtgtrtgtgtgt

SEQ ID NO: 39842 - DNA, 1116 bp, Homo sapiens
tcattatttatcttcttctcatgctgaactacaagttctgcgagggccagccagccgacctttgccttgcctaggtgtcctcctaggcaggggtcctccacgagatgtgctgcattggggcatgaatcaggatgtctgagacttacactgaaagccagctcagcccaggtgcagtcgactttccaatggcctctgccatagtatggtcccaaactctttcaaaagcctatgtttgttttaattataaatgcaaaattaaattatgtttagggccaattttagtaacaaattgttctttattcaaatatttaaaatgggaagtgggcatggtagttcacacctgtaatcccagcactttgggaggctgaggagggaggattgccggagccaggagttcaagaccagcctgggaagcaaagtgagaccctgtctctacaaaaaaattcaaaaattagccaggtgtggtagagtgcacctgtggtcctagcagtgggaggattgcttgagccagggaggtcgaggctgcagtgagctgtgattgtgcccctgcactccagcctgggtgacagagtaagagcctgtctcaaatataaatacataaataccatcagtaagttgaacagacataattgcagacataagaaagcataattttattttgttttcctaccacctttaaaaaaatatctgatttagtaatctttctcagacactgaacaaatcttctgagagagttcccatgccatatctgcctatatgtagtcaagagacagacttagggtcactttatactgcaaaataattttaattctgtgattagaatctacatgtaaagatgcgcttccaaactccagaattaaccragcattaggtcttcctgttttccacagctcatggcaggaagcctgcagtggggacggagaatacagttctttcactccctacgctttgctccatgtggctgcttggttttgtcctttcttagctggaaagttgaatgctggggtccccagagaggccgtggcaggactgaagctgactctaactcaatgcagggcctcttcagagctctcctgctgggctcctctctcctgggattcccttatcctgcacaga

SEQ ID NO: 39843 - DNA, 1298 bp, Homo sapiens
tgcataaaggtgacaggttactctatttggggtgacaaggtataggaaaccagaatactggaattaccccttgggctacttcaaccctcctctggcagrgtccttggcctaggaggctgggggacagcagctgggtcaactctgtcccatagcagccagggctggattgcctttgtcccttcttatgcagaatccctgaaccacttgttaagatgcagattccagagactttttcctacttagtcataatctctggaggtgggaccctagaatctacattgtaatgcccagatggtgctcatgccaagtaattagtaatttcctgtgcaaccagagctgcccatggcgtctcaaggagatgcttcagaaacgggcagacacatggatggatggatgaaaatgccacccaggatgcagaatttcaaaatgtcacaattgcagcatcagaaatcactggctgagaggggatatgttacctgagcagatgacactggcatcctcgtggtggccacagttgtgctctgaccagcccaagtgggtacactggcccaggtagtgctctacccgagtgcactggaggttgtccaggaagatgtctcctgagcctgggccaaagtgggcctcgccagggccagaaacagcctgcccacaccccaactgccggcacacaaccttggcttcattcaggtcccacaggtcgtcgcacacggtgccccaggcaccctggtggagaatctccacgcgccccaagcaccggcctgagccgcccatcagcctcagctccggccagccctctgcagacagagacacagcatgtgatttcccaaaagaccccgcctgggtccaccagtgccagctcagagagggttagggagggacattccccagtcttgagccttggggctttttcctcagatttctcacgtgttcctgagttgcaggttgtggggtcttcagacaatttaatttcattttaagtacttattgattgtcttttatgttaggcactgatgatacagctctaaaccagggatgtgatttctgtcctcagggagcctggagtctatttattagtcaaatgcaggcactgccacagtgcatcattgcatactgtgataaatgggccaaagaggggaaaaacaggatgctatgaaggggacaatagagaggaaagggctggaggacacctctttaaaaactgagaaggagctagtcaggggaagagctgaaaaagtgccctgagccagaggaatagtgtatgcgaaaaggccatgaaacaccgtttcactctgcatgca

SEQ ID NO: 39844 - DNA, 1298 bp, Homo sapiens
tgcataaaggtgacaggttactctatttggggtgacaaggtataggaaaccagaatactggaattaccccttgggctacttcaaccctcctctggcagggtccttggcctaggaggctgggggacagcagctgggtcaactctgtcccatagcagccagggctggattgcctttgtcccttcttatgcagaatccctgaaccacttgttaagatgcagattccagagactttttcctacttagtcataatctctggaggtgggaccctagaatctacattgtaatgcccagatggtgctcatgccaagtaattagtaatttcctgtgcaaccagagctgcccatggcgtctcaaggagatgcttcagaaacgggcagacacatggatggatggatgaaaatgccacccaggatgcagaatttcaaaatgtcacaattgcagcatcagaaatcactggctgagaggggatatgttacctgagcagatgacactggcatcctcgtggtggccacagttgtgctctgaccagcccaagtgggtacactggcccaggtagtgctctacccgagtgcactggaggttgtccaggaagatgtctcctgagcctgggccaaagtgggcctcgccagggccagaaacagcctgcccamaccccaactgccggcacacaaccttggcttcattcaggtcccacaggtcgtcgcacacggtgccccaggcaccctggtggagaatctccacgcgccccaagcaccggcctgagccgcccatcagcctcagctccggccagccctctgcagacagagacacagcatgtgatttcccaaaagaccccgcctgggtccaccagtgccagctcagagagggttagggagggacattccccagtcttgagccttggggctttttcctcagatttctcacgtgttcctgagttgcaggttgtggggtcttcagacaatttaatttcattttaagtacttattgattgtcttttatgttaggcactgatgatacagctctaaaccagggatgtgatttctgtcctcagggagcctggagtctatttattagtcaaatgcaggcactgccacagtgcatcattgcatactgtgataaatgggccaaagaggggaaaaacaggatgctatgaaggggacaatagagaggaaagggctggaggacacctctttaaaaactgagaaggagctagtcaggggaagagctgaaaaagtgccctgagccagaggaatagtgtatgcgaaaaggccatgaaacaccgtttcactctgcatgca

SEQ ID NO: 39845 - DNA, 1298 bp, Homo sapiens
tgcataaaggtgacaggttactctatttggggtgacaaggtataggaaaccagaatactggaattaccccttgggctacttcaaccctcctctggcagggtccttggcctaggaggctgggggacagcagctgggtcaactctgtcccatagcagccagggctggattgcctttgtcccttcttatgcagaatccctgaaccacttgttaagatgcagattccagagactttttcctacttagtcataatctctggaggtgggaccctagaatctacattgtaatgcccagatggtgctcatgccaagtaattagtaatttcctgtgcaaccagagctgcccatggcgtctcaaggagatgcttcagaaacgggcagacacatggatggatggatgaaaatgccacccaggatgcagaatttcaaaatgtcacaattgcagcatcagaaatcactggctgagaggggatatgttacctgagcagatgacactggcatcctcgtggtggccacagttgtgctctgaccagcccaagtgggtacactggcccaggtagtgctctacccgagtgcactggaggttgtccaggaagatgtctcctgagcctgggccaaagtgggcctcgccagggccagaaacagcctgcccacaccccaactgccggcacacaaccttggcttcattcaggtcccacaggtcgtcgcacacggtgccccaggcaccctggtggagaatctccacgcgccccaagcaccggcctgagccgcccatcagcctcagctccggccagccctctgcagacagagacacagcatgtgatttcccaaaagaccccgcctgggtccaccagtgccagctcagagagggttagggagggacattccccagtcttgagccttggggctttttcctcagatttctcacgtgttcctgagttgcaggttgtggggtcttcagacaatttaatttcattttaagtacttattgattgtcttttatgttaggcactgatgatacagctctaaaccagggatgtgatttctgtcctcagggagcctggagtctatttattagtcaaatgcaggcactgccacagtgcatcattgcatactgtgataaaygggccaaagaggggaaaaacaggatgctatgaaggggacaatagagaggaaagggctggaggacacctctttaaaaactgagaaggagctagtcaggggaagagctgaaaaagtgccctgagccagaggaatagtgtatgcgaaaaggccatgaaacaccgtttcactctgcatgca

SEQ ID NO: 39846 - DNA, 1298 bp, Homo sapiens
tgcataaaggtgacaggttactctatttggggtgacaaggtataggaaaccagaatactggaattaccccttgggctacttcaaccctcctctggcagggtccttggcctaggaggctgggggacagcagctgggtcaactctgtcccatagcagccagggctggattgcctttgtcccttcttatgcagaatccctgaaccacttgttaagatgcagattccagagactttttcctacttagtcataatctctggaggtgggaccctagaatctacattgtaatgcccagatggtgctcatgccaagtaattagtaatttcctgtgcaaccagagctgcccatggcgtctcaaggagatgcttcagaaacgggcagacacatggatggatggatgaaaatgccacccaggatgcagaatttcaaaatgtcacaattgcagcatcagaaatcactggctgagaggggatatgttacctgagcagatgacactggcatcctcgtggtggccacagttgtgctctgaccagcccaagtgggtacactggcccaggtagtgctctacccgagtgcactggaggttgtccaggaagatgtctcctgagcctgggccaaagtgggcctcgccagggccagaaacagcctgcccacaccccaactgccggcacacaaccttggcttcattcaggtcccacaggtcgtcgcacacggtgccccaggcaccctggtggagaatctccacgcgccccaagcaccggcctgagccgcccatcagcctcagctccggccagccctctgcagacagagacacagcatgtgatttcccaaaagaccccgcctgggtccaccagtgccagctcagagagggttagggagggacattccccagtcttgagccttggggctttttcctcagatttctcacgtgttcctgagttgcaggttgtggggtcttcagacaatttaatttcattttaagtacttattgattgtcttttatgttaggcactgatgatacagctctaaaccagggatgtgatttctgtcctcagggagcctggagtctatttattagtcaaatgcaggcactgccacagtgcatcattgcatactgtgataaatgggccaaagaggggaaaaacaggatgctatgaaggggacaatagagaggaaagggctggaggacacctctttaaaaactgagaaggagctagtcaggggaagagctgaaaaagtgccctgagccagaggaatagtgtatgcraaaaggccatgaaacaccgtttcactctgcatgca

SEQ ID NO: 39847 - DNA, 1220 bp, Homo sapiens
tgcatcaaagaaaatgcgaaaccgacacagctacacttgatgcaccactacctttctacccccacatccgcacgtcctcaccatctgtttctttgttgatcaccagtaaatagtgtaggctcccagagcttgggggcctttgcagcctccataccagcactggccccctggacccaccttatgtactcttaacctgtcttttctcattcctttgactctgctggactctgtagcccccacggcctggtgtcaggtctgatcaccccaacagaaacaggcaccataatttgcagaatgaagtaaactaatttgtaaaacagataagttgtattatacaaaactacaacatgcaagacaaatgatctaaacagctttatagtcccatctattccatgataaaactataaacaagctgcttttaaatagtatctttgcatggatttgtgttttaaggacacgaccactgactcttctaataactcacctggtttccaatactggtcaatcactaccatgctaaaaagggttgttggttgaaaatctgtagaagggttttttatttttttccccgctcacagccagggaatttattctctggagaaattaaatcccgaaggtccattcttgcagacatcaggtgaactgagggtagagctgagatctggacgtgttagctgtctttccccattctgctgctggaaaaccagcagagagacatcacctaacttgcatcagctccttagtgcctcattcttaaatgcaaacagatagccaggaatgcctggatctttaagaaaagtatccagcctaagaggcataaattagaacaactagaaaaacagagaaaagaaacagggacaacaaaaggagaaaaaagttttgagtagagttataatacgtatactgagacagttagaaaaggtactgcatctgtgaaacaagaacagaaagttatgaaaaaggaaaagccaggcaataagaaaatgcacttggaaattaaaaaatacaatggctgaattttytttaaaaaccaaacacttaaaggataatgttgaataaaactttaatacacagcaaaagatcttaaaatgcaaaattaaaaacaaataaattacaaaatttagctgatcaatataggaaatccaacatctgtctaagggatttcaaggcggaaaacagacaagaggaaattatcaaacaaataattcaagaaaatttgc

SEQ ID NO: 39848 - DNA, 1181 bp, Homo sapiens
catacaaggccatattattcataaagtaattttattctacgaaactcatggacagagatacgtaaaatataaagagatttatggcaacgcatacaaggcttaactgcacgtttacaggtaatagttacttcctgatatccagaatgttcataaccatattggcgttaagattttctaatacatcgactctcagaactataatttgtgaatttatgatattggagagagctaaacataaacatgtgcctagaattcaaccattcacttcttgtatattagttctctcattttttaaggtattcaaccaccatgctgaaaaggggtactgcacctgatttagaaaaggaaactgactcaggtagaacacctaaattgctcaagatcacacaccttgaaastgaaagaatttacagctctttctattatacagagctacctcccaaagtgaccctatgccttttcacctagcttggactgatgctggggacctcagcatccatatctcctggtttcccaggcaagtctttacctgttgatggaagtgtggaggacacaggggttatggccagtgaagtctccgaagtgaccccaactatatggaacaacaaaaaagtcattataaataacaatgtaacattaaaaaatataaataaaaaatagtgaaaatttcttcaagaattcaacccacagcttaatagccatcttatttggaaaattatgttttcatctaagtctccatcatctctgttaccttgaggattctgtattcagggcattccttaccataaaagaaactggtcctacagagctgtcctgatttcatgccagggccgactgcagaagaacaagttcttaatggccttggccagcccaggtcttcacccctcctgctatagggctccagaataactgcagaatgtgctgagactgcaatatcctgggacaagaagaactgtctgggacagcttgggctttgtcctcatcctagagcaggatgctcctcctagaacagtatgctctgcaacatgagccaagtggcccccagcaatatcaaaccctgagtggaatgctttcagggtccctcgctgtgttgtgaagtggagcacatgcagatgagactccatccaccctgggcagctttccttatccttgggggaccacctccccatggtcctaggctt

SEQ ID NO: 39849 - DNA, 740 bp, Homo sapiens
gaaaagaaaagaaattaaagtaagagggaaagtttcccacataattttttcccaattcatttctgaaaaaagcataaaaactgaaggaggcaaaaacaagtataggctgggcgtggtggctcacgcctgtaatcccagcactttgggaggccgaggtgggtggatcacctgaggtcaggagtttgagaccagcctgaccaacatggtgaaaccctgtctctattaaaaatataaaaattacccaggcatggtggcagatgcctgttatcccagctacttgggaggcttaggcaggagaatcatttggacccrggaggcggaggttgcagtgagccgagattgcgccattgcactccagtctgggcgacagactctattaaaaaaaaaaaaaagaaaagaaaagaaaagaaagaaaaatataggccagtctcaattttacatttctataaaattcagaatttcagcaaactgaaaaatgacgtctgccgggcatggtggcgcacaccagtatttcagctattcgggaggctgaggcaggagaatcacttgagcccagcctgagcaacatagcgagaccttgtctctaaaaaaaaaaaaaaaaaaaaaaaaaaattacaccaataaagcaaggacaatttaacattacaaaacactttattattgttcacttcattaacagatgagaaaagaaaagccttttgaacatctcaagagatggagaaaaagcatttgataaaatt

SEQ ID NO: 39850 - DNA, 1129 bp, Homo sapiens
  misc_feature (1)...(1129): n = A,T,C or G
attttcagatgtatatgtccgaaatggtcagtatacgattatatatacgctgttaaattatccattgaaatcacattgtgtaccttctcactacattttttaacctttatgttataaagcagatacagaatattatactagcgtggnttaacgtggataataatttgtggggggaacattctggtaagtagcaaccagatcaagaaataagattttgctggtccctgttctgtgtcctgtctcaattccaggctcctcccttccctcagaaagaactgaaagtcaacttcaaactctttgtggtctgtattacttttaaatcttgatcaatgttgtgtgtatatatatatatatatatatwtattttttttttgagatggagtctcgctgtgtcacccaggctggagtgcagtggcgcagtctcagctcactgcagcctccacctcctgtgttcaagcagtcctcctgcctcaggcaccagactagcaggtgagctgcttgttttggtgcaggttgtaggctctgtatttggaagatttaggtatggcaaatcagggtggcccagcccaccctgacttctagtcaaccagctacaaattctatgcttcccatgacccccttgggttcaataatctgctagaatgactcacagaactcaggaaagtgctacacttacaattacagttttactacagcaaatggctgccaattggaaccaaagggagagtcccaaatacaaagctttcttgtcccatctccagggagttgagacctgtcacttcctagcctattagtgaaggggtggccttcccctccacacctgtgggtgtttctcatcgggtgggacgagagactgagaaaagaaagagacacagagacaaagtatagagaaagaaaagtgggcccaggggaccgccgctcagaatacggagaacccgcgccaggacccgcgccccaggcaccggtctctgagttccctcagtatttattgatcattatttctcggagagggggatgtggcaggacaatagggtaatagtgggagagggtcagcaggaaaacatgtgatctaatgtctctgtgtcataaacaaggttaagaaaaaggtgctgtgtgctttgatgtgcac

SEQ ID NO: 39851 - DNA, 1129 bp, Homo sapiens
  misc_feature (1)...(1129): n = A,T,C or G
attttcagatgtatatgtccgaaatggtcagtatacgattatatatacgctgttaaattatccattgaaatcacattgtgtaccttctcactacattttttaacctttatgttataaagcagatacagaatattatactagcgtggnttaacgtggataataatttgtggggggaacattctggtaagtagcaaccagatcaagaaataagattttgctggtccctgttctgtgtcctgtctcaattccaggctcctcccttccctcagaaagaactgaaagtcaacttcaaactctttgtggtctgtattacttttaaatcttgatcaatgttgtgtgtatatatatatatatatatatatwttttttttttgagatggagtctcgctgtgtcacccaggctggagtgcagtggcgcagtctcagctcactgcagcctccacctcctgtgttcaagcagtcctcctgcctcaggcaccagactagcaggtgagctgcttgttttggtgcaggttgtaggctctgtatttggaagatttaggtatggcaaatcagggtggcccagcccaccctgacttctagtcaaccagctacaaattctatgcttcccatgacccccttgggttcaataatctgctagaatgactcacagaactcaggaaagtgctacacttacaattacagttttactacagcaaatggctgccaattggaaccaaagggagagtcccaaatacaaagctttcttgtcccatctccagggagttgagacctgtcacttcctagcctattagtgaaggggtggccttcccctccacacctgtgggtgtttctcatcgggtgggacgagagactgagaaaagaaagagacacagagacaaagtatagagaaagaaaagtgggcccaggggaccgccgctcagaatacggagaacccgcgccaggacccgcgccccaggcaccggtctctgagttccctcagtatttattgatcattatttctcggagagggggatgtggcaggacaatagggtaatagtgggagagggtcagcaggaaaacatgtgatctaatgtctctgtgtcataaacaaggttaagaaaaaggtgctgtgtgctttgatgtgcac

SEQ ID NO: 39852 - DNA, 1129 bp, Homo sapiens
  misc_feature (1)...(1129): n = A,T,C or G
attttcagatgtatatgtccgaaatggtcagtatacgattatatatacgctgttaaattatccattgaaatcacattgtgtaccttctcactacattttttaacctttatgttataaagcagatacagaatattatactagcgtggnttaacgtggataataatttgtggggggaacattctggtaagtagcaaccagatcaagaaataagattttgctggtccctgttctgtgtcctgtctcaattccaggctcctcccttccctcagaaagaactgaaagtcaacttcaaactctttgtggtctgtattacttttaaatcttgatcaatgttgtgtgtatatatatatatatatatatatattttttttttgagatggagtctcgctgtgtcacccaggctggagtgcagtggcgcagtctcagctcactgcagcctccacctcctgtgttcaagcagtcctcctgcctcaggcaccagactagcaggtgagctgcttgttttggtgcaggttgtaggctctgtatttggaagatttaggtatggcaaatcagggtggcccagcccaccctgacttctagtcaaccagctacaaattctatgcttcccatgacccccttgggttcaataatctgctagaatgactcacagaactcaggaaagtgctacacttacaattacagttttactacagcaaatggctgccaattggaaccaaagggagagtcccaaatacaaagctttcttgtcccatctccagggagttgagacctgtcacttcctagcctattagtgaaggggtggccttcccctccacacctgtgggtgtttctcatcgggtgggacragagactgagaaaagaaagagacacagagacaaagtatagagaaagaaaagtgggcccaggggaccgccgctcagaatacggagaacccgcgccaggacccgcgccccaggcaccggtctctgagttccctcagtatttattgatcattatttctcggagagggggatgtggcaggacaatagggtaatagtgggagagggtcagcaggaaaacatgtgatctaatgtctctgtgtcataaacaaggttaagaaaaaggtgctgtgtgctttgatgtgcac

SEQ ID NO: 39853 - DNA, 1184 bp, Homo sapiens
atatttgttaagaaagcaaacactgaagaagtcggtgagaaagcagtttttccctacaaggkgggccctgtctccaggcagccacttcctggatgggctcatttcatctttccactggcagtgggaagggtacacaaatactgacctaaaatcggagtcgatggcacaaaatataactgtgtaagttacacagacccattgtggtggttcatgcctgtaatcccagcactttgggaggccgccgcaggcagatcgctggagctcaaactcctgagctgtggattacagtgtccttggggcactgttaggttaatctgtagctatgtggcaatatgaagtactttcgagtgataagtaaatagctcaagggggtgggaactacgaggtgactgctgtgtcattttaatgtctctctgggcctgataatttaaaaggactccgcattcctcagatgatgattattattattttctcactatgaggcctcagactttaaaatccctcaaactggcccaggcacagtggctcatgcctgtaatcccagcatttttggaggccaaggcgggcagatcacctgaggtcaggagttcaagaccagcctggccaacatggtgcaaccccatctctaccaaaaatacaaaaattagctgggtgtgagggtgcacgcctatagtcccagctacttgagagactggggcaggagaatcacttgaacccaggaggcagaggttgcagtgagcagagattgcaccactgcactccagcctgggtgacagagctgagcaacagagaaagactccgtctcaaaaaaaagaaataaagaaattctaacaattaaaaataaagaaaagcataatactgtaataatactccaaagaaggagtagctggaagcagtaagcgcctcaaatcaggatcacctggagcacttgaaacctcaccacccccacccacacacccagtgtttccagttttactgaatcagtccagagtggatgctggagaatctgcatctcttagaatctcccaagtgatgccgatgctgctgctctgagtgctatgctttgagaacagctgccctaaagcacactaatagttgttacacatgcatcatctccaactgcaggtactttaagaatttcccttgagaaactctagccttccagaacagggagcgccttctcc

SEQ ID NO: 39854 - DNA, 1184 bp, Homo sapiens
atatttgttaagaaagcaaacactgaagaagtcggtgagaaagcagtttttccctacaaggggggccctgtctccaggcagccacttcctggatgggctcatttcatctttccactggcagtgggaagggtacacaaatactgacctaaaatcggagtcgatggcacaaaatataactgtgtaagttacacagacccattgtggtggttcatgcctgtaatcccagcactttgggaggccgccgcaggcagatcgctggagctcaaactcctgagctgtggattacagtgtccttggggcactgttaggttaatctgtagctatgtggcaatatgaagtactttcgagtgataagtaaatagctcaagggggtgggaactacgaggtgactgctgtgtcattttaatgtctctctgggcctgataatttaaaaggactccgcattcctcagatgatgatkattattattttctcactatgaggcctcagactttaaaatccctcaaactggcccaggcacagtggctcatgcctgtaatcccagcatttttggaggccaaggcgggcagatcacctgaggtcaggagttcaagaccagcctggccaacatggtgcaaccccatctctaccaaaaatacaaaaattagctgggtgtgagggtgcacgcctatagtcccagctacttgagagactggggcaggagaatcacttgaacccaggaggcagaggttgcagtgagcagagattgcaccactgcactccagcctgggtgacagagctgagcaacagagaaagactccgtctcaaaaaaaagaaataaagaaattctaacaattaaaaataaagaaaagcataatactgtaataatactccaaagaaggagtagctggaagcagtaagcgcctcaaatcaggatcacctggagcacttgaaacctcaccacccccacccacacacccagtgtttccagttttactgaatcagtccagagtggatgctggagaatctgcatctcttagaatctcccaagtgatgccgatgctgctgctctgagtgctatgctttgagaacagctgccctaaagcacactaatagttgttacacatgcatcatctccaactgcaggtactttaagaatttcccttgagaaactctagccttccagaacagggagcgccttctcc

SEQ ID NO: 39855 - DNA, 1184 bp, Homo sapiens
atatttgttaagaaagcaaacactgaagaagtcggtgagaaagcagtttttccctacaaggggggccctgtctccaggcagccacttcctggatgggctcatttcatctttccactggcagtgggaagggtacacaaatactgacctaaaatcggagtcgatggcacaaaatataactgtgtaagttacacagacccattgtggtggttcatgcctgtaatcccagcactttgggaggccgccgcaggcagatcgctggagctcaaactcctgagctgtggattacagtgtccttggggcactgttaggttaatctgtagctatgtggcaatatgaagtactttcgagtgataagtaaatagctcaagggggtgggaactacgaggtgactgctgtgtcattttaatgtctctctgggcctgataatttaaaaggactccgcattcctcagatgatgattattattattttctcactatgaggcctcagactttaaaatccctcaaactggcccaggcacagtggctcatgcctgtaatcccagcatttttggaggccaaggcgggcagatcacctgaggtcaggagttcaagaccagcctggccaacatggtgcaaccccatctctaccaaaaatacaaaaattagctgggtgtgagggtgcacgcctatagtcccagctacttgagagactggggcaggagaatcacttgaacccaggaggcagaggttgcagtgagcagagattgcaccactgcactccagcctgggtgacagagctgagcaacagagaaagactccgtctcaaaaaaaagaaataaagaaattctaacaattaaaaataaagaaaagcataatactgtaataatactccaaagaaggagtagctggaagcagtaagcgcctcaaatcaggatcacctggagcacttgaaacctcaccacccccacccacacacccagtgtttccagttttactgaatcagtccaragtggatgctggagaatctgcatctcttagaatctcccaagtgatgccgatgctgctgctctgagtgctatgctttgagaacagctgccctaaagcacactaatagttgttacacatgcatcatctccaactgcaggtactttaagaatttcccttgagaaactctagccttccagaacagggagcgccttctcc

SEQ ID NO: 39856 - DNA, 1184 bp, Homo sapiens
atatttgttaagaaagcaaacactgaagaagtcggtgagaaagcagtttttccctacaaggggggccctgtctccaggcagccacttcctggatgggctcatttcatctttccactggcagtgggaagggtacacaaatactgacctaaaatcggagtcgatggcacaaaatataactgtgtaagttacacagacccattgtggtggttcatgcctgtaatcccagcactttgggaggccgccgcaggcagatcgctggagctcaaactcctgagctgtggattacagtgtccttggggcactgttaggttaatctgtagctatgtggcaatatgaagtactttcgagtgataagtaaatagctcaagggggtgggaactacgaggtgactgctgtgtcattttaatgtctctctgggcctgataatttaaaaggactccgcattcctcagatgatgattattattattttctcactatgaggcctcagactttaaaatccctcaaactggcccaggcacagtggctcatgcctgtaatcccagcatttttggaggccaaggcgggcagatcacctgaggtcaggagttcaagaccagcctggccaacatggtgcaaccccatctctaccaaaaatacaaaaattagctgggtgtgagggtgcacgcctatagtcccagctacttgagagactggggcaggagaatcacttgaacccaggaggcagaggttgcagtgagcagagattgcaccactgcactccagcctgggtgacagagctgagcaacagagaaagactccgtctcaaaaaaaagaaataaagaaattctaacaattaaaaataaagaaaagcataatactgtaataatactccaaagaaggagtagctggaagcagtaagcgcctcaaatcaggatcacctggagcacttgaaacctcaccacccccacccacacacccagtgtttccagttttactgaatcagtccagagtggatgctggagaatctgcatctcttagaatctcccaagtgatgccgatgctgctgctctgagtgctatgctttgagaacagctgccctaaagcacactaatagttgttacacatkcatcatctccaactgcaggtactttaagaatttcccttgagaaactctagccttccagaacagggagcgccttctcc

SEQ ID NO: 39857 - DNA, 524 bp, Homo sapiens
  misc_feature (1)...(524): n = A,T,C or G
tttttaaaatacccacctcattttttacacccacatcataaatcaccgagagggagaattaggcctgtggacctccctttttgtagtacctcatatgtaatttttttttttttttttacagattcatgttttttggtacaagwgaacgttttataacgaaaaggcttttttgttgttgtttttattctctataaaaatacctctgggtgaaaattgttaagaaagctaattattgtatctttacatgactctaaatttggtctatttaaaaagtcaaaacatagacatttggaaatgactttctcctttcagtactgaagttgagagggagaaggaaaaaaagtgagaaattccagtgcctggatgttcccaggctaatttctagacaagtgagttttgataagttcaagtttcagatgagaatttcttttttcttctaacaatggttttcnccacatcgtgagttaaaatgtctctgaaagagtctgaaaaaatatatatattaatgtggagaattatttaca

SEQ ID NO: 39858 - DNA, 539 bp, Homo sapiens
tcaggtgatttagtaatctttacagctcatttcacagtctttcacaactttttcccacattcactatcacactccattctctttccacgccaaagtaagaggaattatttaaccctatctaagaactcataaaatactaatacaacttaagatcccctcaaaaaactaccttgtggtcaacaccggaggaaaggccccttgacagggaaaaggaatcttcccaacastcacacagggaagggacgagaggactatttcatcgtgaggtttggagctttggaaaggctatgcacatgttatttaagtatggtataggcaatccatttcatgaggaacaaagaattaggcaccacagttaattttttcgtgccattttgatatttttgttttactgtaactaaatgactcaaagtatagtccgatccagagagagaagccacccttcgtttgggcttaatctcaaaacacagatgtatatttcaatcaacagatgacatttgagtctctgagggaattttgtcttaaccaaaaacctctga

SEQ ID NO: 39859 - DNA, 736 bp, Homo sapiens
ttttttcaatttctacaaagccaccacatgggtgagaagtggttctgtccttcaggtgaagctgcgtaaattcctgggctctagaggagttacaggtgatgacttagctaagttaatcatcacattccatcctcctcgctaccttaatctgttggagaatgagcacataactcatgtagggcctttcctggccaatggggcttaacttggaggctcctgtttaagggttgtggatctctttcctggtagaggtgaggctggacctgcttcagccaccttgcattagacggggccagaaaatgaagctaatccccagcaaaaaatagccacaaaatagaggaaactccsgtctggtaactttgttgagctgttggtcaagttatacctgaagctcaaatatacttatggagtgtggagtgacacaaacctatacattttttttaatggtgaaacagtctggctgtcagttgtgaccaaaggaggaggggaagcatagcacctattccatacacactccaacacatccctgttccctgtgccccttgctggctttatgttttcaccacagctcttgtcatcctctcatactatgtcctttacttatttagtttgttgtttgtctacatcctctccccatccgtgatgaaatggatactctatgattgcaaggaattttatctattttgctcactgatggattctcagcttctaaaatgagttcttggcgcacagcatg

SEQ ID NO: 39860 - DNA, 736 bp, Homo sapiens
ttttttcaatttctacaaagccaccacatgggtgagaagtggttctgtccttcaggtgaagctgcgtaaattcctgggctctagaggagttacaggtgatgacttagctaagttaatcatcacattccatcctcctcgctaccttaatctgttggagaatgagcacataactcatgtagggcctttcctggccaatggggcttaacttggaggctcctgtttaagggttgtggatctctttcctggtagaggtgaggctggacctgcttcagccaccttgcattagacggggccagaaaatgaagctaatccccagcaaaaaatagccacaaaatagaggaaactcccgtctggtaactttgttgagctgttggtcaagttatacctgaagctcaaatatacttatggagtgtggagtgacacaaacytatacattttttttaatggtgaaacagtctggctgtcagttgtgaccaaaggaggaggggaagcatagcacctattccatacacactccaacacatccctgttccctgtgccccttgctggctttatgttttcaccacagctcttgtcatcctctcatactatgtcctttacttatttagtttgttgtttgtctacatcctctccccatccgtgatgaaatggatactctatgattgcaaggaattttatctattttgctcactgatggattctcagcttctaaaatgagttcttggcgcacagcatg

SEQ ID NO: 39861 - DNA, 736 bp, Homo sapiens
ttttttcaatttctacaaagccaccacatgggtgagaagtggttctgtccttcaggtgaagctgcgtaaattcctgggctctagaggagttacaggtgatgacttagctaagttaatcatcacattccatcctcctcgctaccttaatctgttggagaatgagcacataactcatgtagggcctttcctggccaatggggcttaacttggaggctcctgtttaagggttgtggatctctttcctggtagaggtgaggctggacctgcttcagccaccttgcattagacggggccagaaaatgaagctaatccccagcaaaaaatagccacaaaatagaggaaactcccgtctggtaactttgttgagctgttggtcaagttatacctgaagctcaaatatacttatggagtgtggagtgacacaaaccyatacattttttttaatggtgaaacagtctggctgtcagttgtgaccaaaggaggaggggaagcatagcacctattccatacacactccaacacatccctgttccctgtgccccttgctggctttatgttttcaccacagctcttgtcatcctctcatactatgtcctttacttatttagtttgttgtttgtctacatcctctccccatccgtgatgaaatggatactctatgattgcaaggaattttatctattttgctcactgatggattctcagcttctaaaatgagttcttggcgcacagcatg

SEQ ID NO: 39862 - DNA, 736 bp, Homo sapiens
ttttttcaatttctacaaagccaccacatgggtgagaagtggttctgtccttcaggtgaagctgcgtaaattcctgggctctagaggagttacaggtgatgacttagctaagttaatcatcacattccatcctcctcgctaccttaatctgttggagaatgagcacataactcatgtagggcctttcctggccaatggggcttaacttggaggctcctgtttaagggttgtggatctctttcctggtagaggtgaggctggacctgcttcagccaccttgcattagacggggccagaaaatgaagctaatccccagcaaaaaatagccacaaaatagaggaaactcccgtctggtaactttgttgagctgttggtcaagttatacctgaagctcaaatatacttatggagtgtggagtgacacaaacctatacattttttttaatggtgaaacagtctggctgtcagttgtgaccaaaggaggaggggaagcatagcacctattccatacacactccaacacatccctrttccctgtgccccttgctggctttatgttttcaccacagctcttgtcatcctctcatactatgtcctttacttatttagtttgttgtttgtctacatcctctccccatccgtgatgaaatggatactctatgattgcaaggaattttatctattttgctcactgatggattctcagcttctaaaatgagttcttggcgcacagcatg

SEQ ID NO: 39863 - DNA, 736 bp, Homo sapiens
ttttttcaatttctacaaagccaccacatgggtgagaagtggttctgtccttcaggtgaagctgcgtaaattcctgggctctagaggagttacaggtgatgacttagctaagttaatcatcacattccatcctcctcgctaccttaatctgttggagaatgagcacataactcatgtagggcctttcctggccaatggggcttaacttggaggctcctgtttaagggttgtggatctctttcctggtagaggtgaggctggacctgcttcagccaccttgcattagacggggccagaaaatgaagctaatccccagcaaaaaatagccacaaaatagaggaaactcccgtctggtaactttgttgagctgttggtcaagttatacctgaagctcaaatatacttatggagtgtggagtgacacaaacctatacattttttttaatggtgaaacagtctggctgtcagttgtgaccaaaggaggaggggaagcatagcacctattccatacacactccaacacatccctgttccctgtgccccttsctggctttatgttttcaccacagctcttgtcatcctctcatactatgtcctttacttatttagtttgttgtttgtctacatcctctccccatccgtgatgaaatggatactctatgattgcaaggaattttatctattttgctcactgatggattctcagcttctaaaatgagttcttggcgcacagcatg

SEQ ID NO: 39864 - DNA, 595 bp, Homo sapiens
ttaatttttctgatctttaaatttatttgttcttcagagtctctttcgaaccagtagtcatatctgtgttgtttcctcatggctaaatgaaatatataacatatttgtatgacagtcatgattttacttttttttttttgaaaattgtctcttaacagttttccagagatgcctagtgagttcttctaatggaaccaagcaaacttaacgagagaagtgcacctcataagcggtttaagcccagaccagtctttcttggcttctaaaggtgactccaaattggcaatatagcactgctgactttctttttgttgttattgttgttttgagacagagtctcaatctgtcactcacgctggagtgcagtggtgcgatstcagctcactgaaacctccacttcccaagctcaagcgattctccagccccagcctccagagtaactgggattacaggcatgagccaccaaagcctggctaatttttgtattttttgtacagatggggtttcaccatgttgcccaagctggtattgtacccctgagctcaaagcaatccttctgccatggcctcccaatgtgctgggattacaggcgtga

SEQ ID NO: 39865 - DNA, 825 bp, Homo sapiens
caaatgtgtaggagaaatcactcaccaactccttgattcaacattccagggttattccttcttttcttcttaaaaaaaattagtagaatacacgtaacttaaaatttaccatcttaaccatgtttaagggaacaggtcagtggcattaagtacattcatattgttgtgcgaccatcttgcaaaattgaaactctctgcctattaaaaactaacttctgattccccacttccccaacccctggtgaccactttctctctcctctatgaatatgactcccctaggtacctcatattagtagaatcacacagtatttgccctttcgtgactggcttatttcacttaatataatgtcctcaaggttcatccattttgcagcaygcatccgaacttcctttcttcctaaggctgaatgatatttcattgtatgtgtgccatgttttgtgtatccattcatccatcagtgaactctcgaattgcttccaccttttgactattatgaataatgctgctgtggacatgggtgtacagacagacaaggccctgcctgcaattattttgtaaatataccctcaaaggctttttcttgaatcctgattctgggaattacactatactaaacactatgggggtttagaaacctaactatgacagtctctgacaccccaaagagacaggaaaatgcccccacccctctctctgcagctttcagtggagtaaataaataagtggtgactgatgtgattaaaaagacagaactagttaacaggactgggtaagatgcttaggtcaagtcaataaaagatgaagaaccactggagggtttt

SEQ ID NO: 39866 - DNA, 1045 bp, Homo sapiens
ctttgagctgctgtgtggctgctgctaagggacttctcatatgtcatagcattgctgcttaaggaggctgctagctttaccttaaacttgctgtgggtctttaaagggataatggttcatcaatacggtttggaaataatacctgagttgagactaccacctcccatctgcagaccacttggccagctcctgacctcaccccaggctgaaatgtctacctccctgctcatgtccattcccacctgggattatcctccaaggtggacttgagaagctgtgctgccagtgagaacccccaaatgtccagcccaagttcctctttatgagatgaacagaaaaaagctcagagccactggtcttaaagtcccctgctgtccactstcttcctgtatctgaggcctgtccttgccctccatgggcctcatggaagctgagaccacaatgtgaagtgcacaggtgccagcagagaaatgtgtggacgctccttgcagaaagcctggcaccagatgcaatgctgccggcatgttcccgtgacccccttgcctgggaagctgaggctggaggctaggatgagcagcatgagggctacaggtctgagaatactaggccctgagctaaattgaagttcttgtgttttctttagcatattttgattcctgatttccccaaacatcagctttcactatgagttaatagctgttctggatatatgcttattaagaggataaatttatttctaattagtaatatgcgatcgaaaagcccactgcaactcatgattttccacattaaccctagtgcacagtcaaggctgctaggagaaagagcccatcccaggaggagctacaaccccatgtagcctgcagagtaaaggagcagctcagaggggaggtgttccaagttcataggacattacctttgcccacctcccatgggtttgtacctggattctaggcaaggggagtgccacagaagaccaaaaaaggcaaaatgagcttttccctgtaatgctggtaggcaccaagggggcacaggccatgtggca

SEQ ID NO: 39867 - DNA, 1337 bp, Homo sapiens
tgcatccttcttagcagtgtctgcttttgtttagtggaagactgaagctgaaacaggaaatttctaggtcagctatacttcactctaataaaagaaaagtctagccaaaaagaacagcaaaactatggcctgggctttttggagtgtcttgtctgattacccaattattacagctcagattaggaagggattaacccctgaggttggacagatggagaacactattaaaataccccatgtggggtttcggagtgagtagcaaagtaaccacctgtccctgtttcttgggtcagtctgccctcatttagagtcagaagatcactgtctttgatgtccgagtgtggagaaactgaatagcacaggaagcaagcctggggccccacccctgtctggcccagaagcactgctctcctgagtctctgtccctatctggagccctgccctagactgacctggtaagaaatattcagctgaattacaagtgattttagggttgttattrcccagggcccttgggaacagtctggggacactttatgagactgtcacaggcagaaagatttccatttcagacctccctattcctttgtgaactattgaagaaatcggtacctctcctttcttgaacctctgcatttcaggggctacattggggctgttttgttttaagtgttctcagaagctgcagaggagtgaagtgagatctgtgtctttgtgccttttcgcccctgcactggggaggttgggacagtccctctctgggcagggaggcagagtggctttgcctcatgttccagctttgaattcgcaggcaggaaggtagtataagcagtccattcaataattaataagccacttaggtctgcttcaagtcctttatcttacagataaaggatgtgttcaggaacattaatggttgatgagaaaacattatgccaaataaaatatgttgggtaatcttgaaattgtcatgatttagctgggtgagtacttctttcttatatatctaacttaagtcaattcgagaaaagcctattgagcacatagaatgcctacctcatccccagcaccacggaaacatagaatctcaaggtcagcagggtcctcaatcccaaaattgtataagcagccagccagtcacgattggaatgcttccagggaaagcacttcattgcatccagaggcagtttactccatgtcctgacaatcccactagagttttctttttagagctgattttctttttaatcttcacagcttcttcccttagttctagttatactcctgtattgagcagcttttataggccagatgcagtttcaggtgattttcatgca

SEQ ID NO: 39868 - DNA, 555 bp, Homo sapiens
cttgcactgtgataaggtttaaggagacagattgttgcaacaatagccacttctaaggaatgttattatgtcactgcagatgatgtttttaagaggtgattcagaatgatagtttcgtgattacggaaaggagttccttctcaaactgcaaaaggaaagatgaaaatagtcatgaagcctccagaactgaaattgggcaccttttatgatggatatttactttaattcaatgcaacacatatttatggggcatagactgtatcaaatacttaataaaacccattcagtttggagctcacacctaagctgcgctgtaattggattttcttaatattcattaaaaacacaaaacaatattattttacttttttttggtatttgcatttgttgcttatagtttgtggggtgaagcaaagtggtgtgaagttgaagaagggcactatgaattaagccacacaaatgcctctaaaaaatagtaaatgtaacaatggttaacattyattgaatacttactatgtgtcaggcactgctaggagatttagaaataattactta

SEQ ID NO: 39869 - DNA, 555 bp, Homo sapiens
cttgcactgtgataaggtttaaggagacagattgttgcaacaatagccacttctaaggaatgttattatgtcactgcagatgatgtttttaagaggtgattcagaatgatagtttcgtgattacggaaaggagttccttctcaaactgcaaaaggaaagatgaaaatagtcatgaagcctccagaactgaaattgggcaccttttatgatggatatttactttaattcaatgcaacacatatttatggggcatagactgtatcaaatacttaataaaacccattcagtttggagctcacacctaagctgcgctgtaattggattttcttaatattcattaaaaacacaaaacaatattattttacttttttttggtatttgcatttgttgcttatagtttgtggggtgaagcaaagtggtgtgaagttgaagaagggcactatgaattaagccacacaaatgcctctaaaaaatagtaaatgtaacaatggttaacattcrttgaatacttactatgtgtcaggcactgctaggagatttagaaataattactta

SEQ ID NO: 39870 - DNA, 555 bp, Homo sapiens
cttgcactgtgataaggtttaaggagacagattgttgcaacaatagccacttctaaggaatgttattatgtcactgcagatgatgtttttaagaggtgattcagaatgatagtttcgtgattacggaaaggagttccttctcaaactgcaaaaggaaagatgaaaatagtcatgaagcctccagaactgaaattgggcaccttttatgatggatatttactttaattcaatgcaacacatatttatggggcatagactgtatcaaatacttaataaaacccattcagtttggagctcacacctaagctgcgctgtaattggattttcttaatattcattaaaaacacaaaacaatattattttacttttttttggtatttgcatttgttgcttatagtttgtggggtgaagcaaagtggtgtgaagttgaagaagggcactatgaattaagccacacaaatgcctctaaaaaatagtaaatgtaacaatggttaacattcattgaatacttactatgtrtcaggcactgctaggagatttagaaataattactta

SEQ ID NO: 39871 - DNA, 555 bp, Homo sapiens
cttgcactgtgataaggtttaaggagacagattgttgcaacaatagccacttctaaggaatgttattatgtcactgcagatgatgtttttaagaggtgattcagaatgatagtttcgtgattacggaaaggagttccttctcaaactgcaaaaggaaagatgaaaatagtcatgaagcctccagaactgaaattgggcaccttttatgatggatatttactttaattcaatgcaacacatatttatggggcatagactgtatcaaatacttaataaaacccattcagtttggagctcacacctaagctgcgctgtaattggattttcttaatattcattaaaaacacaaaacaatattattttacttttttttggtatttgcatttgttgcttatagtttgtggggtgaagcaaagtggtgtgaagttgaagaagggcactatgaattaagccacacaaatgcctctaaaaaatagtaaatgtaacaatggttaacattcattgaatacttactatgtgtcaggcrctgctaggagatttagaaataattactta

SEQ ID NO: 39872 - DNA, 708 bp, Homo sapiens
tggataaagaaaatgtggttcacgtgcaccgtgggatatacacagccataaaaaaataaaaatatggtctttgcaccaacatgatgtagctggaggcaattatcccaagctaaattatgtaggaacagaaaaccaaataccgcatattctcacttayaagcgggagctaaacattgagtacacatgtacacaagggaacaacagacaccaagacctacttaacggtagagggtgggaggagggagaggacagaaaaactacctattgggtactgtgcttattaccaggtaacaaaataatctgtacaccaaaaccttaaagaaaagtgttttaaaaatgtaaaataaagcatatagcaaaacaaacaagacacctggtaaagttctgctcttccttcaaagacccagctcaaatgtctctttcataaagcctctctgacattctcataccccccttctctctgacctgggagaagctgtgttttcattctcccacaataacttgttcatatttctattataaaacctacaaatttaaactagctgtcagtgcatacttgtttgtctccttggctatgtgccttatgagatgcctgggatagagatcaattattattcaatttgaatccttggcattgggtgcggtggctgacacattggaggtgggcaacaaatattcgtggtataagttcactgaattacagagatg

SEQ ID NO: 39873 - DNA, 708 bp, Homo sapiens
tggataaagaaaatgtggttcacgtgcaccgtgggatatacacagccataaaaaaataaaaatatggtctttgcaccaacatgatgtagctggaggcaattatcccaagctaaattatgtaggaacagaaaaccaaataccgcatattctcacttacaagcgggagctaaacattgagtacacatgtacacaagggaacaacagacaccaagacctacttaacggtagagggtgggaggagggagaggacagaaaaactacctattgggtactgtgcttattaccaggtaacaaaataatctgtacaccaaaaccttaaagaaaagtkttttaaaaatgtaaaataaagcatatagcaaaacaaacaagacacctggtaaagttctgctcttccttcaaagacccagctcaaatgtctctttcataaagcctctctgacattctcataccccccttctctctgacctgggagaagctgtgttttcattctcccacaataacttgttcatatttctattataaaacctacaaatttaaactagctgtcagtgcatacttgtttgtctccttggctatgtgccttatgagatgcctgggatagagatcaattattattcaatttgaatccttggcattgggtgcggtggctgacacattggaggtgggcaacaaatattcgtggtataagttcactgaattacagagatg

SEQ ID NO: 39874 - DNA, 708 bp, Homo sapiens
tggataaagaaaatgtggttcacgtgcaccgtgggatatacacagccataaaaaaataaaaatatggtctttgcaccaacatgatgtagctggaggcaattatcccaagctaaattatgtaggaacagaaaaccaaataccgcatattctcacttacaagcgggagctaaacattgagtacacatgtacacaagggaacaacagacaccaagacctacttaacggtagagggtgggaggagggagaggacagaaaaactacctattgggtactgtgcttattaccaggtaacaaaataatctgtacaccaaaaccttaaagaaaagtgttttaaaaatgtaaaataaagcatatagcaaaacaaacaagacacctggtaaagttctgctcttccttcaaagacccagctcaaatgtctctttcataaagcctctctgacattctcataccccccttctctctgacctgggagaagctgtgttttcattctcccacaataacttgttcatatttctattataaaacctacaaatttaaactagctgtcagtgcatacttgtttgtctccttggctatgtgcctyatgagatgcctgggatagagatcaattattattcaatttgaatccttggcattgggtgcggtggctgacacattggaggtgggcaacaaatattcgtggtataagttcactgaattacagagatg

SEQ ID NO: 39875 - DNA, 910 bp, Homo sapiens
  misc_feature (1)...(910): n = A,T,C or G
aagaaactggttttaccggcttagttttgaccaactgatggcaatttgtacctgctaaactcccaattttttacttgctggttgtgtacgtaggcagtgaggtttgttggactgggcatgcagggacaagcagttaggccaatacatggactgaagattatatctatttatctgccttttgtttagckatttgcataaatatacagagtgggtttatttgcacacttagagctttagaataaaagaactttgactttcaaattggtttttcttgattttttaaaatttttatactccactttttcttccgtctttctcaaactcatttttccctagtagcagagttgagacttaatattacaaaactctgcttgctttaaagaatctaagaagaagaagaagaagaagaaaagacactaaagaacttccaagcagaagtttaagaagttctgctatagcccatccactcgtttgtggaatttaaatatatgcgtttttgccacaataacagcgtagccttgctagaatcatatacaaagcagcagatttgtttctataaattactgnnnnnnnnnnnnnnnnnnnnnnnnnnnnnnnnnnnnnnnnnnnnnnnnnnnnnnnnnnnnnnnnnnnnnnnnnnnnnnnnnnnnnnnnnnnnnnnnnnnnaagtgggtaaaaagagcattgaactctgagtcggaagacgacttcaaggcccagctcagcactctagcagaactttaggtaagttttttagacactatgtacttcagtttccccatgtgaaaatgagaataacgtctgttctgcctacttcacttgaactatttgaggataaaagaaggtaaaatgcaataatggtcatgaagattttataaaccttgaagtgatgtacaagtataccatactg

SEQ ID NO: 39876 - DNA, 910 bp, Homo sapiens
  misc_feature (1)...(910): n = A,T,C or G
aagaaactggttttaccggcttagttttgaccaactgatggcaatttgtacctgctaaactcccaattttttacttgctggttgtgtacgtaggcagtgaggtttgttggactgggcatgcagggacaagcagttaggccaatacatggactgaagattatatctatttatctgccttttgtttagctatttgcataaatatacagagtgggtttatttgcacacttagagctttagaataaaagaactttgactttcaaattggtttttcttgatttttwaaaatttttatactccactttttcttccgtctttctcaaactcatttttccctagtagcagagttgagacttaatattacaaaactctgcttgctttaaagaatctaagaagaagaagaagaagaagaaaagacactaaagaacttccaagcagaagtttaagaagttctgctatagcccatccactcgtttgtggaatttaaatatatgcgtttttgccacaataacagcgtagccttgctagaatcatatacaaagcagcagatttgtttctataaattactgnnnnnnnnnnnnnnnnnnnnnnnnnnnnnnnnnnnnnnnnnnnnnnnnnnnnnnnnnnnnnnnnnnnnnnnnnnnnnnnnnnnnnnnnnnnnnnnnnnnnaagtgggtaaaaagagcattgaactctgagtcggaagacgacttcaaggcccagctcagcactctagcagaactttaggtaagttttttagacactatgtacttcagtttccccatgtgaaaatgagaataacgtctgttctgcctacttcacttgaactatttgaggataaaagaaggtaaaatgcaataatggtcatgaagattttataaaccttgaagtgatgtacaagtataccatactg

SEQ ID NO: 39877 - DNA, 993 bp, Homo sapiens
ctagcttactataagtaggctaggcatattaatagcgtataaggtgctctcacagacatgttttccctttgatactcaccatagccctgtgaagttgatagctactatcccccattttacagataaattttctaatctgtaatcaaaatagctgctctttgcttgaagaaaaagtccagagggacaccctatatgtcaagagagctccagggggtgggtaatttctttcataattgctagaagagccaattctgaatgtgaggctttttctatctgctttattacaaccagagatggaataggaaggctttcagttacagtttatcaattccttctgcttttgccagttaatctctagctttactcttttgaaaaaactacctgtttcccactccacttctgctaccaccactaccaagtcagagtcctctttctattccagccaaacctcttcctgttcttgagaattgcatcacattcttggcttaacgtaaccaacacccccacattggcaccagggagtgtgtagcccttctttattggctgaaagttcttgtctggtgagcatggaataagtcactcacttcctgaatttcagccctggctaaatttgcttctggaaaaacatatatatattcctcagatttttgtctgttggtttgcaaatctccttcactccagccctgtcctggaatgagcaagatttaccaaatagggacagcrtgaaagggaatttagagggtagaggtagagggaaaaggaatagtatgtgtagcttgctgaatgagatgtctgctcttgctgtttccatttcttcacttctcaaacaatttttaacccaatctaaactggcatcagctcccattgtattgaaagggctttcactcaggacactaacgcccccccgccacctcccatattactaaatccagtggatacatcagccttgatcttacttggcatcagggtagcatgtgatgcttttggtcacat

SEQ ID NO: 39878 - DNA, 583 bp, Homo sapiens
cttactgcagtcttgacttctcaggcacaggtgattcttccacctcagactcctgagtggctgggaccataggcgtgcaccaccatgcccagctaatttttgtattttttgtagagttagggtttcaacatgttgcccaggctggtcttgaactcctagcctcaagygatcctcccgtcttggcctcccaaagtgctgggattacaggtgtgagtcattgtgcctggcctgtgcacactttttataatgggatttctcttccttacttttgatgtcccctctctcatacttagttaaccattttgaattccacttagtaagaaaagtttccattttctttttcttcgggggacttagatatgatctgcacctagatggtaagaagattttccatattttgaagtagaaactttctgtatgcctgaatcttgctgtcaagaatgtcttggctaattatgaaggaagaatataagaatgtgagtaaaaacaattcaacagtccctgagaacaacgtcaataaatattcaaaattgcataaccattttagtgactaaagcactgagactcatccaataatactgtg

SEQ ID NO: 39879 - DNA, 1981 bp, Homo sapiens
tttccaaatatttttttcagttgtgggggtrcaaatcatttcaatagtagagtaactcagttcattactgttactggaaaaacaagtttaaccaagcacatatcctactgagggtgagtcaacagtgtcattttaacataagaaggacagtacatgaagtgagttattccaagtcctgtggttttcctacagctgagcaaagacagctgttctttcggaagtggggctctaaaaagaagttgcccatctcctttctttcttgattatagccttttagttttcttttggcctgagacatttcaaaaattcatttcctccttagatttctatcaccaaataccctgaattttgataatttatttatagagtatattatttattatagacttattatagcttaaaactttattttaatttatctcccatttcaagatccacgtttgctatatgttgtgtcagataataaaaatgccataaggaaaacagaggagtgatcttttttaatatgtcattattttctatagttctttagtggtatggacatggaataaggtggcattttgtgggacagtataccaaacttagtgataaaatttatacttttaattttggaggacaaaagtcttgtattctcagccttgtggataagacagtgctctgagctgtctgaggtttcctaaattgggattcaacatcatgaagggtatgtgtctggatagtttatttgttggtttgggaaggtgagtttttgtcttttttccccctctgagttgatttctttagttggagagaagcagaccagatgaagaaaatactttatctcttatggcatttttggtttaccacattagtgatgacccgtcttctctgagcagcaggccatgcttctctgttcagtagttcagttttcactaacttaactgcagatgtgttcttggagggatttatttctaatcaattgaattatgggtacttggataaaatgatgatgggttacctacttttaatagggccatcatttttaagagtaaaatcttgtcaagatagggtatatcatacttatgatctggttccatctctaactccataatttccttgtgctcctgtgttgctactctattattgagaagagatggtatcttgtcagtgtcaattttacaaagaaaaaattctaaacaatttcagtcatagggtagtttttttttttcctggagaaataatgcatagtgtagtatgttgaatcctagagttggcaggttttcaaaagtggggttcttttgttgtgtaggtaggggtgatgctagtcaatgggtgttagtcattagggcatgtgtatgagtggtagttctgagatacagcattggcagcccctcttgtccctggttttgtttttgataagcaagtcctggttttgttttaataagcaggtcattagctgatctttcgtgtaaatgtttttgatgtgcatagctggtatgtgggtggttacctacctgagaatgttgtagtcacaaatgtatattatggaagtttgcagattatggtggatatcaggtttttctaactgcgtatttacagatgtagtgagtgaaaggaatgttgggtcagtaggtaaaagacttgtgctctggtcctggttcagacatcttgatttgtgtgactttgggcaagccccttatttctttgagttgcagtttcttgtgtaaaatggtgctaataccaatttacatgcctcatagtgttgttgtggggatcaaatgagatcactgtttatgagcagccttctcaggagtgagaaatagagggttgtgagctgactttctgatttgtttggctgaggtgttcacacaagccatagaatgctttgtaggcttgggtggaggaatgtagatggaaatcagctgaaaatccctgcctattagaagctgagatgttaatcctaaatatattctatggagtactatcagatgccttgcttttc

SEQ ID NO: 39880 - DNA, 1981 bp, Homo sapiens
tttccaaatatttttttcagttgtgggggtgcaaatcatttcaatagtagagtaactcagttcattactgttactggaaaaacaagtttaaccaagcacatatcctactgagggtgagtcaacagtgtcattttaacataagaaggacagtacatgaagtgagttattccaagtcctgtggttttcctacagctgagcaaagacagctgttctttcggaagtggggctctaaaaagaagttgcccatctcctttctttcttgattatagccttttagttttcttttggcctgagacatttcaaaaattcatttcctccttagatttctatcaccaaataccctgaattttgataatttatttatagrgtatattatttattatagacttattatagcttaaaactttattttaatttatctcccatttcaagatccacgtttgctatatgttgtgtcagataataaaaatgccataaggaaaacagaggagtgatcttttttaatatgtcattattttctatagttctttagtggtatggacatggaataaggtggcattttgtgggacagtataccaaacttagtgataaaatttatacttttaattttggaggacaaaagtcttgtattctcagccttgtggataagacagtgctctgagctgtctgaggtttcctaaattgggattcaacatcatgaagggtatgtgtctggatagtttatttgttggtttgggaaggtgagtttttgtcttttttccccctctgagttgatttctttagttggagagaagcagaccagatgaagaaaatactttatctcttatggcatttttggtttaccacattagtgatgacccgtcttctctgagcagcaggccatgcttctctgttcagtagttcagttttcactaacttaactgcagatgtgttcttggagggatttatttctaatcaattgaattatgggtacttggataaaatgatgatgggttacctacttttaatagggccatcatttttaagagtaaaatcttgtcaagatagggtatatcatacttatgatctggttccatctctaactccataatttccttgtgctcctgtgttgctactctattattgagaagagatggtatcttgtcagtgtcaattttacaaagaaaaaattctaaacaatttcagtcatagggtagtttttttttttcctggagaaataatgcatagtgtagtatgttgaatcctagagttggcaggttttcaaaagtggggttcttttgttgtgtaggtaggggtgatgctagtcaatgggtgttagtcattagggcatgtgtatgagtggtagttctgagatacagcattggcagcccctcttgtccctggttttgtttttgataagcaagtcctggttttgttttaataagcaggtcattagctgatctttcgtgtaaatgtttttgatgtgcatagctggtatgtgggtggttacctacctgagaatgttgtagtcacaaatgtatattatggaagtttgcagattatggtggatatcaggtttttctaactgcgtatttacagatgtagtgagtgaaaggaatgttgggtcagtaggtaaaagacttgtgctctggtcctggttcagacatcttgatttgtgtgactttgggcaagccccttatttctttgagttgcagtttcttgtgtaaaatggtgctaataccaatttacatgcctcatagtgttgttgtggggatcaaatgagatcactgtttatgagcagccttctcaggagtgagaaatagagggttgtgagctgactttctgatttgtttggctgaggtgttcacacaagccatagaatgctttgtaggcttgggtggaggaatgtagatggaaatcagctgaaaatccctgcctattagaagctgagatgttaatcctaaatatattctatggagtactatcagatgccttgcttttc

SEQ ID NO: 39881 - DNA, 1981 bp, Homo sapiens
tttccaaatatttttttcagttgtgggggtgcaaatcatttcaatagtagagtaactcagttcattactgttactggaaaaacaagtttaaccaagcacatatcctactgagggtgagtcaacagtgtcattttaacataagaaggacagtacatgaagtgagttattccaagtcctgtggttttcctacagctgagcaaagacagctgttctttcggaagtggggctctaaaaagaagttgcccatctcctttctttcttgattatagccttttagttttcttttggcctgagacatttcaaaaattcatttcctccttagatttctatcaccaaataccctgaattttgataatttatttatagagtatattatttattatagacttattatagcttaaaactttattttaatttatctcccatttcaagatccaygtttgctatatgttgtgtcagataataaaaatgccataaggaaaacagaggagtgatcttttttaatatgtcattattttctatagttctttagtggtatggacatggaataaggtggcattttgtgggacagtataccaaacttagtgataaaatttatacttttaattttggaggacaaaagtcttgtattctcagccttgtggataagacagtgctctgagctgtctgaggtttcctaaattgggattcaacatcatgaagggtatgtgtctggatagtttatttgttggtttgggaaggtgagtttttgtcttttttccccctctgagttgatttctttagttggagagaagcagaccagatgaagaaaatactttatctcttatggcatttttggtttaccacattagtgatgacccgtcttctctgagcagcaggccatgcttctctgttcagtagttcagttttcactaacttaactgcagatgtgttcttggagggatttatttctaatcaattgaattatgggtacttggataaaatgatgatgggttacctacttttaatagggccatcatttttaagagtaaaatcttgtcaagatagggtatatcatacttatgatctggttccatctctaactccataatttccttgtgctcctgtgttgctactctattattgagaagagatggtatcttgtcagtgtcaattttacaaagaaaaaattctaaacaatttcagtcatagggtagtttttttttttcctggagaaataatgcatagtgtagtatgttgaatcctagagttggcaggttttcaaaagtggggttcttttgttgtgtaggtaggggtgatgctagtcaatgggtgttagtcattagggcatgtgtatgagtggtagttctgagatacagcattggcagcccctcttgtccctggttttgtttttgataagcaagtcctggttttgttttaataagcaggtcattagctgatctttcgtgtaaatgtttttgatgtgcatagctggtatgtgggtggttacctacctgagaatgttgtagtcacaaatgtatattatggaagtttgcagattatggtggatatcaggtttttctaactgcgtatttacagatgtagtgagtgaaaggaatgttgggtcagtaggtaaaagacttgtgctctggtcctggttcagacatcttgatttgtgtgactttgggcaagccccttatttctttgagttgcagtttcttgtgtaaaatggtgctaataccaatttacatgcctcatagtgttgttgtggggatcaaatgagatcactgtttatgagcagccttctcaggagtgagaaatagagggttgtgagctgactttctgatttgtttggctgaggtgttcacacaagccatagaatgctttgtaggcttgggtggaggaatgtagatggaaatcagctgaaaatccctgcctattagaagctgagatgttaatcctaaatatattctatggagtactatcagatgccttgcttttc

SEQ ID NO: 39882 - DNA, 617 bp, Homo sapiens
cagactcctattgctgatagcgtcctgcaggattgggcttcaatgtgactaacctacaattgcctccaggtgctccacccactgagtccttgtgtctctgctgaggtccttggagagttactggagagggctctgtgtcagatkaccttgaggaggctctgatttagccttttgtaaaatgcaaagagttgaggtcttctccacgcaagagctcgctgatgtcaatgaggtattgaggatggggccatctcctatttctgtggccagtactgagttttgttatccttcctttaggtaaggagtgccaatggaccgatgcctgcctgtctcatccctgtgcaaatggaagtacctgtaccactgtggccaaccagttctcctgcaaatgcctcacaggcttcacagggcagaagtgtgagactgatgtcaatgagtgtgacattccaggacactgccagcatggtggcacctgcctcaacctgcctggttcctaccagtgccagtgccttcagggcttcacaggccagtactgtgacagcctgtatgtgccctgtgcaccctcgccttgtgtcaatggaggcacctgtcggcagactggtgacttcacttttgagtgc

SEQ ID NO: 39883 - DNA, 617 bp, Homo sapiens
cagactcctattgctgatagcgtcctgcaggattgggcttcaatgtgactaacctacaattgcctccaggtgctccacccactgagtccttgtgtctctgctgaggtccttggagagttactggagagggctctgtgtcagatgaccttgaggaggctctgatttagccttttgtaaaatgcaaagagttgaggtcttctccacgcaagagctcgctgatgtcaatgaggtattgaggatggggccatctcctatttctgtggccagtactgagttttgttatccttcctttaggtaaggagtgccaatggaccgatgcctgcctgtctcatcyctgtgcaaatggaagtacctgtaccactgtggccaaccagttctcctgcaaatgcctcacaggcttcacagggcagaagtgtgagactgatgtcaatgagtgtgacattccaggacactgccagcatggtggcacctgcctcaacctgcctggttcctaccagtgccagtgccttcagggcttcacaggccagtactgtgacagcctgtatgtgccctgtgcaccctcgccttgtgtcaatggaggcacctgtcggcagactggtgacttcacttttgagtgc

SEQ ID NO: 39884 - DNA, 745 bp, Homo sapiens
gtaacaatagcagcagcaacaataagtaatgacaaatgatcacatataaggaaccatgttaatgtatcactagatattaaacagggcattactttactggtatatgtgtccaatttgaataaacaaattagtatatgtgtcaaatttggatccagcagggcacttcaaaacttaagtaatcatgactcaactctaaatactcaattttaaagtagtttctaaacttcagcatattgacattycgggccagataattcttttttgaggaactcttctgtgtaggatgtttagcagtatccctggcctaacccattagatgccagtagcaccccacatttgtgacaaccaaaaatgtctctagacattgccaaaagtcccttgggtgacttcgtgctctaaagctatgaatctagtgggaagaaattagaaaccagaatactacatagaaaatatttttgagtagacaggactattgattcatctaattagttcaggtagttagctgatcatttttcttgtaattcaaacaaacccttccccaattcttagtaatagctgttgattgagtgccgattgtggacagtaaacataatttgcatagtcaatatagcttggagattaagcactcggctctgtagtctgggttgcaatcctggctctgccatctgctctctgtgtaacctggggtatgtttctttacctctctgccattgttcctcaactgtacaatgaaataatgatagca

SEQ ID NO: 39885 - DNA, 745 bp, Homo sapiens
gtaacaatagcagcagcaacaataagtaatgacaaatgatcacatataaggaaccatgttaatgtatcactagatattaaacagggcattactttactggtatatgtgtccaatttgaataaacaaattagtatatgtgtcaaatttggatccagcagggcacttcaaaacttaagtaatcatgactcaactctaaatactcaattttaaagtagtttctaaacttcagcatattgacatttcgggccagataattcttttttgaggaactcttctgtgtaggatgtttagcagtatccctggcctaacccrttagatgccagtagcaccccacatttgtgacaaccaaaaatgtctctagacattgccaaaagtcccttgggtgacttcgtgctctaaagctatgaatctagtgggaagaaattagaaaccagaatactacatagaaaatatttttgagtagacaggactattgattcatctaattagttcaggtagttagctgatcatttttcttgtaattcaaacaaacccttccccaattcttagtaatagctgttgattgagtgccgattgtggacagtaaacataatttgcatagtcaatatagcttggagattaagcactcggctctgtagtctgggttgcaatcctggctctgccatctgctctctgtgtaacctggggtatgtttctttacctctctgccattgttcctcaactgtacaatgaaataatgatagca

SEQ ID NO: 39886 - DNA, 745 bp, Homo sapiens
gtaacaatagcagcagcaacaataagtaatgacaaatgatcacatataaggaaccatgttaatgtatcactagatattaaacagggcattactttactggtatatgtgtccaatttgaataaacaaattagtatatgtgtcaaatttggatccagcagggcacttcaaaacttaagtaatcatgactcaactctaaatactcaattttaaagtagtttctaaacttcagcatattgacatttcgggccagataattcttttttgaggaactcttctgtgtaggatgtttagcagtatccctggcctaacccattagatgccagtagcaccccacatttgtgacaaccaaaaatgtctctagacattgccaaaagtcccttgggtgacttcgtgctctaaagctatgaatctagtgggaagaaattagaaaccagaatactacatagaaaatatttttgagtagacaggactattgattcatctaattagttcaggtagttagctgatcatttttcttgtaattcaaacaaacccttccccaattcttagtaatagctgttgattgagtgccgattgtggacagtaaacataatttgcatagtcaatatagcttggagattaarcactcggctctgtagtctgggttgcaatcctggctctgccatctgctctctgtgtaacctggggtatgtttctttacctctctgccattgttcctcaactgtacaatgaaataatgatagca

SEQ ID NO: 39887 - DNA, 1206 bp, Homo sapiens
acgctgttgttggtgaaactggatcagaagttgtccaggtaggggttgtgatgtcctctttctgctgtttccgtgagtgccaaaagtagagtcaatttatattgatactttagagaaagtgattccctaacattcctctcagttttgccctcatcatcccctaatagccctaaggccaaaataccatagttatcactgatcagttgttgattttcccctctgttctcatacagagtcacttccttggtacatgagacctaggatgaattccaacatcttcccttcctggacccagtactgcatccctctttctctccaatgtcaacatctctccaaagggtagaaggcattttcactgcacccaggactcctttcactgccccatcctcttaaagacagccatgctcagtgatcccaagctgattttctgttatatactgtgatgccataactgattacttcttctattaaagaaaataaagatatacattttaattttagtgaaacatcccctgtggttaagaggacatcctgttatataagaagcccaggagtgggagaacagaggattgagtgacgcttcatagatttctggttgtagggtcaacttagagactgactcaaaattgacgtaaataggaaaacagtaatggctttgagggggaatgagtaagctggtttaaagtctacagggagcaatatcctacatagatgaataagacaaacaagaaatattcttgaatggagcaagaatgtgggaaacatttaaatgagaaaacagagatgaaataaagaaatgcagagagctttgaagtccacatagaagactttagaagatagtaataactaacattatccacccagcactcatctaagctctttagatatatcactttatgtaatcttcacaagtctatgaggtagatactagtatttttcccatttaacagattaggaaaccaaggcacaaaatgatrgagtgccttacccaaagccacatagcaactaagtggtgaagacagttgaaatttgaagcataatctctattctatactaacattcatttgtcactaactgtgctagacagtatgctgaatctggccctaggaatcttaaagagctatgtgtaagagaaaaaatattttttctaccccttcaattgtcaacacatagattatttactctgtgaattgatggaacacaatc

SEQ ID NO: 39888 - DNA, 1206 bp, Homo sapiens
acgctgttgttggtgaaactggatcagaagttgtccaggtaggggttgtgatgtcctctttctgctgtttccgtgagtgccaaaagtagagtcaatttatattgatactttagagaaagtgattccctaacattcctctcagttttgccctcatcatcccctaatagccctaaggccaaaataccatagttatcactgatcagttgttgattttcccctctgttctcatacagagtcacttccttggtacatgagacctaggatgaattccaacatcttcccttcctggacccagtactgcatccctctttctctccaatgtcaacatctctccaaagggtagaaggcattttcactgcacccaggactcctttcactgccccatcctcttaaagacagccatgctcagtgatcccaagctgattttctgttatatactgtgatgccataactgattacttcttctattaaagaaaataaagatatacattttaattttagtgaaacatcccctgtggttaagaggacatcctgttatataagaagcccaggagtgggagaacagaggattgagtgacgcttcatagatttctggttgtagggtcaacttagagactgactcaaaattgacgtaaataggaaaacagtaatggctttgagggggaatgagtaagctggtttaaagtctacagggagcaatatcctacatagatgaataagacaaacaagaaatattcttgaatggagcaagaatgtgggaaacatttaaatgagaaaacagagatgaaataaagaaatgcagagagctttgaagtccacatagaagactttagaagatagtaataactaacattatccacccagcactcatctaagctctttagatatatcactttatgtaatcttcacaagtctatgaggtagatactagtatttttcccatttaacagattaggaaaccaaggcacaaaatgatagagtgccttacccaaagccacatagcaactaagtggtgaagacagttgaaatttgaagcataatctctattctatactarcattcatttgtcactaactgtgctagacagtatgctgaatctggccctaggaatcttaaagagctatgtgtaagagaaaaaatattttttctaccccttcaattgtcaacacatagattatttactctgtgaattgatggaacacaatc

SEQ ID NO: 39889 - DNA, 1148 bp, Homo sapiens
aatgagtatccatcacctcaagcattaatcctttgtgttacaaacagtctaattatactcttagttaccatgtacaatgaaattattattgacgatagtcaccctgttgtgctgttgaatactaggtcttcttcattctttctaactattttcacaccttctactttagcatcygcatcacctttcttaaggtctccctgagacaatggtctttgttcttttcttttaaccttgttcctcttgctccaaaaccctctctggctagactgaaccagaaaataaagaattaatacacaaattcactttctccattacctaggccagacgatttagggggtcttcacctcagtatcttaactgtgtaattttgttgtccacatggaatcttctagaccaagtctttatttggggctccaaaccttattgtgagatgagcttggtcagttgtggctcctacacaaacaactttaggtcctcctctctcttcattcagaaagggagcagtagagtctatttcaggccaagagtcaggttctaggaagataaggagcaatgactcctggatttcagccttgacttcttccctgaccacagtttttgccatttacttgactagagaactcctaagggatgcaaaaattcattgggaggtagagcagatttgggcagtttttgtgtaaaaagggagagctaatttaaaatgagttcattgaggcactgtcctatccccttagaatttcttccacaaaggagaaagttaagacttttattgtttgtttatctatctgtctgtctgtctgtctgtctgtctgtctgtctgtctatctatctatctatctatctatctatctatctatctatctatctatctatttatttttagagacagggtctcgctattctgtccaggctggtctcatactcctggcttggcgagatcatccagccttggtctcccaatgtgctgggattacaggcgtgagccaccacgcctggcctacttttattgttttgcacaaaattaatacattcttataataaaaacttaaacatgacagagataaatagtgcaaatcccctttgatgacctgccttctcccctctaggataacagcagttaagttttagatggtctttcaagaggtttt

SEQ ID NO: 39890 - DNA, 593 bp, Homo sapiens
ttttcaaaagaagaatagtgagagcagaaaggagaaacacgagatagcaaaatgagctctaaaatagatgacaaggagaaaaagatttagagaatctagaagccctagagtagtagatagaagccgagtgtgtctttgcacaaccaaaaaggactgcatcaacttcaataagtgacacctggctgaggcagtttaatgttgaataatataacttgtggcaatgatcctctttcatggtaactgacctctactcagaattatcttttgtgtaaggaaagtctaggcaggggccrggcgcagtggctcacgtctgtaatcccagcactttgggaggccgaggtgggtggatcacctgaggtcaggagttcgagaccagcctggccaacaaggtgaaaccccatctcgactaaaaaaatacaaaaattagccagacgtggtggctcactcctgtaactcctgtaatcccagctacttgggaggctgaggcatgagaattgcttaagcccgaaaggcagagtttgcagtgagccaagattgtgccactgcactccagcctgggtgatggagtgagactctacctcaaaaataaataa

SEQ ID NO: 39891 - DNA, 1225 bp, Homo sapiens
tggggactacccagtgtccttggctgccaccccctccacaaaaaccctaggcagtagctgcttcttcttggcttcattaccctttccttatctctaacttcaaaaagttggttgaaatcttcatttgctgatgggccccttcatttttttcaccactctaagttttatttatttctatgttatttgtcatcattataatagggtggggttcctgtagtgagagggaaaaactgtatgtgttcacttggccacctaaaacttgtgaatatatatacttaaagtgttaatagatattaccaaattgcctttccttttcaatatttatatttctctattctttttcttcttttgttgcattgactaaacttgaatgtaatattggtgacrgtaatgggcctcctgatcttatcctattttggtggaaatgcttctaatatttcatcgttaaatacgatgttttggaggccattatccttattgaaatgactcagaagcagaaagcagaaaacagtatgttttcacttattcatgagagctaacaatgagtgcacatagacacacagagtggaataatagacactgaagactccagaaggtgggagggtgatgagcctggtcctgaaattgtactttccaattgttgctggcacaatttattttttaatattcactttgtattcagaaacattactcactttaattctaacactttgtgggatattcttttgcatttttttatattgacatatgtgatctgaaaatagtgactgtttcttccttttatttcttgttcaattttactgtgtcaactaagacctctagttcaatagaatagaaatgatagtggcaacttttgtcttgttaatgaaatggaataatttcagtgtttcaccatgaaagaagatatatgacatgaaattgtgatagccagtctctatatggctccaaatgatctttgcctaatgatattcacatcccatatctgaagagggctgacctgtgtaataggatattgcagaaatggtcacgtgtgacttctgaggctagactataaaagatattgtttccatcttgctctctcggtctgcctgctctgggggaaagccagctgctgtgttggaaggacactcaagcagctctatggaagggtcactgcagcaaggaggcctcctgctggcaaccaacatcaatttgccagctctgtgagtcagccacctagaaagag

SEQ ID NO: 39892 - DNA, 760 bp, Homo sapiens
ttaaggaaatgataaaaaagtcagaaaagagtggagaacaaatattgtaatccatattatataaattgactaagttgaaaatacccaaaaaattcagccacagggaactgattaagtaaatcaggttgaagtcttaaatattacacttggtcacatcaaaagtatgtctttcaaagaccttttaatgatcttggaaaataatagcttttaatgatcttggaacataatgatcttggaaaatgatattggaaaatagttttaatgatcttggaaaatatgataattgttcatgttaaaattatgtctttcaaagagcttttaatgatcttggaaaatagctactaatcttggaaaatacttggatgtagtataaaatgaaaaaaggwagataatctttgtgtacaagtaataatacgaacaaccttaaaacacaattatgcctatagacacacacacacacacacatacacacagaaagaggaaaacaatctagaagaaaactattgtgaggaaatcttgccaggacaaggagtgatattagtttcattttactttttagacttttctataatttctgaaatttttataagtgtcattggttttctaattctcccaaagaatatatcagagccaacatgaaaatatcacaatgagtcaggaattttgtgaattctttaaaaagggattagttgattatccttctaattaaggtaaaactttgtttctgatatctgcataaaattaattatttcacatgctt

SEQ ID NO: 39893 - DNA, 611 bp, Homo sapiens
aatatttttgccattggagaacatgcaggatcaccagtgcagggaaaaaacatgagccctggtcctctgatgtaataggaaggtcttctttgaatttctttctaggtagtccagcagtaggtatttacttgggcagtaatatttcagtcgtatgtcactgaaattttgctcatgcacctacttcacttccattaaatatcccaggagattattaagccccctccttgatcacacttcagtaacaggaagtaaggtgatcttttgacccatggaaaggcaaaattggaatgtctgggaaaaccaagcccagcatatgtgtggtgaactcttcactcgttacacagagttaattatttttatagaccctagttcagcaaatgcctacattccttacagcctcttctgtctcatcttgattgtctccttcttaaatcccayaaatggtagataacgacctccaaattgggatgcaagtaactcagtcagtattcaagaaaatacaagtcattgtgggaaaaccatttgaacatttatttactcttttaaaatttatattttggtatatcttttataatgtccaaatatatttagattgcataccaatgaatgta

SEQ ID NO: 39894 - DNA, 800 bp, Homo sapiens
tgaaagctgaggttctagcccaggaagtgccccagagcccggccatcctgacacactgactctccttccatgctgggagacagcagctctgccctgcccacctgcccagaagtggccagctggctttttgccaggttctgccctctgcagccccagagctacacctgtcctttcttagaagctgccaatggccatgagtgtccaggmcactctgggaaggactgtagtaaaatagtcaatgtgtttaatccatgtttcccactggcccacccatgcctttgacccacaggacagtggccacgcatgtgcttgggaaaaccaccataacaggtccagacaagagtgctggcctgagcatgggtcacgctaacgtgggtggctcaattaaggaacagggatggacttcctgtcctgtcgcccccacacactcctgcttcttctagtggccatttctgtgtgaggctggagcacagtggaaggtctgtgaacctgtattaagcaaaatagaaactaaatgtggacttggactgaaaggaaattgagttagacaatgaaaatggattggaatggaatggaattcggatttgaactgaatggaattgaattggaagtggattaaaatggaattgaactataatctaaaccccagtagggcagaaaaaatggacaggctgagccaggggagctgccctcaccccatctgtcccctgccctggggaaccctctggtcaatactgctaataggaactgaaaattaaaatggtgctgatggattttctttaatatgcacagacgcatct

SEQ ID NO: 39895 - DNA, 800 bp, Homo sapiens
tgaaagctgaggttctagcccaggaagtgccccagagcccggccatcctgacacactgactctccttccatgctgggagacagcagctctgccctgcccacctgcccagaagtggccagctggctttttgccaggttctgccctctgcagccccagagctacacctgtcctttcttagaagctgccaatggccatgagtgtccaggccactctgggaaggactgtagtaaaatagtcaatgtgtttaatccatgtttcccactggcccacccatgcctttgacccacaggacagtggccacgcatgtgcttgggaaaaccaccataacaggtccagacaagagtgctggcctgagcatgggtcacgctaacgtgggtggctcaattaaggaacagggatggacttcctgtcctgtcgcccccacacactcctgcttcttctagtggccatttctgtgtgaggctggagcacagtggaaggtctgtgaacctgtattaagcaaaatagaaactaaatgtggacttggactgaaaggaaattgagttagacaatgaaaatggatkggaatggaatggaattcggatttgaactgaatggaattgaattggaagtggattaaaatggaattgaactataatctaaaccccagtagggcagaaaaaatggacaggctgagccaggggagctgccctcaccccatctgtcccctgccctggggaaccctctggtcaatactgctaataggaactgaaaattaaaatggtgctgatggattttctttaatatgcacagacgcatct

SEQ ID NO: 39896 - DNA, 770 bp, Homo sapiens
ctcccttcctcccactggcaaaggcttcctccctgggttggaggtcagtgttcgggctgggcacagggttcattataaaccaaatatttgagtcccccagaattcctgtgttgaaatcttcacccccacggtaatggtcttaggaggtgggggctttgggaggtgatgaggtaatgagggggaagctgcaggaacaagactcgtgcccttgtgaaggggcctagtgagacacttgctgctccccacgtgaggacacagtgaggagacgccatggagaagccaggaggcgactctcccagacaccagatgcgccatgccactatcttgggcttgcagcctccaggtctgtgaggaataaatgtctgtcgctcacaacccccgagtgtgtgacacgcagttacagtgaggaataaatatctgtcrctcacaacccctgagtgtgtaacacgcagttacagtgaggaataaatgtctgtcgctcacaacccccgagtgtgtgacacacagtcacagcagcctggaggggctaaaagagggctcatagcaagggctcgagctctcggccctggaggcacatgctgtgtgaccttgggcaggtacgtgacctctctgttccctggttttctcaggtgtaaagtggtggtgggaatcactacctaatagggttgttgtgaagacgggtgtgggaggcctgtggcgcctgcgcaggggaaaggctgtgggtgtccgtccaagcaacagtcagggctgtgtggtcatccctggctgtg

SEQ ID NO: 39897 - DNA, 550 bp, Homo sapiens
tgtttaccccttctaaagatatgattagactttgttaataatgtttaagatggtgagtaccatcttaaaacttattggagattggttttatatttatatttatattggtttatatttagatttatatgactggttatgtgaatatatttaaatactggggaaattccttcactgtctcagaaccaagcaagatgcacctgtgttttgtgtttatttgcctcttaaaggcaagggttgaagataaggtagcaatgtcttctttgtattgttggccttaactatgccagtgtcattagaattccctgtrtttaagatggttccttttacttattcaaaggcattttagtgtggtttatgtgtaatatcaaataaagattatttaacacttaaaaaaacaacaacaaaaaagaaaatgtggtacacaaacaccatgagaaactgtgcagccataaaaaggaatgagattacatcctttgcagagacatggatggagctggaagctgatatcctcagcaaactaacacagggacagaaaaccaaacatcgcatg

SEQ ID NO: 39898 - DNA, 550 bp, Homo sapiens
tgtttaccccttctaaagatatgattagactttgttaataatgtttaagatggtgagtaccatcttaaaacttattggagattggttttatatttatatttatattggtttatatttagatttatatgactggttatgtgaatatatttaaatactggggaaattccttcactgtctcagaaccaagcaagatgcacctgtgttttgtgtttatttgcctcttaaaggcaagggttgaagataaggtagcaatgtcttctttgtattgttggccttaactatgccagtgtcattagaattccctgtgtttaagatggttccttttacttattcaaaggcattttagtgtggtttatgtgtaatatcaaataaagattatttaayacttaaaaaaacaacaacaaaaaagaaaatgtggtacacaaacaccatgagaaactgtgcagccataaaaaggaatgagattacatcctttgcagagacatggatggagctggaagctgatatcctcagcaaactaacacagggacagaaaaccaaacatcgcatg

SEQ ID NO: 39899 - DNA, 550 bp, Homo sapiens
tgtttaccccttctaaagatatgattagactttgttaataatgtttaagatggtgagtaccatcttaaaacttattggagattggttttatatttatatttatattggtttatatttagatttatatgactggttatgtgaatatatttaaatactggggaaattccttcactgtctcagaaccaagcaagatgcacctgtgttttgtgtttatttgcctcttaaaggcaagggttgaagataaggtagcaatgtcttctttgtattgttggccttaactatgccagtgtcattagaattccctgtgtttaagatggttccttttacttattcaaaggcattttagtgtggtttatgtgtaatatcaaataaagattatttaacacttaaaaaaacaacaacaaaaaagaaaatgtggtacacaaacaccatgagaaactgtgcagccataaaaaggaatgagattacatcctttgcagagacatggatggagctggaagctgatatcctyagcaaactaacacagggacagaaaaccaaacatcgcatg

SEQ ID NO: 39900 - DNA, 579 bp, Homo sapiens
gcaagggttgaaaaacatattttcactacttgggcaacaagacaattagaagcccaaacctcagcaccacacggtatgcccatgtaataaacctgtacgtgtacctctgcatctaaaataaaactttaacaaattaaatgaaaaaagaagttatgtgataaatgtttccatttatttcagttaattaaggcatttctaacatttttaytactgtaaaataaagttcttcatacactagtgacatagtattgtttggaacctcataaatgctatgaacactacatatctggtggcacttataaaaagtgtggaaagaggctcatgggtagagattttttaatttttattttagtagagacggggtttcaccatgtcagccagaatggtctcaatctcctgacctcatgatccacccgcctcggcctcccaaagtgctgggattacaggcgtgagccaccatacccggccgagatttttttaaatggtacttttttccttctagcaatgctttatttcattttttattgatacataatacttgtatgtattttgacatacgcatgatattttgatacatgc

SEQ ID NO: 39901 - DNA, 579 bp, Homo sapiens
gcaagggttgaaaaacatattttcactacttgggcaacaagacaattagaagcccaaacctcagcaccacacggtatgcccatgtaataaacctgtacgtgtacctctgcatctaaaataaaactttaacaaattaaatgaaaaaagaagttatgtgataaatgtttccatttatttcagttaattaaggcatttctaacatttttattactgtaaaataaagttcttcatacactagtgacatagtattgtttggaacctcataaatgctatgaacactacatatctggtggcacttataaaaagtgtggaaagaggctcatgggtagagattttttaatttttattttagtagagacggggtttcaccrtgtcagccagaatggtctcaatctcctgacctcatgatccacccgcctcggcctcccaaagtgctgggattacaggcgtgagccaccatacccggccgagatttttttaaatggtacttttttccttctagcaatgctttatttcattttttattgatacataatacttgtatgtattttgacatacgcatgatattttgatacatgc

SEQ ID NO: 39902 - DNA, 579 bp, Homo sapiens
gcaagggttgaaaaacatattttcactacttgggcaacaagacaattagaagcccaaacctcagcaccacacggtatgcccatgtaataaacctgtacgtgtacctctgcatctaaaataaaactttaacaaattaaatgaaaaaagaagttatgtgataaatgtttccatttatttcagttaattaaggcatttctaacatttttattactgtaaaataaagttcttcatacactagtgacatagtattgtttggaacctcataaatgctatgaacactacatatctggtggcacttataaaaagtgtggaaagaggctcatgggtagagattttttaatttttattttagtagagacggggtttcaccatgtcagccagaatggtctcaatytcctgacctcatgatccacccgcctcggcctcccaaagtgctgggattacaggcgtgagccaccatacccggccgagatttttttaaatggtacttttttccttctagcaatgctttatttcattttttattgatacataatacttgtatgtattttgacatacgcatgatattttgatacatgc

SEQ ID NO: 39903 - DNA, 579 bp, Homo sapiens
gcaagggttgaaaaacatattttcactacttgggcaacaagacaattagaagcccaaacctcagcaccacacggtatgcccatgtaataaacctgtacgtgtacctctgcatctaaaataaaactttaacaaattaaatgaaaaaagaagttatgtgataaatgtttccatttatttcagttaattaaggcatttctaacatttttattactgtaaaataaagttcttcatacactagtgacatagtattgtttggaacctcataaatgctatgaacactacatatctggtggcacttataaaaagtgtggaaagaggctcatgggtagagattttttaatttttattttagtagagacggggtttcaccatgtcagccagaatggtctcaatctcctgacctcatgatccacccgcctcggcctcccaaartgctgggattacaggcgtgagccaccatacccggccgagatttttttaaatggtacttttttccttctagcaatgctttatttcattttttattgatacataatacttgtatgtattttgacatacgcatgatattttgatacatgc

SEQ ID NO: 39904 - DNA, 1002 bp, Homo sapiens
aaagattatagatctacccattcagttagacttatctgggtatagcagacggcacatcagataattaaaaccgagaagactaaaatagaaaattcaacagaaatcttagaatcataacttatttgtatattatattttcatgaatataaaaaagctgttgaaaatgtaaataagctttacaacaacaaaggcaaaggcatgtgctagagtgtcacatgaccacaaagtctctccactcctgtctgcgtgcccctttgcaatgtgacttttgaagttcctcctgccacgaggcagcagctatatttccacccttgaaactggagttggccaaaggacttgctgtggccaatgatatgttggcagatgagatacaagcaggggcgtgaaaagtgtccatgcaacgggcctggcactctcttgttgctactgaggactcctccaccactatgtagtggctcacgcctgtaatcccaacactttgggaggccaaggcaggcagatcacctgaggtcaggagtttgagaccagcctggccaacatgggaaaccccgtctctactaaaaatagaaaatttagctgggcgtggtggcaggcacctgtagttccagctactcaggaggctgaggcatgagaatcgtttgaacccaggaggtggagtttgcagtgggccatgatcccaccactgcactccaacctgggaaacagagtaagaytctgtctcaaaaaaaaaaaaaaaaaaaaaaaaaagaaaaaagaaaaaaagaaaggcactgcagaaaggcacaagagaggaacttttttttaatacaataaaatttctcagaactaaagaccaccagttacatacaatgaatgaaaatcatactgttatgaaatttcagaataccagagataaagagaaggtctgaagttcctgcagaattctaaaaaggaaaataggctgggtgtggtagctcacacctgtcattctagcacttcgggaagccagagcaaaaaggatcc

SEQ ID NO: 39905 - DNA, 1002 bp, Homo sapiens
aaagattatagatctacccattcagttagacttatctgggtatagcagacggcacatcagataattaaaaccgagaagactaaaatagaaaattcaacagaaatcttagaatcataacttatttgtatattatattttcatgaatataaaaaagctgttgaaaatgtaaataagctttacaacaacaaaggcaaaggcatgtgctagagtgtcacatgaccacaaagtctctccactcctgtctgcgtgcccctttgcaatgtgacttttgaagttcctcctgccacgaggcagcagctatatttccacccttgaaactggagttggccaaaggacttgctgtggccaatgatatgttggcagatgagatacaagcaggggcgtgaaaagtgtccatgcaacgggcctggcactctcttgttgctactgaggactcctccaccactatgtagtggctcacgcctgtaatcccaacactttgggaggccaaggcaggcagatcacctgaggtcaggagtttgagaccagcctggccaacatgggaaaccccgtctctactaaaaatagaaaatttagctgggcgtggtggcaggcacctgtagttccagctactcaggaggctgaggcatgagaatcgtttgaacccaggaggtggagtttgcagtgggccatgatcccaccactgcactccaacctgggaaacagagtaagactctgtctcaaaaaaaaaaaaaaaaaaaaaaaaaaraaaaaagaaaaaaagaaaggcactgcagaaaggcacaagagaggaacttttttttaatacaataaaatttctcagaactaaagaccaccagttacatacaatgaatgaaaatcatactgttatgaaatttcagaataccagagataaagagaaggtctgaagttcctgcagaattctaaaaaggaaaataggctgggtgtggtagctcacacctgtcattctagcacttcgggaagccagagcaaaaaggatcc

SEQ ID NO: 39906 - DNA, 554 bp, Homo sapiens
aggctagatatcaagaaatctgtttctagtgctaaagtagtcttttgtcctttgttatttttctgtccattttctgaggtaataagtctaatttttttttagtatttctggacaattctctgcctatggtatctttgacaaacccaagcgtgtactatggcacctatgatacgttaaatgcttgctatgaaatacctaccagaactgctcgccttctgatcaggaggtggtgtgatgtccaggggcttataaggatcataattctttacatccaagagtctcttttcyctgatagatttccatataaaatctgggtttgcaatatgaacgtggttcttttggatagaattcagttggtactgactcagaacatcagcattatctaagattatatgtgtgcactaaggaaaaaaagagtcaatccattatgcatcaagaaaaacaacatttaaataagatatttgtatctgtaattttcacccttagaaagtattaaggtagtttgtgataatctttctcaaatttcgaaaaacctctataaatatcacagtttc

SEQ ID NO: 39907 - DNA, 2324 bp, Homo sapiens
tgttgatctgtgaccttacccccaaccctgtgctctctgaaacatgtgctgtgtccactcagggttaaatggattaagggcggtgcaagatgtgctttgttaaacagatgcttgaaggcagcatgctcgttaagagtcatcaccaatccctaatctcaagtaatcagggacacaaacactgcggaaggccgcagggtcctctgcctaggaaaaccagagacctttgttcacttgtttatctgctgaccttccctccactattgtcccatgaccctgccaaatccccctctgtgagaaacacccaagaattatcaataaaaaaataaatttaaaaaaaaaaaaaaaaaaaaaaaagaaatccctttaactagagtccagtgacaaagttcccactggcgtgagattactactggcttttgagctctttgaactcagagggtatgcctgccaatgttcatatttcttttctttttcttttctttttttttttttgatggcttttttctctgttgctcaggctggccttgaactcctgagctgaagcaatcctcttccctcagcctcacaagtagctgggactataacgcgtgtcacaatccctggctcatgttcatacttcaatcttcagcgtggtgatttaaatgtaatgggtgctcattaaatatattttaatttatatttaataaatataaacaagattcatcatttaaataagagggaaactagcatcaaagcaacacgtctggctattcaagagagaaacatctcttatttcactctctgaattctaagttggaggaaagggaaccggtatgatcgaaagaggacaagagagaaaattctcagatttatttggaaagcgattctattcatcttatgtcggattctttaagtgaaactagttaagtgaaaagagaaggaaaacagtgactacaagagaatcaatcagcagatattgaaagactttcatgtaactaatggcatctgcttagaaaatatgaattgggcccaaagtggtattctttttggtcacttatattggaatttaaatgtgtaactaaaaatgaaatctttagagaaaatttcatttcttaagctgaaatctttccacaagttggagaaaagagagatgtgcatccgggaaatcaaactgaaaagacaggctgagcttataaattgagattccccaatcagaggccatacttttctttcctaattactgttcttttccttggatcctacatccatcactacattaattccaggcttaacttacagccagctcttctccgtggcccatctcagcataatgaacttttgccattatcttgatcttgttaaattctctctaatcttaacctaatgagatacagtgaatgtgcaaccataaattagatgttcagacaatctcagtttgttctcagtgcagcaatccttttaaattacatccatcactcttttgctcaagcacacttcatggctccctattttagtaaagtaaaagaaaaagccctttcaatggccttcacaggctggtgtctctgtattactccccgtccctccccctagcacacatggctcactctcctccagtcacaccaatgtccttgggaagtcttccaccaagtctttgttcaaatgacatcttctcaatcaccactctgtttagaaatagaatcacctcctaacccacacccttctctgccctatttcttctctccagtccatttatcacctttcaatatactatacaattttcttttttattattgtgtttattgcttattttctattcctcacacactagaatrggagctttgcaggcatttctgccatgcttttcattgaggtattctaaggtcttagaacagtgcctgacgtatagttagtagttactcaatagatatttgttgagtgaatgaatgaggaaaggaaagaatatgcccaatattcatgatcatttattaagtggtaacaaaaataatgtgaaacgtaagtttaattatatttgcttctctatactttggaccacatgtctatatgttagaattaagcattctaacgaggcactgagatagagagagaagaaataggcttgggaatcaactacagtgatgttcaaattgtagtcctgccccttgctagctatggaagacttaagtcaatttctgtgagcttcagttatctcctttgtgaaacggcggtgttataagtattcaatgaaaaacaagcacagcttttggtgcaacaggcacatgataactgtgagtttctccttttgtctctcagcccctgtcaggcttcaatttgcaaagctccatagt

SEQ ID NO: 39908 - DNA, 2215 bp, Homo sapiens
atttcatagtttagggttcactctttgggttgtacattctatgggttctgtcagttacataataacatgtatttaccattacaatatcatatagaatagttacagaatagtcacactactgcaggtggatgtccagttgttctaatagattgggcactttgctaagacttttgttctgagagggactgttgggggaatactgactgaatttcatgttgtaattgtacaagggaaaaaattgattttcttcacagggaattggttttctcaaggtcacacaactaatgctggctaaattgagaacaaacactgatctacaaagcagaatttcaattttaatttttaatggaagttgtcttttcaatgaccaatgtgcttgtatgtgttgcctggtaccttctaagttagaagatttttccatacagattaaataatcagatggttatttggcgaaataaagcaaagagattaagagagtcttggaggacatttcatgtaggttgtgaggtaacctgaatatttttcctactttactatgtagtccacttttctagtaacataaattctcatatctcttagggatggtgtcttttttttagtcactagatacacacacacacacacacacacacatacgcacacacacacacactctttaattttctttgtccttgattaaacatatcacaatacttgtatattgttatagcctgaggcataacatcattaataggctaacagtttatcttacattagtctttgttaatgctgataaattcaacattcagttctaatctcctgttctttgacaggtactgtaagaggggtggaaatttcaggaacacctgagctttttttgataaatgtttcagagattctcccatgccttttataagcttttggaagctttcataattttatcttttatgtttggttatacagagttagtatgtttaatttatgttaatttttctgacatttttcctaaattccagaagttactaccatttggggccaggtaatcaatagggactgtcaagagaaataatttagccttcccttggttctaaccaccttccccaaatacattatctctatgaagtctatgcatgcaatatcccaagtgtcttattataggtgattctattttcacaggcagcaggtaatataaaacattctaaaactgtttctcattctttctattccattcaagattttcaaataggtgaagcaagaattaggactggctacttcagtgagtatattgccctttgatgggcagaattcacccaggtcmtcttaagatagagtaaatcagctttacaaagtgagaccttgttgttagagggtagcaatgaattactgcctctactggacatcacttcatgggactcattactttttccaaaacctaattatcttaccacatcacaaagtattttacttagtcattagatgttttgaattacagaggtgaaattttctattatttacagacaaaatacgggaagggtagataatctagagagagagagagaacagagtgtttctaaatttatgctattgacaataataaaagttcagagaaaaagagcaaaaatcaccaaattttaaacacaacatgaatatctgcttcaaccaatgaagaaatgaagaaataaaaacatgtaaagcatcaagacaaaaccctgcctatcgctgatgctcaatcaaaatccgtgaaattgaattggctttgttaattcatggttgatttatctcatgagacactcgagggctgctattgcgtctctttaaagagaggtagttacgcttcagacagcagcagtgtggaaagtcaggctcatgtggttgttttgctgttgttgttgtttggttttgagacagggtcttactctgtcacctaggctggagtgcagtagtgcgatcacagctcactgcagcctctaacacctgagctcactgatccttctgcctcagcctccagagtagctgggatcataggtgcgtgccatgatacccggctaatttttttttttaatatagagatggggtttcactgtattgccaggctggtggcaaactcctgggctcaagcgattcctctgccttaatttaccaaagtgctgagattacaggtgtgagccaccaagcccaatgcttttgttttatcgattttgttttagcattaaattctaataaactttttcattat

SEQ ID NO: 39909 - DNA, 2215 bp, Homo sapiens
atttcatagtttagggttcactctttgggttgtacattctatgggttctgtcagttacataataacatgtatttaccattacaatatcatatagaatagttacagaatagtcacactactgcaggtggatgtccagttgttctaatagattgggcactttgctaagacttttgttctgagagggactgttgggggaatactgactgaatttcatgttgtaattgtacaagggaaaaaattgattttcttcacagggaattggttttctcaaggtcacacaactaatgctggctaaattgagaacaaacactgatctacaaagcagaatttcaattttaatttttaatggaagttgtcttttcaatgaccaatgtgcttgtatgtgttgcctggtaccttctaagttagaagatttttccatacagattaaataatcagatggttatttggcgaaataaagcaaagagattaagagagtcttggaggacatttcatgtaggttgtgaggtaacctgaatatttttcctactttactatgtagtccacttttctagtaacataaattctcatatctcttagggatggtgtcttttttttagtcactagatacacacacacacacacacacacacatacgcacacacacacacactctttaattttctttgtccttgattaaacatatcacaatacttgtatattgttatagcctgaggcataacatcattaataggctaacagtttatcttacattagtctttgttaatgctgataaattcaacattcagttctaatctcctgttctttgacaggtactgtaagaggggtggaaatttcaggaacacctgagctttttttgataaatgtttcagagattctcccatgccttttataagcttttggaagctttcataattttatcttttatgtttggttatacagagttagtatgtttaatttatgttaatttttctgacatttttcctaaattccagaagttactaccatttggggccaggtaatcaatagggactgtcaagagaaataatttagccttcccttggttctaaccaccttccccaaatacattatctctatgaagtctatgcatgcaatatcccaagtgtcttattataggtgattctattttcacaggcagcaggtaatataaaacattctaaaactgtttctcattctttctattccattcaagattttcaaataggtgaagcaagaattaggactggctacttcagtgagtatattgccctttgatgggcagaattcacccaggtcctcttaagatagagtaaatcagctttacaaagtgagaccttgttgttagagggtagcaatgaattactgcctctactggacatcacttcatgggactcattactttttccaaaacctaattatcttaccacatcacaaagtattttacttagtcattagatgttttgaattacagaggtgaaattttctattatttacagacaaaatacgggaagggtagataatctagagagagagagagaacagagtgtttctaaatttatgctattgacaataataaaagttcagagaaaaagagcaaaartcaccaaattttaaacacaacatgaatatctgcttcaaccaatgaagaaatgaagaaataaaaacatgtaaagcatcaagacaaaaccctgcctatcgctgatgctcaatcaaaatccgtgaaattgaattggctttgttaattcatggttgatttatctcatgagacactcgagggctgctattgcgtctctttaaagagaggtagttacgcttcagacagcagcagtgtggaaagtcaggctcatgtggttgttttgctgttgttgttgtttggttttgagacagggtcttactctgtcacctaggctggagtgcagtagtgcgatcacagctcactgcagcctctaacacctgagctcactgatccttctgcctcagcctccagagtagctgggatcataggtgcgtgccatgatacccggctaatttttttttttaatatagagatggggtttcactgtattgccaggctggtggcaaactcctgggctcaagcgattcctctgccttaatttaccaaagtgctgagattacaggtgtgagccaccaagcccaatgcttttgttttatcgattttgttttagcattaaattctaataaactttttcattat

SEQ ID NO: 39910 - DNA, 2215 bp, Homo sapiens
atttcatagtttagggttcactctttgggttgtacattctatgggttctgtcagttacataataacatgtatttaccattacaatatcatatagaatagttacagaatagtcacactactgcaggtggatgtccagttgttctaatagattgggcactttgctaagacttttgttctgagagggactgttgggggaatactgactgaatttcatgttgtaattgtacaagggaaaaaattgattttcttcacagggaattggttttctcaaggtcacacaactaatgctggctaaattgagaacaaacactgatctacaaagcagaatttcaattttaatttttaatggaagttgtcttttcaatgaccaatgtgcttgtatgtgttgcctggtaccttctaagttagaagatttttccatacagattaaataatcagatggttatttggcgaaataaagcaaagagattaagagagtcttggaggacatttcatgtaggttgtgaggtaacctgaatatttttcctactttactatgtagtccacttttctagtaacataaattctcatatctcttagggatggtgtcttttttttagtcactagatacacacacacacacacacacacacatacgcacacacacacacactctttaattttctttgtccttgattaaacatatcacaatacttgtatattgttatagcctgaggcataacatcattaataggctaacagtttatcttacattagtctttgttaatgctgataaattcaacattcagttctaatctcctgttctttgacaggtactgtaagaggggtggaaatttcaggaacacctgagctttttttgataaatgtttcagagattctcccatgccttttataagcttttggaagctttcataattttatcttttatgtttggttatacagagttagtatgtttaatttatgttaatttttctgacatttttcctaaattccagaagttactaccatttggggccaggtaatcaatagggactgtcaagagaaataatttagccttcccttggttctaaccaccttccccaaatacattatctctatgaagtctatgcatgcaatatcccaagtgtcttattataggtgattctattttcacaggcagcaggtaatataaaacattctaaaactgtttctcattctttctattccattcaagattttcaaataggtgaagcaagaattaggactggctacttcagtgagtatattgccctttgatgggcagaattcacccaggtcctcttaagatagagtaaatcagctttacaaagtgagaccttgttgttagagggtagcaatgaattactgcctctactggacatcacttcatgggactcattactttttccaaaacctaattatcttaccacatcacaaagtattttacttagtcattagatgttttgaattacagaggtgaaattttctattatttacagacaaaatacgggaagggtagataatctagagagagagagagaacagagtgtttctaaatttatgctattgacaataataaaagttcagagaaaaagagcaaaaatcaccaaattttaaacacaacatgaatatctgcttcaaccaatgaagaaatgaagaaataaaaacatgtaaagcatcaagacaaaaccctgcctatcgctgatgctcaatcaaaatccgtgaaattgaattggctttgttaattcatggttgatttatctcatgagacactcgagggctgctattgcgtctctttaaagagaggtagttacgcttyagacagcagcagtgtggaaagtcaggctcatgtggttgttttgctgttgttgttgtttggttttgagacagggtcttactctgtcacctaggctggagtgcagtagtgcgatcacagctcactgcagcctctaacacctgagctcactgatccttctgcctcagcctccagagtagctgggatcataggtgcgtgccatgatacccggctaatttttttttttaatatagagatggggtttcactgtattgccaggctggtggcaaactcctgggctcaagcgattcctctgccttaatttaccaaagtgctgagattacaggtgtgagccaccaagcccaatgcttttgttttatcgattttgttttagcattaaattctaataaactttttcattat

SEQ ID NO: 39911 - DNA, 2215 bp, Homo sapiens
atttcatagtttagggttcactctttgggttgtacattctatgggttctgtcagttacataataacatgtatttaccattacaatatcatatagaatagttacagaatagtcacactactgcaggtggatgtccagttgttctaatagattgggcactttgctaagacttttgttctgagagggactgttgggggaatactgactgaatttcatgttgtaattgtacaagggaaaaaattgattttcttcacagggaattggttttctcaaggtcacacaactaatgctggctaaattgagaacaaacactgatctacaaagcagaatttcaattttaatttttaatggaagttgtcttttcaatgaccaatgtgcttgtatgtgttgcctggtaccttctaagttagaagatttttccatacagattaaataatcagatggttatttggcgaaataaagcaaagagattaagagagtcttggaggacatttcatgtaggttgtgaggtaacctgaatatttttcctactttactatgtagtccacttttctagtaacataaattctcatatctcttagggatggtgtcttttttttagtcactagatacacacacacacacacacacacacatacgcacacacacacacactctttaattttctttgtccttgattaaacatatcacaatacttgtatattgttatagcctgaggcataacatcattaataggctaacagtttatcttacattagtctttgttaatgctgataaattcaacattcagttctaatctcctgttctttgacaggtactgtaagaggggtggaaatttcaggaacacctgagctttttttgataaatgtttcagagattctcccatgccttttataagcttttggaagctttcataattttatcttttatgtttggttatacagagttagtatgtttaatttatgttaatttttctgacatttttcctaaattccagaagttactaccatttggggccaggtaatcaatagggactgtcaagagaaataatttagccttcccttggttctaaccaccttccccaaatacattatctctatgaagtctatgcatgcaatatcccaagtgtcttattataggtgattctattttcacaggcagcaggtaatataaaacattctaaaactgtttctcattctttctattccattcaagattttcaaataggtgaagcaagaattaggactggctacttcagtgagtatattgccctttgatgggcagaattcacccaggtcctcttaagatagagtaaatcagctttacaaagtgagaccttgttgttagagggtagcaatgaattactgcctctactggacatcacttcatgggactcattactttttccaaaacctaattatcttaccacatcacaaagtattttacttagtcattagatgttttgaattacagaggtgaaattttctattatttacagacaaaatacgggaagggtagataatctagagagagagagagaacagagtgtttctaaatttatgctattgacaataataaaagttcagagaaaaagagcaaaaatcaccaaattttaaacacaacatgaatatctgcttcaaccaatgaagaaatgaagaaataaaaacatgtaaagcatcaagacaaaaccctgcctatcgctgatgctcaatcaaaatccgtgaaattgaattggctttgttaattcatggttgatttatctcatgagacactcgagggctgctattgcgtctctttaaagagaggtagttacgcttcagacagcagcagtgtggaaagtcaggctcatgtggttgttttgctgttgttgttgtttggttttgagacagggtcttactctgtcacctrggctggagtgcagtagtgcgatcacagctcactgcagcctctaacacctgagctcactgatccttctgcctcagcctccagagtagctgggatcataggtgcgtgccatgatacccggctaatttttttttttaatatagagatggggtttcactgtattgccaggctggtggcaaactcctgggctcaagcgattcctctgccttaatttaccaaagtgctgagattacaggtgtgagccaccaagcccaatgcttttgttttatcgattttgttttagcattaaattctaataaactttttcattat

SEQ ID NO: 39912 - DNA, 2215 bp, Homo sapiens
atttcatagtttagggttcactctttgggttgtacattctatgggttctgtcagttacataataacatgtatttaccattacaatatcatatagaatagttacagaatagtcacactactgcaggtggatgtccagttgttctaatagattgggcactttgctaagacttttgttctgagagggactgttgggggaatactgactgaatttcatgttgtaattgtacaagggaaaaaattgattttcttcacagggaattggttttctcaaggtcacacaactaatgctggctaaattgagaacaaacactgatctacaaagcagaatttcaattttaatttttaatggaagttgtcttttcaatgaccaatgtgcttgtatgtgttgcctggtaccttctaagttagaagatttttccatacagattaaataatcagatggttatttggcgaaataaagcaaagagattaagagagtcttggaggacatttcatgtaggttgtgaggtaacctgaatatttttcctactttactatgtagtccacttttctagtaacataaattctcatatctcttagggatggtgtcttttttttagtcactagatacacacacacacacacacacacacatacgcacacacacacacactctttaattttctttgtccttgattaaacatatcacaatacttgtatattgttatagcctgaggcataacatcattaataggctaacagtttatcttacattagtctttgttaatgctgataaattcaacattcagttctaatctcctgttctttgacaggtactgtaagaggggtggaaatttcaggaacacctgagctttttttgataaatgtttcagagattctcccatgccttttataagcttttggaagctttcataattttatcttttatgtttggttatacagagttagtatgtttaatttatgttaatttttctgacatttttcctaaattccagaagttactaccatttggggccaggtaatcaatagggactgtcaagagaaataatttagccttcccttggttctaaccaccttccccaaatacattatctctatgaagtctatgcatgcaatatcccaagtgtcttattataggtgattctattttcacaggcagcaggtaatataaaacattctaaaactgtttctcattctttctattccattcaagattttcaaataggtgaagcaagaattaggactggctacttcagtgagtatattgccctttgatgggcagaattcacccaggtcctcttaagatagagtaaatcagctttacaaagtgagaccttgttgttagagggtagcaatgaattactgcctctactggacatcacttcatgggactcattactttttccaaaacctaattatcttaccacatcacaaagtattttacttagtcattagatgttttgaattacagaggtgaaattttctattatttacagacaaaatacgggaagggtagataatctagagagagagagagaacagagtgtttctaaatttatgctattgacaataataaaagttcagagaaaaagagcaaaaatcaccaaattttaaacacaacatgaatatctgcttcaaccaatgaagaaatgaagaaataaaaacatgtaaagcatcaagacaaaaccctgcctatcgctgatgctcaatcaaaatccgtgaaattgaattggctttgttaattcatggttgatttatctcatgagacactcgagggctgctattgcgtctctttaaagagaggtagttacgcttcagacagcagcagtgtggaaagtcaggctcatgtggttgttttgctgttgttgttgtttggttttgagacagggtcttactctgtcacctaggctggagtgcagtagtgcgatcacagctcactgcagcctctaacacctgagctcactgatccttctgcctcagcctccagagtagctgggatcataggtgcgtgccatgatacccggctaatttttttttttaatatagagatggggtttcactgtattgccaggctggtsgcaaactcctgggctcaagcgattcctctgccttaatttaccaaagtgctgagattacaggtgtgagccaccaagcccaatgcttttgttttatcgattttgttttagcattaaattctaataaactttttcattat

SEQ ID NO: 39913 - DNA, 2215 bp, Homo sapiens
atttcatagtttagggttcactctttgggttgtacattctatgggttctgtcagttacataataacatgtatttaccattacaatatcatatagaatagttacagaatagtcacactactgcaggtggatgtccagttgttctaatagattgggcactttgctaagacttttgttctgagagggactgttgggggaatactgactgaatttcatgttgtaattgtacaagggaaaaaattgattttcttcacagggaattggttttctcaaggtcacacaactaatgctggctaaattgagaacaaacactgatctacaaagcagaatttcaattttaatttttaatggaagttgtcttttcaatgaccaatgtgcttgtatgtgttgcctggtaccttctaagttagaagatttttccatacagattaaataatcagatggttatttggcgaaataaagcaaagagattaagagagtcttggaggacatttcatgtaggttgtgaggtaacctgaatatttttcctactttactatgtagtccacttttctagtaacataaattctcatatctcttagggatggtgtcttttttttagtcactagatacacacacacacacacacacacacatacgcacacacacacacactctttaattttctttgtccttgattaaacatatcacaatacttgtatattgttatagcctgaggcataacatcattaataggctaacagtttatcttacattagtctttgttaatgctgataaattcaacattcagttctaatctcctgttctttgacaggtactgtaagaggggtggaaatttcaggaacacctgagctttttttgataaatgtttcagagattctcccatgccttttataagcttttggaagctttcataattttatcttttatgtttggttatacagagttagtatgtttaatttatgttaatttttctgacatttttcctaaattccagaagttactaccatttggggccaggtaatcaatagggactgtcaagagaaataatttagccttcccttggttctaaccaccttccccaaatacattatctctatgaagtctatgcatgcaatatcccaagtgtcttattataggtgattctattttcacaggcagcaggtaatataaaacattctaaaactgtttctcattctttctattccattcaagattttcaaataggtgaagcaagaattaggactggctacttcagtgagtatattgccctttgatgggcagaattcacccaggtcctcttaagatagagtaaatcagctttacaaagtgagaccttgttgttagagggtagcaatgaattactgcctctactggacatcacttcatgggactcattactttttccaaaacctaattatcttaccacatcacaaagtattttacttagtcattagatgttttgaattacagaggtgaaattttctattatttacagacaaaatacgggaagggtagataatctagagagagagagagaacagagtgtttctaaatttatgctattgacaataataaaagttcagagaaaaagagcaaaaatcaccaaattttaaacacaacatgaatatctgcttcaaccaatgaagaaatgaagaaataaaaacatgtaaagcatcaagacaaaaccctgcctatcgctgatgctcaatcaaaatccgtgaaattgaattggctttgttaattcatggttgatttatctcatgagacactcgagggctgctattgcgtctctttaaagagaggtagttacgcttcagacagcagcagtgtggaaagtcaggctcatgtggttgttttgctgttgttgttgtttggttttgagacagggtcttactctgtcacctaggctggagtgcagtagtgcgatcacagctcactgcagcctctaacacctgagctcactgatccttctgcctcagcctccagagtagctgggatcataggtgcgtgccatgatacccggctaatttttttttttaatatagagatggggtttcactgtattgccaggctggtggcaaactcctgggctcaagcgattcctctgccttaatttaccaaagtgctgagattacaggtgtgagccaccaagcccaatgcttttgttttatcrattttgttttagcattaaattctaataaactttttcattat

SEQ ID NO: 39914 - DNA, 569 bp, Homo sapiens
ggtattcaacaggactgcatctggtacacatcacatacaagtcccatgagggagaggcagcctcaggccaggacaaatctgaaggccttgaatatcatatccctcgcccagggcagrgattgttaatcagtctcaatattccttctgctgatctttcgggtgctttcagctctttctcaacacaaagtattctggttggctgaaccaaaacaaaagcaaaagcttttttgtcaatcagggaatagacagatgttggatttaagagctggggtgtttgggagagttcagtggtatgtgtttagctgctcaaaatgatcaaaagatatacctccagggttttggtgtgctgcagggttgaatcccaggctagcctaagaaccttgaaaaaatcttgagaagatatcttgtcttccaaatgtcttgttaatgggttggttctattggtcaaagataaataacactgatttttataccttgaaaaattagccctggaattactcatgataagaaaaaaaagtattttctgaaagtctaatatttaaggatattggaaaacaccacctgtgtca

SEQ ID NO: 39915 - DNA, 569 bp, Homo sapiens
ggtattcaacaggactgcatctggtacacatcacatacaagtcccatgagggagaggcagcctcaggccaggacaaatctgaaggccttgaatatcatatccctcgcccagggcagggattgttaatcagtctcaatattccttctgctgatctttcgggtgctttcagctctttctcaacacaaagtattctggttggctgaaccaaaacaaaagcaaaagcttttttgtcaatcagggaatagacagatgttggatttaagagctggggtgtttgggagagttcagtggtatgtgtttagctgctcaaaatgatcaaaagatatacctccagggttttggygtgctgcagggttgaatcccaggctagcctaagaaccttgaaaaaatcttgagaagatatcttgtcttccaaatgtcttgttaatgggttggttctattggtcaaagataaataacactgatttttataccttgaaaaattagccctggaattactcatgataagaaaaaaaagtattttctgaaagtctaatatttaaggatattggaaaacaccacctgtgtca

SEQ ID NO: 39916 - DNA, 645 bp, Homo sapiens
tgtaaaaaatacctgaaactgaataatttataaagaaaagaggtttcattggctcacagttctgcaggctgtccatgaagcatggcagcatctgcttggcttctggggaggcctcaggaaacttacaatcatggtgaaggcaaagggagagccagcacttcacatgactggagcagaaggaagggggtgtgtggtggtacacacttctaaacagccaaatttcatcactatcatgatgacagcaccaaggaaaatggtgttaaaccatgagaaactgccccaatgatcyaatcgcctcccaccaggccccacctccaacattggggattccaatttgacatgagatttggacggggactcagatccaaatcatatcatggcagaaggataagggggagcaggcatgccacatggcaaaagcaggagcaagagagagcaaggtgcttcacacttttaaacatccagatctcgcaagaagtcattcaccatcacaagtgatggtgtctcgaaaagtggtggtcatttttgcaatacaccatatgtaaccatcaatctagtagtaaaaaccacaaccacaaaggaaggattacatgaatgtgaccactgacccgtaagtcacagcccagctgaccactcaatcactat

SEQ ID NO: 39917 - DNA, 367 bp, Homo sapiens
ggaggattgctggagcccaggagtttgaggctgcagtgagccatgattgcaccattgcattycaacctgggctgcagagcaagatcctgtctctaaaaaacaaaattaaaacaataagaaattttaaaaaagtgacaggcaggtgccaagatatgtgaagctcctttggtttctggttacaattattgctctcatgattatatatctttattatttgccatgcccgctccttattggtcagttgctagctctaatagacaagaaagattagagaattatttacataagacctcacatatagttgctgctcattatatattagtggcatcaatatctagcttagttatcgattaaaataagtttgtga

SEQ ID NO: 39918 - DNA, 651 bp, Homo sapiens
  misc_feature (1)...(651): n = A,T,C or G
ttcncccctgggctcccagcatnggggtttaagttagagagtcagccacatttggttcaatgaatggaaggattatgctttttctagncaatcnctagctcttgatccaatcaattataaagtcctgtatctgggaagtataaagcttttcggaatacatttcaataaaatgaagttaaaagaaaaaaatcgcaattgaaggttaagagtatatgaaatcaatgtnccattaaaaggttcatcatcttcatacttagcacatttattgttgtataagaagttggcagataaagcaaaactttggttagagtcttgacacaaaaggagtttcttagatgaagactgggagtcyaatggctttttgaggacaagtccagggttttactgtctttttttgcctttatgtgtttatctgctttagagagaaaatttttgccttcaaaagagaactctttctgagctgccatttaataagcaacaacttcattttgcatgtaatctgatgtatcataaatcatacttgcttttgaagtccataaacaaaggccccctcacttttttttgagatgaggtttcccttttttgcccaggctgcagtgcagcagcatgatcttggctcactgcaacctctgcctgccgggctcaagtgat

SEQ ID NO: 39919 - DNA, 1320 bp, Homo sapiens
  misc_feature (1)...(1320): n = A,T,C or G
gcatgactcacctcaaccttcatccaaactgttgttccatcttcctgggacactccattccctacactccaagggctaacttggtgtcacgtttccagtctcaacataaactttattgcttcagggagaactttgctaaccctggcagatacacactaagttaatgttccatgtttaatgctcccacaccacccaacacttctacttttatgacagccagcacaacatatcctgttctgtcacattgcccatcatttactcaggtcgtcttccaccctggactgagaagaccactgtggctgctggtttggtattgtgttgccagtggatagcaaacatttatcaaatgaataaataaaaggtaagaatagtacttgtttcattcttatatctgctataacatctagcaaagtaactgaaacttaattagcattcaataaaatgcttatggattaaatgcaggaataagaaccctaaggatgtcagctgaattcagcactaccccaaatcaactgggaaaatccttcctaccgtcgttctttcctgatctctcagtgggtttcttgccttgctacttggctcagataaaagctaganngacnngcactacaggaggaaaaaaatggtaatatgcaatggagactaaactgctataatcaaaagtaatattcttctctctctctttcaactccttctattgaataccacccccatccccagagcaaaagatcactggaaacacacccataaaaaagtcacccctatattttttttataaaaagtatgctatttaggttctcagccatgaatatgtagctgatattgactaatgggaaatgtaaaaggaagaaagctacagctttttaaagcatactcattgaaattaaggtcatatgtaagaaatttgttttaaaaaaatttctgagccacatccaaaactctagagggcatattaaataatgaaaatgtaaactattgggatttgrtgctggttactatgttggcacagtacatagctccctgtgtggcttaaaaaattagggaattttcccttctccctttatctagtagcctccaaaattaaaacaattttcttttctttgtgtaataatacaagctaaccaaattatgctctaatattttcattcaatgacttgggaagtcatgaaaatgcttgtttggggagttgcccatatagaaacagaaagaaaaaaccgtatcaagaggattaaagagagagagagagataaaacaaagaattccaaggattgtcacaatctgatctgcataaataaaagataatggcttcagtgagctggc

SEQ ID NO: 39920 - DNA, 1320 bp, Homo sapiens
  misc_feature (1)...(1320): n = A,T,C or G
gcatgactcacctcaaccttcatccaaactgttgttccatcttcctgggacactccattccctacactccaagggctaacttggtgtcacgtttccagtctcaacataaactttattgcttcagggagaactttgctaaccctggcagatacacactaagttaatgttccatgtttaatgctcccacaccacccaacacttctacttttatgacagccagcacaacatatcctgttctgtcacattgcccatcatttactcaggtcgtcttccaccctggactgagaagaccactgtggctgctggtttggtattgtgttgccagtggatagcaaacatttatcaaatgaataaataaaaggtaagaatagtacttgtttcattcttatatctgctataacatctagcaaagtaactgaaacttaattagcattcaataaaatgcttatggattaaatgcaggaataagaaccctaaggatgtcagctgaattcagcactaccccaaatcaactgggaaaatccttcctaccgtcgttctttcctgatctctcagtgggtttcttgccttgctacttggctcagataaaagctaganngacnngcactacaggaggaaaaaaatggtaatatgcaatggagactaaactgctataatcaaaagtaatattcttctctctctctttcaactccttctattgaataccacccccatccccagagcaaaagatcactggaaacacacccataaaaaagtcacccctatattttttttataaaaagtatgctatttaggttctcagccatgaatatgtagctgatattgactaatgggaaatgtaaaaggaagaaagctacagctttttaaagcatactcattgaaattaaggtcatatgtaagaaatttgttttaaaaaaatttctgagccacatccaaaactctagagggcatattaaataatgaaaatgtaaactattgggatttggtgctggttactatgttggcacagtacatagctccctgtgtggcttaaaaaattagggaattttcccttctccctttatctagtagcctccaaaattaaaacaattttcttttctttgtgtaataatacaagctaaccaaattatgctctaatattttcattcaatgacttgggaagtcatgaaaatgcttgtttggggagttgcccayatagaaacagaaagaaaaaaccgtatcaagaggattaaagagagagagagagataaaacaaagaattccaaggattgtcacaatctgatctgcataaataaaagataatggcttcagtgagctggc

SEQ ID NO: 39921 - DNA, 592 bp, Homo sapiens
aagggcaacccacacaaaatctcacaggcatccaagcctggagcagcctcagctgggagccattttgagagcccagatactgggtacctacacatagggctacaaccactgcactgctccaaggagggagagggagggagggaggcacacccccrggagggtaattgctaccttcttacaagctgccgttcaggctgagatacaagtggcctgcactccttacagtttcttgctcacacttcttgcctagatgattccccacaccctctggttccagtcctaaggcatcatttcaagagtttaacaatggaatgcaccccaccttcagcctgagcttagactgatgtgctgcagccactgcccagccaaaaaagggtcggggaaaccaggccatcatacacatatttaacataagcaatacccactgatttgcaacagactgctgtgagactgagatgccagtgaactgcactctctacagcttcttgtccgtgctgcttgcctgggcagtgctccaccctccctggatgcaggcccaaggcatcattttgagagtacaatgccaggctgtgccccaccctcagcctgaatt

SEQ ID NO: 39922 - DNA, 592 bp, Homo sapiens
aagggcaacccacacaaaatctcacaggcatccaagcctggagcagcctcagctgggagccattttgagagcccagatactgggtacctacacatagggctacaaccactgcactgctccaaggagggagagggagggagggaggcacacccccgggagggtaattgctaccttcttacaagctgccgttcaggctgagatacaagtggcctgcactccttacagtttcttgctcacacttcttgcctagatgattccccacaccctctggytccagtcctaaggcatcatttcaagagtttaacaatggaatgcaccccaccttcagcctgagcttagactgatgtgctgcagccactgcccagccaaaaaagggtcggggaaaccaggccatcatacacatatttaacataagcaatacccactgatttgcaacagactgctgtgagactgagatgccagtgaactgcactctctacagcttcttgtccgtgctgcttgcctgggcagtgctccaccctccctggatgcaggcccaaggcatcattttgagagtacaatgccaggctgtgccccaccctcagcctgaatt

SEQ ID NO: 39923 - DNA, 690 bp, Homo sapiens
ttattgaattaaattcctcagcactttaataataactgtccttcactggtcaggcaccagactgtaaccccgttaagaactgccaagcagcaacagaggtcttattaacctcatctccactgaagtgagccaggccccagggcagagctacaaaggggagcttacaaatctctgacacagcattttaatgccacaggggatttttttttcctttcccacacattgtgttaacccttcgggaacaggggggaaacccagtgtagagcccattagtggctttccttcagagctcttcaaagaggccccatcatttgccaacatgatttttcttaatattgtgcagatggcaggctaatccatcttcaaatgatctaattgcatctaactttctctgaagaaacattgcatggagttgcgatgtcttaattgtggggtgtatgcagagtgtctccaagattacagagccaagcactcaaaccaaagctggggaatttctagtggaaactctcaggggaagaaaacagaaggtgaagattggcaaactggtaagcttcatcatgtccagttcttagggcccagtcttcawaaaattgaagtcatgctttcacatactggctgcgaatttccactcagggcttgtagaggctcccctgtgccttcaaagccttacacttgcatttaccatggaga

SEQ ID NO: 39924 - DNA, 581 bp, Homo sapiens
ggatcataatgctagttttctaggtctttgctactcaaagtgtgattccaactgcgttctggcccctcctctacccttccaacagtgccatcacctgggagcttgttagaaaagcaggatcttggggctgacctcataccttctgaatcagaagttgcattttaacaagattcccagggaatttgcacattcaagtgtgaggagcactgatcttttatttcattttttttcagatggagttttgctctgtcacccaggcyggagtgcagtggtgcaacctcggctgactgccaactccgcctcccaggttcaagtgattcccctgcctcaggagagtagctgggattacaggtgtaagccacctcacctggctaatttttgtatttttagtagagatggggttttaccatgttggccaggctggtcttgaactcctgacctcaagtgatctgcccccctcggcctcccaaagtgctgggattacaggcgtgagccaccacgcccagccaggagcactgatcttgaggactgcttttttcaactgcacctgcccccacctcagcagccagaattctttcttc

SEQ ID NO: 39925 - DNA, 566 bp, Homo sapiens
aaaaaaaaaaaaraaagaaaaaaaaaaaacattgtctctccctggttgccgaattacgatttttagagaagcaatgtgataattgttgaaccatcacccgacatttgtagtgggtgggggatagccctctcctgctctgcgtatgcctaactacctgtaacagcttcattgactcgaaattgtcttccaaactgaaaaggacacttaaggtaatagaatctaggtgagagtagatgggatgatttttgagaggaatatgttgaacttcaagtagaaatgtccagtacaatttggggaaagagtctgcatttcactaaagcgatctgagttggaagcatctaattatcaaatatgggtagtagaaaaagacgtgtaaagtagacattatcaagtagtagaaaataatagaatcaagttagtaaaataagagaatttaaagtttatgctatcaataacttccacattcttacctctctgtcccatcttctcgacatgtcatttgctatagttgacttcttccttgaaattttaccttcatgtggcttcgcttctgtgacaccttattt

SEQ ID NO: 39926 - DNA, 611 bp, Homo sapiens
tgtctaatcttctcgtattctttagtaagagaacttcattttttcaaggtagcaattgacccaactaaaagacaaaattttatactttgctgctagtttggaccatttaactaaaaactgctaaataaatatgccaattttatagtactttcaggaatcattcttaaggaaatagtctttcatcttctttctttccttctgttacctgctggctgtaatatatatgcaatcacatacaaaagcagtaatatgaaggaacttgaaccatcattaattgtggaaatgcaatgcaagcaaagacccagatgctgaatgatagccttaaaagctacctgcctagacctttgttttgcattggtaaacaattttggcaaactgttacattttatgctttggaaggcaaactgcagactggctaaggtggtgttattacgtggaattgtaaagggagtcacaggatcmctttatgattgctgcttgctgcttttggtaaaatcctgcaaaattgttatggactcaacgtagaagaagcctatctttaagcagaaataagaatcccttatattgcagatttgtaggataaaaagtcaacagcttctgtcctagatgag

SEQ ID NO: 39927 - DNA, 542 bp, Homo sapiens
tgcttacaaatttagaggataccagaattgcacaaccgccatcatgacagagcatctgctcagtgtaaaaactttgtttaggaaaaaaaaaaaaaaatccaatggatatatgggaagagaagtgccaggctggatggtgctgagacagaatgaccccttgggctcctttattttgttcttttcaacaggaccccacagatatttgcggtatgtcatgaggackggggatgtcttctatttttaaatcaggtatttagtcaagctgcttttaatattaagactgtacaaattgatttttgttccctgtatctttcctcagaggcagaaagtgaatgttataaaactggcagattttatttctcataccagaggctcacacaggatttctttctgcatgggggacaactggctcttggtttcaaacacacttgagcctctagcaccattaagcatccagcagcttcctcggcatccaggctgagatatccatattccagaacaaagcagccaatgtgaaggatgtgcatcactgggaagagaga

SEQ ID NO: 39928 - DNA, 632 bp, Homo sapiens
tgactaaataaattaaaatagacaaaattaacactttaaaattaataccatctgttaacatttgtcttttataagagttttaaatgtttctcaataaaggtcttgtgtcttccttctttgtttaattcataaatataacctacagtaggaatccaaactgttaaattatattttctaatgttcatggtatataaaaactgtgccaacataatttaatcttctgtccagcaagtttcctgtactggcttatttgaaacattttttgcrtcaggtctcttagaggcgtgagtggttatatcacttaaaagaataactctttgatcttcgtctttatattttggtatctctttattcttggaataactccaggacaatgatcatcagatcattttaaatctaatttgatagtactttatttagaattttcacatctattatagtaaatgggactatagccttatactatctttatccaatattcgaatgaaggtcataaaaccacatataatgtatatgagattatcttagcttgggtttccccaaaagcagagcttgagacaaggaggggatttaggtggcatgctgaagtgacctcagggtggggagagtgagagaagaggaagaaaagccaa

SEQ ID NO: 39929 - DNA, 1190 bp, Homo sapiens
aatccagaacttcatgtggcatttagctatcatattgctgtagattccttcactctagggcatgccgtcacctcacctaacatggcagtgtcaatccagtgtgctaaatgctgagctggtgatgtgcagatgccgtgtgggagctcaggggacgacgaggcatcttcttctttgtctttgaggcatcttctttgtcctcgcacaaacatatctgctctgttcaaggactgaataacagctgatggacgccattcgccagtttaacttgtgaagttcaacaaaatacccaagcacctcctattttaactctgggcatctttctctctctcaatgagaaggtaggaaagtctttaaaaataaaaaataaaattaaaaaaaaaacagcagcagcaattcttgtccaaattattcctatctaaaatgttgtgaactaaacatacatatgccacaattattcccatataacccaccagcagcttaatatcagaatcacacatgaggctcaagtttgacattatagctcagaatttcaatattttaactgtgctcagatcatctgcaaataccacaataatctgcaaaatgtgctaacacagctcattctgccacaaaaagaaaatgtgaaaatagggaggttttgttaaaataataacaacaaagaacaatgacaagaaagccttctctttttccaacgaacgcttgttcagtgaaaggtaaaagtggaaataatattatagaacaaaaagcaaagcataattattttcttgtttagctgaggtataccaaaaatactcaaaggttttgcactgaatgggtttaagtttagtaatttttatctaggtttacctctttaaaaacagaattttaaaaaattatcagaaatttttaaataatccatactatcaaaataggtatagaatccctgtggcatgctttgaatggctgcatgaccactcatactggaatctttacaggcagggatacagaggtcacaatacaacactttatgtggctttctccaaaagaaattmtttagcatggacacctgagtccttcatacttgaagagagtacatttaatgatctaatcaatgaaaaggatgaaagtgaatacaaacttaactttgacgttatagacagtccagcctgtggaaatcagggccacaaggcttaaagtcccaattgaattgg

SEQ ID NO: 39930 - DNA, 629 bp, Homo sapiens
actcttacaaaaagtcgaggaataaatgaagaacttaagaatatcactgaatccatctcatttccacaaactattgaataaaaataaattcaccagctgttgcagccatccttgtttttcaggaaaggtttagtgttatctgttggaaagacaataatctaaaatgtgaacaaagaagaaatgttaatcttctttgtaattcattgataatttatgagtgtgagagatgtcagcaatttaccaattttaattatgtcacwgcactcacttatagaaagcatttgtgacactgaattgcccatttccttggaaaaaaatccactcaattataccatgccttctctcacaggataaattttaaatgtttcttagtttgcatatttagaaattatatttcataattgctaaaggcatagattttaaatgttcttaccacaaaaataataagtatgagaggcgatggatatgcttattagcttaattttatcattatacaatataacatataccaataaatcacactgtaccccatcaaagatatacaattagtatttgtcaatatataagaaaataaatttgcaatgatggtactttttctcctgacatctgcccagaggctctctcagttc

SEQ ID NO: 39931 - DNA, 600 bp, Homo sapiens
atgttaccaaataaagatatcatggggattgaatattagataagatagatgggtttgcttaattttgcatttttattttgctgtcattggtagcacttccattatgtgtcctgcatcagcatttttcctatatcctctcttttaatattttttctttttcaattccccttttatgtcagacatattcccaatactcttcattcttaatgtattaagcatgactggcatttaaaaaatcaatttaactttgtttgtttaacaaaaatctatgtagctctattatgtgccagtgtctacatgctttatgataacaactcaatcagtcctcataacaaggatatcaggtagttacttctttttttgttcattgtataggtggggtaattgagggctggagagattaactttcccaataactcacagtcagtagggatagagctcagatttgaagcgaggctccaaattctaggttcttaccttatatatgtttcctcagttttaagtagggtatttgatttgcatttccatccctaacttgtkaaattcgattatcccttccatgtataatagagtataaattaaaaatataattttaaactt

SEQ ID NO: 39932 - DNA, 600 bp, Homo sapiens
atgttaccaaataaagatatcatggggattgaatattagataagatagatgggtttgcttaattttgcatttttattttgctgtcattggtagcacttccattatgtgtcctgcatcagcatttttcctatatcctctcttttaatattttttctttttcaattccccttttatgtcagacatattcccaatactcttcattcttaatgtattaagcatgactggcatttaaaaaatcaatttaactttgtttgtttaacaaaaatctatgtagctctattatgtgccagtgtctacatgctttatgataacaactcaatcagtcctcataacaaggatatcaggtagttacttctttttttgttcattgtataggtggggtaattgagggctggagagattaactttcccaataactcacagtcagtagggatagagctcagatttgaagcgaggctccaaattctaggttcttaccttatatatgtttcctcagttttaagtagggtatttgatttgcatttccatccctaacttgttaaattcgattatcccttccatgtawaatagagtataaattaaaaatataattttaaactt

SEQ ID NO: 39933 - DNA, 557 bp, Homo sapiens
attatgttttgtttccttgtgtatatttcaattyaaaaaagtagagaaaaaggataaaacgagtatattagaattgatccacattcatcactgcttttaaaaataaaagagattctctatcaataaaacatctcactgtttttataataatttttaggagaaatcaacattattgtaacatgaataataaaaaacataaatgagtagctaaaatttcaatgctactcttgtaaaaacactgaaacactgaactgtaagcatccttatttagttgcaataaatattgaagtgtttgtggtttctacaccttacttagagcttgtcaaatatatttgtaattcttctaaattatacatttatttgggtaagaaaactattacagcacagtactttgggaaccatttacaggaaaggaaatttttttctgtgttttcaatttttatgtattttagactagattgtatttacaaggattttcttctgtaaattttaaggatgaagataccatcttgtattgatatcaataataaatttatcataaatatcgtacattttaa

SEQ ID NO: 39934 - DNA, 426 bp, Homo sapiens
agcctgggcaacagagtgagactccgtctcaaaaaagaaaaaaaaagtttattttttctaactttcttattttcttgggttaaactagagctcttaaattaacctgcctgcccatcagctttccagactaggagtgattatataacttacaattcttactggggacctgaaagycccaacatgctctgaagcctggaaaattaggtggaagaaggaaaagatagaaccttggcacagagagaaaaaaaaagtggttagcatctgtgctggactaaaaaatatataagtatgaatgttagattttgtgagttacatcagggacacatgtgcatatctgcattagatgtgtgtgcaattctgtggtcaagagggtgtctgtgagtgagaagacacatccaaagatttaatgagaagaataatgatttt

SEQ ID NO: 39935 - DNA, 528 bp, Homo sapiens
ttttttaatcsaaaaaaagtttatatatatagaaaatagaatagagatgaattcagtgcacaatttatcagaggtggaaagaggtggatgccatataaaataatccatagattctgactttaccaccctttccagattttgagaagtctacgtagaattttcaataaagactctgttgaataacaatagcaacactctgtacttatacagcttttttttccttgagttcagagtgctttataaacactatctcattaatcttcacaacttccctatatggaaagaggtttcagctatcattactcacatctttatcaacaaagaaacagttgcctgcagagtggctaagcaacttgtccaaggtcactgagggagtgagtggcaaagccaagaataaaactcagggctttgaccttccagtttagtattctctccaggaggccacattgaaagaagagcagcttctaacatgcatattcataaatctcccaagaaaaatctaccatttctcaatatttacatgagtca

SEQ ID NO: 39936 - DNA, 1177 bp, Homo sapiens
tgcattcactgataagacctcacaattctcatgaattcatcccttaattctcatgaatttacaattcttactcttcatttgccatattaattatcggaccatagagtctttctttaacccttcattgtttactaattaagtcaattaactacattccattcattttaatgagtgtcattttggttactacacacacacacacacacataacaagaagccatataatagtaaaaattaatctttctttagactctctcctaacaattcacttcttttaaggcagtcagaacatcagcctctgtcttgtggggctgggtgtttcattaagtgagcacagtaattttgccctcgttaggagctttttaaaagctttcaggaaaatacaatttgaaataaataatgctgattaaacaccctttcatggaagaaataatagaaagagatcaagtgataaacgaaatgaatgttgcgctatcaaagcaaatggtgattaatggaaggccagttctttgcttgcactggcacctctgtaagctggtcagtaccatttataattgtgttttagtgttttgcagcccagtcatttatactaacggtaacattaaagtgataaattaggaagaagcaggttgtctaatcagcagataggcagtaatgcagctccagtcaaaaggagagtgattccttttcttttttgtgttaataatcaaggaatagaaggatggtttgatttgaagggaaatttgccaaatatgcaggcattcacatatttaaattattttaatatttccttttctttctttttaaagtaagtttgcattttactttaatcctctttcaaatgatgtaccttttcttttaatcacctaaaagagagaattgcagtaygccagtgctgtaaaaaggtcgtttcttgtaccttaactattagctgtttcaaaaaatttaatattaactgcagaccatcctgctgtaacttgttactctgcaaggaaatcatagccaccaatgcggtgctacctgttggactttgtatctcttaagcatattcttttaaaaaattttttactttaagttctgggatgcaagtgcagaatctgcagattagttacataggtatacatgtgccatggtggtctgctgcacctatcaacgtgtcatctaggttttaagcccc

SEQ ID NO: 39937 - DNA, 580 bp, Homo sapiens
aggaactcatctgtttgtataagttaaatgccagcattttaggttcattcatggacacatataaggagaacgtggaaaaaaaacaggacagagaaaaatgtaacagaagaacctaaaaatttggaatataattattgctttgaataacttaattccacttattttctttcttttcttttttttttcttttcttttatttttttgagatggaggagtctcgctctgtctcccaggctggagtgcagtagtgcgatctctgctcactgcaagctccgcctcctgggttcacaccattctcctgcctcagcctcccgagtagctgggactacaggcgcycgccacctcgcccagctaattttttgtatttttagtaaagacggggtttcaccgtgttagccaggatggtctcgatctcctgacctcatgatccgcccgcctcggcctcccagagtgctgggattacaggcgtgagccaccgcgcctggcctattttctttcttttataactcattggtttctatttgtcttccagtcttcagcttggaagccacttcccccatataagcttcttgacccatca

SEQ ID NO: 39938 - DNA, 380 bp, Homo sapiens
  misc_feature (1)...(380): n = A,T,C or G
tgcatggaaagcaataactttgtttgactcactatttactatggattatggtccagacgttttacaactctataaaattagaaattagtgtagagaaaattgatgatgcaatgattgtagtttctgttttacatttaccaatmtcatttcatcattctctcttgtcctctggctacctaaaattccaatttttcatattctctttaaaccagctttgtcatcctaccaattcccttatttcaaaattaaataggactttgacatgtgctcagtatctcctttatgacaattatggnttttacattttgagggtgattctttgataagggttaggggaggcaagagtgggtagggctggtgtttctggaggctggggggac

SEQ ID NO: 39939 - DNA, 530 bp, Homo sapiens
tcctaagttcagctaatttatcatttctggactgacttgtagctaataataggacaagcctagttgaattttaattataaaatgacagtaaaatgcatttttaacaataaaaagaagagctacatagttaattcccccatataaacagctcaaatttgacctgtgacacctaatatcaagtcttattcaaaaaggtattatttagaggaggarcatataaacatgtaaaaagacgttttgtactgacttcattttaatatgggaaaacaaaattaataagagaattgaaatttgtatttctactttaaacttgaaggtaatgtactttagctgatagaaacttttgtaataacaagattagatttagtaagttagagtaagttaatatgacccctttcttataaattatttttcatttttttaaataaaaactttgagggatcagtggacaattcatatattataatataatatgatatatcatcaccatatatttaagttctagcaacaaatgttttaaaattatttcc

SEQ ID NO: 39940 - DNA, 810 bp, Homo sapiens
agggtgaaatgatctatggacgaccttgagggctttggagatggtctctttcagggcaggtcactttaaaaccaataatayggaagcagggaagatgcctctggtggctaaggaagtctgtctcctgcatttttatgctgggcacttttcattagataagtaagtatatgtcagaaaaacgtgaaaaaaaacccatctgtgtctataactaattaaaaagatgtgtgatcaacaaacaccctcttctcctacaaccagggaacaaacagctcattactttccttaaaagccatcctggaaacctttcccggggaaaatgcgctgagcattgattatctatctacacccatcatagccacacggcacattattccatttgttgggagaccttactttaccggttgcagaccaagtttccagagtagaaagcatggtcttagtctcaccccaactaatggttcttcagaggtctcccaaaactcctgccgcctcttctgcacgttaatgaaaataaatggcaccaatctcaatgttctttgcctcagaccaaatggggccaggagcttagaagcaagaagctgaggcatcagcagggtactcccaggacagggcttcctttggctgtgatcattacgtgattccctgacaggctgctgttttcgtcgacggtgtccgtaactcactgactgaaatctttgacctctgtagtacagatgggatccatttgctgccagtaatgatgtgtgacctcttggtgaaggcaggggaagaaaagaagctgaagagatcttcaatatttttgagaatgca

SEQ ID NO: 39941 - DNA, 810 bp, Homo sapiens
agggtgaaatgatctatggacgaccttgagggctttggagatggtctctttcagggcaggtcactttaaaaccaataatatggaagcagggaagatgcctctggtggctaaggaagtctgtctcctgcatttttatgctgggcacttttcattagataagtaagtatatgtcagaaaaacgtgaaaaaaaacccatctgtgtctataactaattaaaaagatgtgtgatcaacaaacaccctcttctcctacaaccagggaacaaacagctcattactttccttaaaagscatcctggaaacctttcccggggaaaatgcgctgagcattgattatctatctacacccatcatagccacacggcacattattccatttgttgggagaccttactttaccggttgcagaccaagtttccagagtagaaagcatggtcttagtctcaccccaactaatggttcttcagaggtctcccaaaactcctgccgcctcttctgcacgttaatgaaaataaatggcaccaatctcaatgttctttgcctcagaccaaatggggccaggagcttagaagcaagaagctgaggcatcagcagggtactcccaggacagggcttcctttggctgtgatcattacgtgattccctgacaggctgctgttttcgtcgacggtgtccgtaactcactgactgaaatctttgacctctgtagtacagatgggatccatttgctgccagtaatgatgtgtgacctcttggtgaaggcaggggaagaaaagaagctgaagagatcttcaatatttttgagaatgca

SEQ ID NO: 39942 - DNA, 1088 bp, Homo sapiens
tggtcaagtggagattgtgattcaggaggtgtggaatggggccccagaatcagcatttctaacaagttcccaggtgatgccagtgctcctaagcttcaggccacacctcggatagacacggccatggtgtgtttgttgtccctgatgccaactgatccgtggggaggagaaaattttgaagccattttaggcaaacaaactcctttgagtgtagarcttctctgggttgttagaaaatgatttctagtttttatacagagatgggactgacaactatggtttaggggaggagctgggcttccagaatctacaatgttccagaccaaagtaacctggtagatccatgatgcccaatcttgactgattagcaaaaccatcaaggggagctttcaaaaattcagatttctgggttctacctgaatagcctctcacttagcacattagagacgggacccaggaatccgtatttttaaacagctgattgaggttcagacagattttgggaagcactgatctagtccaccctctgcccacctcctacccctcacatatacacgttttatagaagaggaggctgccccaggcgtgagcttcccttctgcaacaatacggcattttctgctgacgactgagtgagtgagaaaaaagaaatctgagtgagtgataggcagaatttcttccaggttgctgtttggggaatcagattcaggctaataaattcaggccatgcgtctgccttcgctttccttggctgtcaggctaattttatgagacagtaaagacaacagccgggtatagagatggctaataaaaaagacaatttggcccttcaagaacagaaggagattttatgcctctccaggatgccatactcccgtgtggaagggcacatgattctccgagggatgtgccacaccatgggcaggctggctgcctacccctccagcatacctgggtgctgcagctggtcatggtgggccctccttagacaactctctggcattctatcttccttcaatgaccaagggtgggctgggtacttgtggttcttgcctgtaatctcagcactttggaaggccaagtctgga

SEQ ID NO: 39943 - DNA, 1780 bp, Homo sapiens
ccactgggcttcctcgtgtccttagtgcccgggtccccaggggaaggcttggccagagagctgcttggaagcaacagttattacgtagacaattgacagaaatctgtgtggttgtgcggccacactcctttgtcaatcctgcccagatatcctgctttcctcataacagccagcatttttctgagtgctcactatgtgccaggcactttactgtattaactcatttaatcctacaacaaccttatgaggtaggtgctgctgttaatcacattttacagatgagaaaactgaggcacagagaggttcagccccttgccccaaatcacccagctagtaatgagcagaggtgggattcatatctaggattctagcctgactcaagagccaaaaggcttttaaaagaaaacctgaaactaygtacaattccatatgacatggaaaaaattaaataaagttcttggctcaaagggtggcattgtgatgctttccttttcccttttcatcttctcatttccactcttaaaaaaattatttttctcacacagtgactgtgacaagagtaaatatgatagtggaggttcagataatgtgaaaaaccagtggaggagacaattttaggtggctttgctgtgtcctcttcacctgacagaggtgggcacccttaggtctggtttatgatcttggccaagcctcaaaaagggaagaccaaaactcctagaagcaccccgtggttatagagttgttagggaaatgcggtatgcaaagcctctgaaaggaaaggatccaagcttagggatgtgaggatctactaaaattgtaagggacacatgaataagagggagattgatctgtgacgatgagttggcaaaaaatgaaaatatgcacaaactccccaccatggaggaggcctcgtgtgcgggaaaaggcattgtttctgccctttggatgtgttgaaggatgctctagaatagggaaagtcattaaaaactaaatcacagaggagcatgtgacacagggcatagtgcaaggggagtttagagagggtatcaggcaaatcagcaaggtgtaagggcagaaggatgaagctgtggctttgagagaggacttggaggctgaggagagctcagatgtcaccaggcaagaccttagtcccaacccacatggtcgttgcctccactgtccttccaagatgctccagccagggcccatgtccatgctccctggatctcttgcctccagctacagtacctgccatgcagctggtgctcaagatacttttgttttaaaatatcagtgaataaatgaataagcacagccgttgagttttaaccattaggtcagtcaggtgtatgaaatttgaagagccacttacacgtcttgattgaattcccctttgtcttgccagtttctcccttttcctttactgcacctttcagatttctcagcgtagccttcattcatagtgtcactcacagtgggatacgtcaggctgcatccactgtgttattcggtgtgtcaccagtgccttgactaggacacagatagccttgaaagagtggttaccttcactaataagcattatgcaatgtcttcactgccttctcttggctcttttggtctccatcctgaatcctactgatgtgatctttggtgatggcgctgggtgaaggtggtgctgacagtaagatgtgcacaggctcacctctagctcagcctctacctcactctggaaccccaagctcatcccccactatacgatgggggtggcaggacttgccct

SEQ ID NO: 39944 - DNA, 1780 bp, Homo sapiens
ccactgggcttcctcgtgtccttagtgcccgggtccccaggggaaggcttggccagagagctgcttggaagcaacagttattacgtagacaattgacagaaatctgtgtggttgtgcggccacactcctttgtcaatcctgcccagatatcctgctttcctcataacagccagcatttttctgagtgctcactatgtgccaggcactttactgtattaactcatttaatcctacaacaaccttatgaggtaggtgctgctgttaatcacattttacagatgagaaaactgaggcacagagaggttcagccccttgccccaaatcacccagctagtaatgagcagaggtgggattcatatctaggattctagcctgactcaagagccaaaaggcttttaaaagaaaacctgaaactatgtacaattccatatgacatggaaaaaattaaataaagttcttggctcaaagggtggcattstgatgctttccttttcccttttcatcttctcatttccactcttaaaaaaattatttttctcacacagtgactgtgacaagagtaaatatgatagtggaggttcagataatgtgaaaaaccagtggaggagacaattttaggtggctttgctgtgtcctcttcacctgacagaggtgggcacccttaggtctggtttatgatcttggccaagcctcaaaaagggaagaccaaaactcctagaagcaccccgtggttatagagttgttagggaaatgcggtatgcaaagcctctgaaaggaaaggatccaagcttagggatgtgaggatctactaaaattgtaagggacacatgaataagagggagattgatctgtgacgatgagttggcaaaaaatgaaaatatgcacaaactccccaccatggaggaggcctcgtgtgcgggaaaaggcattgtttctgccctttggatgtgttgaaggatgctctagaatagggaaagtcattaaaaactaaatcacagaggagcatgtgacacagggcatagtgcaaggggagtttagagagggtatcaggcaaatcagcaaggtgtaagggcagaaggatgaagctgtggctttgagagaggacttggaggctgaggagagctcagatgtcaccaggcaagaccttagtcccaacccacatggtcgttgcctccactgtccttccaagatgctccagccagggcccatgtccatgctccctggatctcttgcctccagctacagtacctgccatgcagctggtgctcaagatacttttgttttaaaatatcagtgaataaatgaataagcacagccgttgagttttaaccattaggtcagtcaggtgtatgaaatttgaagagccacttacacgtcttgattgaattcccctttgtcttgccagtttctcccttttcctttactgcacctttcagatttctcagcgtagccttcattcatagtgtcactcacagtgggatacgtcaggctgcatccactgtgttattcggtgtgtcaccagtgccttgactaggacacagatagccttgaaagagtggttaccttcactaataagcattatgcaatgtcttcactgccttctcttggctcttttggtctccatcctgaatcctactgatgtgatctttggtgatggcgctgggtgaaggtggtgctgacagtaagatgtgcacaggctcacctctagctcagcctctacctcactctggaaccccaagctcatcccccactatacgatgggggtggcaggacttgccct

SEQ ID NO: 39945 - DNA, 1780 bp, Homo sapiens
ccactgggcttcctcgtgtccttagtgcccgggtccccaggggaaggcttggccagagagctgcttggaagcaacagttattacgtagacaattgacagaaatctgtgtggttgtgcggccacactcctttgtcaatcctgcccagatatcctgctttcctcataacagccagcatttttctgagtgctcactatgtgccaggcactttactgtattaactcatttaatcctacaacaaccttatgaggtaggtgctgctgttaatcacattttacagatgagaaaactgaggcacagagaggttcagccccttgccccaaatcacccagctagtaatgagcagaggtgggattcatatctaggattctagcctgactcaagagccaaaaggcttttaaaagaaaacctgaaactatgtacaattccatatgacatggaaaaaattaaataaagttcttggctcaaagggtggcattgtgatgctttccttttcccttttcatcttctcatttccactyttaaaaaaattatttttctcacacagtgactgtgacaagagtaaatatgatagtggaggttcagataatgtgaaaaaccagtggaggagacaattttaggtggctttgctgtgtcctcttcacctgacagaggtgggcacccttaggtctggtttatgatcttggccaagcctcaaaaagggaagaccaaaactcctagaagcaccccgtggttatagagttgttagggaaatgcggtatgcaaagcctctgaaaggaaaggatccaagcttagggatgtgaggatctactaaaattgtaagggacacatgaataagagggagattgatctgtgacgatgagttggcaaaaaatgaaaatatgcacaaactccccaccatggaggaggcctcgtgtgcgggaaaaggcattgtttctgccctttggatgtgttgaaggatgctctagaatagggaaagtcattaaaaactaaatcacagaggagcatgtgacacagggcatagtgcaaggggagtttagagagggtatcaggcaaatcagcaaggtgtaagggcagaaggatgaagctgtggctttgagagaggacttggaggctgaggagagctcagatgtcaccaggcaagaccttagtcccaacccacatggtcgttgcctccactgtccttccaagatgctccagccagggcccatgtccatgctccctggatctcttgcctccagctacagtacctgccatgcagctggtgctcaagatacttttgttttaaaatatcagtgaataaatgaataagcacagccgttgagttttaaccattaggtcagtcaggtgtatgaaatttgaagagccacttacacgtcttgattgaattcccctttgtcttgccagtttctcccttttcctttactgcacctttcagatttctcagcgtagccttcattcatagtgtcactcacagtgggatacgtcaggctgcatccactgtgttattcggtgtgtcaccagtgccttgactaggacacagatagccttgaaagagtggttaccttcactaataagcattatgcaatgtcttcactgccttctcttggctcttttggtctccatcctgaatcctactgatgtgatctttggtgatggcgctgggtgaaggtggtgctgacagtaagatgtgcacaggctcacctctagctcagcctctacctcactctggaaccccaagctcatcccccactatacgatgggggtggcaggacttgccct

SEQ ID NO: 39946 - DNA, 1780 bp, Homo sapiens
ccactgggcttcctcgtgtccttagtgcccgggtccccaggggaaggcttggccagagagctgcttggaagcaacagttattacgtagacaattgacagaaatctgtgtggttgtgcggccacactcctttgtcaatcctgcccagatatcctgctttcctcataacagccagcatttttctgagtgctcactatgtgccaggcactttactgtattaactcatttaatcctacaacaaccttatgaggtaggtgctgctgttaatcacattttacagatgagaaaactgaggcacagagaggttcagccccttgccccaaatcacccagctagtaatgagcagaggtgggattcatatctaggattctagcctgactcaagagccaaaaggcttttaaaagaaaacctgaaactatgtacaattccatatgacatggaaaaaattaaataaagttcttggctcaaagggtggcattgtgatgctttccttttcccttttcatcttctcatttccactcttaaaaaaattatttttctcacacagtgactgtgacaagagtaaatatgatagtggaggttcagataatgtgaaaaaccagtggaggagacaattttaggtggctttgctgtgtcctcttcacctgacagaggtgggcacccttaggtctggtttatgatcttggccaagcctcaaaaagggaagaccaaaactcctagwagcaccccgtggttatagagttgttagggaaatgcggtatgcaaagcctctgaaaggaaaggatccaagcttagggatgtgaggatctactaaaattgtaagggacacatgaataagagggagattgatctgtgacgatgagttggcaaaaaatgaaaatatgcacaaactccccaccatggaggaggcctcgtgtgcgggaaaaggcattgtttctgccctttggatgtgttgaaggatgctctagaatagggaaagtcattaaaaactaaatcacagaggagcatgtgacacagggcatagtgcaaggggagtttagagagggtatcaggcaaatcagcaaggtgtaagggcagaaggatgaagctgtggctttgagagaggacttggaggctgaggagagctcagatgtcaccaggcaagaccttagtcccaacccacatggtcgttgcctccactgtccttccaagatgctccagccagggcccatgtccatgctccctggatctcttgcctccagctacagtacctgccatgcagctggtgctcaagatacttttgttttaaaatatcagtgaataaatgaataagcacagccgttgagttttaaccattaggtcagtcaggtgtatgaaatttgaagagccacttacacgtcttgattgaattcccctttgtcttgccagtttctcccttttcctttactgcacctttcagatttctcagcgtagccttcattcatagtgtcactcacagtgggatacgtcaggctgcatccactgtgttattcggtgtgtcaccagtgccttgactaggacacagatagccttgaaagagtggttaccttcactaataagcattatgcaatgtcttcactgccttctcttggctcttttggtctccatcctgaatcctactgatgtgatctttggtgatggcgctgggtgaaggtggtgctgacagtaagatgtgcacaggctcacctctagctcagcctctacctcactctggaaccccaagctcatcccccactatacgatgggggtggcaggacttgccct

SEQ ID NO: 39947 - DNA, 1780 bp, Homo sapiens
ccactgggcttcctcgtgtccttagtgcccgggtccccaggggaaggcttggccagagagctgcttggaagcaacagttattacgtagacaattgacagaaatctgtgtggttgtgcggccacactcctttgtcaatcctgcccagatatcctgctttcctcataacagccagcatttttctgagtgctcactatgtgccaggcactttactgtattaactcatttaatcctacaacaaccttatgaggtaggtgctgctgttaatcacattttacagatgagaaaactgaggcacagagaggttcagccccttgccccaaatcacccagctagtaatgagcagaggtgggattcatatctaggattctagcctgactcaagagccaaaaggcttttaaaagaaaacctgaaactatgtacaattccatatgacatggaaaaaattaaataaagttcttggctcaaagggtggcattgtgatgctttccttttcccttttcatcttctcatttccactcttaaaaaaattatttttctcacacagtgactgtgacaagagtaaatatgatagtggaggttcagataatgtgaaaaaccagtggaggagacaattttaggtggctttgctgtgtcctcttcacctgacagaggtgggcacccttaggtctggtttatgatcttggccaagcctcaaaaagggaagaccaaaactcctagaagcaccccgtggttwtagagttgttagggaaatgcggtatgcaaagcctctgaaaggaaaggatccaagcttagggatgtgaggatctactaaaattgtaagggacacatgaataagagggagattgatctgtgacgatgagttggcaaaaaatgaaaatatgcacaaactccccaccatggaggaggcctcgtgtgcgggaaaaggcattgtttctgccctttggatgtgttgaaggatgctctagaatagggaaagtcattaaaaactaaatcacagaggagcatgtgacacagggcatagtgcaaggggagtttagagagggtatcaggcaaatcagcaaggtgtaagggcagaaggatgaagctgtggctttgagagaggacttggaggctgaggagagctcagatgtcaccaggcaagaccttagtcccaacccacatggtcgttgcctccactgtccttccaagatgctccagccagggcccatgtccatgctccctggatctcttgcctccagctacagtacctgccatgcagctggtgctcaagatacttttgttttaaaatatcagtgaataaatgaataagcacagccgttgagttttaaccattaggtcagtcaggtgtatgaaatttgaagagccacttacacgtcttgattgaattcccctttgtcttgccagtttctcccttttcctttactgcacctttcagatttctcagcgtagccttcattcatagtgtcactcacagtgggatacgtcaggctgcatccactgtgttattcggtgtgtcaccagtgccttgactaggacacagatagccttgaaagagtggttaccttcactaataagcattatgcaatgtcttcactgccttctcttggctcttttggtctccatcctgaatcctactgatgtgatctttggtgatggcgctgggtgaaggtggtgctgacagtaagatgtgcacaggctcacctctagctcagcctctacctcactctggaaccccaagctcatcccccactatacgatgggggtggcaggacttgccct

SEQ ID NO: 39948 - DNA, 766 bp, Homo sapiens
cacgaagccttggagggggaaggttccaaggaacagggcctggccaggcttcagtggctgagctgatggtcagcgcacctctctagcagggaccggcatggctggctctttgtgtggctaatgagggggccacacctggcccccatccggtctcacccaggttgcacctccctccgctattcaaaaagagactctcctgagtgtctggtagctctgacaccagagactccatctccatccctgagactacctggtcctggcccctggagtcaatttcaaaccaaaaccaggtttcaaaggagacaagtgaatcttgcttcgcagaagcctcaccctagacagtgcctctctgcccatgggcaccctagaagttagcaccctagacagtgcctctgtgcccatgggcaccctagaagttagcgcctcctcctgtctgtggctgctgggaccccgcgcccacccactccaggccactgtccaagaacatgcagcacagaaagaggaacggggatgcccagaaggtggttgggaaccaacaatgcaggtccccgaagcaggggtgtccagggtgcacgcgggctgyagaggctggccacgccctcctcaagcccttccccgacccctgccctgcgggaagtgggtgaggtgtcagggcgaaggtggacggagcgtccacgggcaggacaagccgaggctggcttccccgtgggacttgagaagtgagggaggctgagggctgtctcctgagatcgaggtctggggtccg

SEQ ID NO: 39949 - DNA, 884 bp, Homo sapiens
aaagcaaccacctggagggaggcgggcctagtgcaggcgccagatcccagctgcagagagaggcaggacggaacgagagcagggctgtaacctgcttcccaggccaccagggttctcagctgcccatgcctgtggggctccaggaagaacggcacctgccacattcacagacaggaccccaaaggggctgagctctggagacccggagactcagctccgggagtctcaaagggcctttgtctccagcctgccttttcacttgacccgcaagtcgccagtgccatggggagcggggaaccctgctcccacagacaaagtcaggggatgtttttctttcctccggtcaagggacctggctgttagtagcctctgccgacagccctgagaggggacgggggtgaccgactcctcagcgcccacggaccctgtcccagaagcaggcgcgcctgccgggcactgccccgccctgctccctccagcctagcaggcagcgccctggcgcaaactttaaaaacaggaaacaaagggagcgcgccggggagcgccctggccccgcccgccctgcccaggctcgcccggcgcccacctggcctctggtcaccggcgctcacggggtagccggcctggcccaggtgacatgggtagcagcccctccagaggtagcggtagtgcgtgcccgcgacgcgcgccaggccccccaggagcccaaggcaccagagcgcggccagcccgcggtcccgggacgcccccatggcctggtaggccggcgggcgggagggggcgaggaccaaccgcgctgcgccctaagccggcggccgggcgacggggcaggcggctcgggytggttctgggttcccggcgggcgcgcaatcccagccccggga

SEQ ID NO: 39950 - DNA, 884 bp, Homo sapiens
aaagcaaccacctggagggaggcgggcctagtgcaggcgccagatcccagctgcagagagaggcaggacggaacgagagcagggctgtaacctgcttcccaggccaccagggttctcagctgcccatgcctgtggggctccaggaagaacggcacctgccacattcacagacaggaccccaaaggggctgagctctggagacccggagactcagctccgggagtctcaaagggcctttgtctccagcctgccttttcacttgacccgcaagtcgccagtgccatggggagcggggaaccctgctcccacagacaaagtcaggggatgtttttctttcctccggtcaagggacctggctgttagtagcctctgccgacagccctgagaggggacgggggtgaccgactcctcagcgcccacggaccctgtcccagaagcaggcgcgcctgccgggcactgccccgccctgctccctccagcctagcaggcagcgccctggcgcaaactttaaaaacaggaaacaaagggagcgcgccggggagcgccctggccccgcccgccctgcccaggctcgcccggcgcccacctggcctctggtcaccggcgctcacggggtagccggcctggcccaggtgacatgggtagcagcccctccagaggtagcggtagtgcgtgcccgcgacgcgcgccaggccccccaggagcccaaggcaccagagcgcggccagcccgcggtcccgggacgcccccatggcctggtaggccggcgggcgggagggggcgaggaccaaccgcgctgcgccctaagccggcggccgggcgacggggcaggcggctcgggttggttctgggttccsggcgggcgcgcaatcccagccccggga

SEQ ID NO: 39951 - DNA, 807 bp, Homo sapiens
ggccttggtttttacccaagcacacactgggtgcactgagggctaaggcccagtgtgtctatgacacattcatggcaggtcctgcacacttcaccccctcatcactccaggaatctctgggagcctctgcaccccagaggccctggctgcagtagacatgttgacgagtcaaattgcagcctgtggctgagctgtggagactccgggtgcaaattcctggggaattcctgcaggcgatcctgcacgccaggcctctctggcgtttatgggacgggttctgcctcctcagcagctgggccccgtggctgggcctgtcccacagcayggcagtgcctgtgagacccttgggaagaagggtccagggtggcgggcagcagcctgggggagcccgaggctggtttctgggctcctggcaggtctcagccacctaagtgaggaaagaggggaggggtttcctatgccgaggtcctaccatgaacctgtcatagaaacacaggcctgtcctgcctgcaccaggtcccggaggacaggtcggtggagggccgtctccttcaaggtccctgcagcgtcccaggcccccctgcccctggctggacaaccccggcctgcagggtgacgctctgggtcgcaggtgctcatagggaccgagggcccacggtgtgatggccaaggagctaggccaggctggccgtgtccccggcaaacgggacctgtggtcagagcctgcagggctgcgcggtgctggctggcaggtggcttgtcctgggagagcctggggggggcatgtccatgctgggggtgcaggag

SEQ ID NO: 39952 - DNA, 807 bp, Homo sapiens
ggccttggtttttacccaagcacacactgggtgcactgagggctaaggcccagtgtgtctatgacacattcatggcaggtcctgcacacttcaccccctcatcactccaggaatctctgggagcctctgcaccccagaggccctggctgcagtagacatgttgacgagtcaaattgcagcctgtggctgagctgtggagactccgggtgcaaattcctggggaattcctgcaggcgatcctgcacgccaggcctctctggcgtttatgggacgggttctgcctcctcagcagctgggccccgtggctgggcctgtcccacagcatggcagtgcctgtgagacccttgggaagaagggtccagggtggcgggcagcagcctgggggagcccgaggctggtttctgggctcctggcaggtctcagccacctaagtgaggaaagaggggaggggtttcctatgccgaggtcctaccatgaacctgtcatagaaacacaggcctgtcctgcctgcaccaggtcccggaggacaggtcggtggagggccgtctccttcaaggtcsctgcagcgtcccaggcccccctgcccctggctggacaaccccggcctgcagggtgacgctctgggtcgcaggtgctcatagggaccgagggcccacggtgtgatggccaaggagctaggccaggctggccgtgtccccggcaaacgggacctgtggtcagagcctgcagggctgcgcggtgctggctggcaggtggcttgtcctgggagagcctggggggggcatgtccatgctgggggtgcaggag

SEQ ID NO: 39953 - DNA, 807 bp, Homo sapiens
ggccttggtttttacccaagcacacactgggtgcactgagggctaaggcccagtgtgtctatgacacattcatggcaggtcctgcacacttcaccccctcatcactccaggaatctctgggagcctctgcaccccagaggccctggctgcagtagacatgttgacgagtcaaattgcagcctgtggctgagctgtggagactccgggtgcaaattcctggggaattcctgcaggcgatcctgcacgccaggcctctctggcgtttatgggacgggttctgcctcctcagcagctgggccccgtggctgggcctgtcccacagcatggcagtgcctgtgagacccttgggaagaagggtccagggtggcgggcagcagcctgggggagcccgaggctggtttctgggctcctggcaggtctcagccacctaagtgaggaaagaggggaggggtttcctatgccgaggtcctaccatgaacctgtcatagaaacacaggcctgtcctgcctgcaccaggtcccggaggacaggtcggtggagggccgtctccttcaaggtccctgcagcgtcccaggcccccctgcccctggctggacaaccccggcctgcagggtgacgctctgggtcgcaggtgctcmtagggaccgagggcccacggtgtgatggccaaggagctaggccaggctggccgtgtccccggcaaacgggacctgtggtcagagcctgcagggctgcgcggtgctggctggcaggtggcttgtcctgggagagcctggggggggcatgtccatgctgggggtgcaggag

SEQ ID NO: 39954 - DNA, 1288 bp, Homo sapiens
ttattggttcaaggggtttctcccaaatatttgcatttcaacagccttgttgatactgggtgctgaaaatacaaagattaagcctccttctcttaagctcgttagagtggaaaaacagacatttcaatgaatgagtgagacacaaggggttatggtaagatgtatgtgcaaagggttctgctaggtttttttttgcccacggagagaagtggatgagtataggccctgaaggagatgttcaaatgggtatttgagggatgagtaagagatgtataccaggctgaggggtcactggcagggaaggcagcataattgatgcctggaaacaatgatggtcattctgctctggctaaagtaggcagaggccaggggattggcctagtaggacatcataagacatttgggctgtttcctgtggaaagctggcgccaagagatttgaaattgtttgaagcaggggagaggcctaatctgatttgtgtgttggaaaggtatttctggtaacagtgcggaggctggatgagtcacttggagaaaagaagaccacattccagagggttccatgatgtggacactttcagcaggtggtgagggtgagtttgggtcaaagaggcctcttcccaggattccaagaaagactagctctggccttggggaaaggaagacagctgtaaggaaatgcaggacgtggtgtctgatccttggagaggttagagggggcagtttcactccaccacgccagccctttggtcctcggagtctcccattggcacccaaggctgggggtgacaggtggttgggggggtaccgccttcacagctgccttaaagaaacctgttattcatgatctcagtaaatcctgggactggccggtggggggcgttggcctttcctgtgtttgcttcataggggccgtcaagctttgcatgactcttccacttcccgaggtggggaataccgcaggaaacaggcgctggggtgatttggggccaggagggggtgtttagcccggagagaaagctgatcccaggctttggggaatcttccaggggttgagagccagctggggcggggcatgactactgaacatctcttgggccaaataactggttttaaaatgcagttaaagagacaggggcatgtcctggttaaggacagggactttgcagccagactgggarttcaaatcctggccctgctgcttccttgctgtgtgccttagggaagccactttatttctctgtgccttggtcttctcatctgtaacatgggggcaatcaggataccca

SEQ ID NO: 39955 - DNA, 607 bp, Homo sapiens
actattgttttgactgttaattgtggtcctcttcaattaggacaaacgagattaattttatcttcacaaattgatgtggatggcctgccactgcaggctcatcttccacatcatctcattccttcttaaaatgagttatccattgttaaactgctgatttatttgaagcattgcccccataatttttttgtaaagtatcaataatttcacgttttgatccaagattcgccataaatttggtattagttcgtgcttcaatttcagcagattcatgtggttcttttcaaactgatgtcttatcattctcagtgcctcagactagatcctgttcaggtatgttagagcaagttaatatgagtttcttttagtgaaaaacaattttgaaccatgcatagctttttacataatatgcattttccacgaactttttgaagacccctcatagaaacaattacactatttcaaataattatactcrtgcattttttagatttttatagtttcatcttgatcccaattctccttccacctaatttaattgctcaataaatgcaccctcaattaataaacagatacccaacaatttaattgtatttaaccttgtatg

SEQ ID NO: 39956 - DNA, 607 bp, Homo sapiens
actattgttttgactgttaattgtggtcctcttcaattaggacaaacgagattaattttatcttcacaaattgatgtggatggcctgccactgcaggctcatcttccacatcatctcattccttcttaaaatgagttatccattgttaaactgctgatttatttgaagcattgcccccataatttttttgtaaagtatcaataatttcacgttttgatccaagattcgccataaatttggtattagttcgtgcttcaatttcagcagattcatgtggttcttttcaaactgatgtcttatcattctcagtgcctcagactagatcctgttcaggtatgttagagcaagttaatatgagtttcttttagtgaaaaacaattttgaaccatgcatagctttttacataatatgcattttccacgaactttttgaagacccctcatagaaacaattacactatttcaaataattatactcgtgcattttttagatttttatagtttcatmttgatcccaattctccttccacctaatttaattgctcaataaatgcaccctcaattaataaacagatacccaacaatttaattgtatttaaccttgtatg

SEQ ID NO: 39957 - DNA, 601 bp, Homo sapiens
ggaggttgagtcccagtcccaaagacctcctaaccagggagcatggactacttggtggtgagtggcagattgtagagttggagttgcctgtgtcttaacacatgaaatcagaattggtcttaaaaatccagttgaggccgggcgcggtggctcacgcctgtaatcccagcactttgggaggccgaggcgggcggatcacgaggtcaggagatcgagaccatcctggctaacacggtgaaaccccgtctctactaaaaatacaaaaaattagccgggcgtggtagcgggcgcctgtagtcccagctactcgggaggctgaggcaggagaatgrcgtgaacccgggaggcggagcttgcagtgagccgagatcgcgccactgcactccagcctgggcgacagagtgagactccgtctcaaaaaaaaaaaaaaaaaaaaaaaatccagttgagcaaatatgagacttccagtgtgagggtgaaaagatccaactatgttcttgcagtgtgagaatgctgaggacttataaaacatgagagcctgactactgaaagtcacactggattattttctttctgtttcccataaagtgggcaagctctt

SEQ ID NO: 39958 - DNA, 601 bp, Homo sapiens
ggaggttgagtcccagtcccaaagacctcctaaccagggagcatggactacttggtggtgagtggcagattgtagagttggagttgcctgtgtcttaacacatgaaatcagaattggtcttaaaaatccagttgaggccgggcgcggtggctcacgcctgtaatcccagcactttgggaggccgaggcgggcggatcacgaggtcaggagatcgagaccatcctggctaacacggtgaaaccccgtctctactaaaaatacaaaaaattagccgggcgtggtagcgggcgcctgtagtcccagctactcgggaggctgaggcaggagaatgacrtgaacccgggaggcggagcttgcagtgagccgagatcgcgccactgcactccagcctgggcgacagagtgagactccgtctcaaaaaaaaaaaaaaaaaaaaaaaatccagttgagcaaatatgagacttccagtgtgagggtgaaaagatccaactatgttcttgcagtgtgagaatgctgaggacttataaaacatgagagcctgactactgaaagtcacactggattattttctttctgtttcccataaagtgggcaagctctt

SEQ ID NO: 39959 - DNA, 601 bp, Homo sapiens
ggaggttgagtcccagtcccaaagacctcctaaccagggagcatggactacttggtggtgagtggcagattgtagagttggagttgcctgtgtcttaacacatgaaatcagaattggtcttaaaaatccagttgaggccgggcgcggtggctcacgcctgtaatcccagcactttgggaggccgaggcgggcggatcacgaggtcaggagatcgagaccatcctggctaacacggtgaaaccccgtctctactaaaaatacaaaaaattagccgggcgtggtagcgggcgcctgtagtcccagctactcgggaggctgaggcaggagaatgacgtgaacccgggaggcggagcttgcagtgagccgagatcgcrccactgcactccagcctgggcgacagagtgagactccgtctcaaaaaaaaaaaaaaaaaaaaaaaatccagttgagcaaatatgagacttccagtgtgagggtgaaaagatccaactatgttcttgcagtgtgagaatgctgaggacttataaaacatgagagcctgactactgaaagtcacactggattattttctttctgtttcccataaagtgggcaagctctt

SEQ ID NO: 39960 - DNA, 1109 bp, Homo sapiens
taattccagacatggattattttaataccatacatatgacatttagtaaaattataatagatttttcctcaagtccatgccacttttcaggagaactaaagacaaaatgtgaaagtgtcgcggtgtcactcagcaatactcacaagatccacttctcccccacaaacagatctttataaaacacaaatttgtacaaatttataaaatttacatcttggtatctgagcctagtaagatctgctttcctatggctcaacccaaacttcctcaggaccaaaatgggacattgtaagtgcagtgtccacatactctgacattaaattgccaaactactatcaccatgacaatctttctagacacgagtttgacttaatgaaataaaaatgtgtttataggtttccagatgtatgttagttaaagttcataaaagagtgaaacacttatgtaacagtcacactaactaaaggctttggtgatataatttcatgttttataatgtacccaaaattacactttttaagcttaattctttttaatcattttgtttgtttgtttgtttagacacagggtctcactctgtcacccaggcagragtgcagtgacaaaatcatagctcactacagccatgtatactggcctcaaggaatcccccgccttggcctcccaaagcactaggattacaggcgtgaaccactgagcctggcctctttttgattctgtagctccaatgtccttaatttgtaaataatatttatggacatcagtgagatttgtaaatacaaccacaaataaaacctttcttttatttggtaagatccaaagtatcatgtttttggtaataacttatatagtttgacattaataagagacagttgaaggaatacagaaaataatcagaaagcttgttctgtgcccttttaactcaaagtgatccagtttatttcaacaggatagcagggctgttgattttttcatacgctccatattatgccgcaatgccattagaagaaatagttatccgtgaatatcttatgtgttgataagcactctctacaacaacagtgaaaaattcacattgtcaacactagaactggttatgatgcaagaat

SEQ ID NO: 39961 - DNA, 645 bp, Homo sapiens
caggtgtggtagagtgcacctgtggtcctagcagtgggaggattgcttgagccagggaggtcgaggctgcagtgagctgtgattgtgcccctgcactccagcctgggtgacagagtaagagcctgtctcaaatataaatacataaataccatcagtaagttgaacagacataattgcagacataagaaagcataattttattttgttttcctaccacctttaaaaaaatatctgatttagtaatctttctcagacactgaacaaatcttctgagagagttcccatgccatatctgcctatatgtagtcaagagacagacttagggtcactttatactgcaaaataattttaattctgtgattagaatctacatgtaaagatgcgcttccaaactccagaattaaccragcattaggtcttcctgttttccacagctcatggcaggaagcctgcagtggggacggagaatacagttctttcactccctacgctttgctccatgtggctgcttggttttgtcctttcttagctggaaagttgaatgctggggtccccagagaggccgtggcaggactgaagctgactctaactcaatgcagggcctcttcagagctctcctgctgggctcctctctcctgggattcc

SEQ ID NO: 39962 - DNA, 531 bp, Homo sapiens
attttcaataattctgggaaaagaaatcactttatttagagcaaagtagcaataatacaaataatgtaatgattctcgacagtagttctgtatttagaagcctrttttgcagatatgccctttcatttttcttggtacagacagatctttgagcttccctgtagcaaatttcgtagcagacttagagaagagatgttgtagagatagattatgttattgataatcagcagaagtgacttttattatattggccaagagttctatagatctagaatatgtaatattttttactacattgcaaagaggagacactcaataaatatttttggtagaccaagtcatttcttctaggcatatatctatcaaggtccatctaataaataactaactgtatgtggccacggcagctacaccctccgagttagtttaattcattcaagactattttttaaattaaaaatgcatcaaagggtcgggtgcagtggctcatgcctgtaatcccaacactttgggaggctgaggcaggtggat

SEQ ID NO: 39963 - DNA, 767 bp, Homo sapiens
gtttctatttctccacatcctctccagcatctgttgtttcctgactttttgatgatcaccgttctaactggcatgagatggtatctcattgtggttttgattcttatttctctaatgaccagtgatgatgagctttttgtcttttcatatgtttgctggccacataaatgtcttcttttgagaagtgtctgttcatatcctttgcccacttttggatacagttgtttgtttttttcttgtaaatttgtttaagttcctcatagattctggatattagccctttgtcagatgggtagattgcaaaaattttctcctattctgtaggttgcctgttcactctgatgatagtttcttttgctgtgcagargctcttcagttttattagatttcatttctcaattttggcttttgttgcaattgcttttggtgttttagtcatgaagtctttgcccatgcctgtgtcctgaatggcgtcacgtaggttttcttcaggtttagaagctgatgaaattacaggaactggtgccaaaagcaaggactgtagcagagtcccactgctggactcaaggaagccttttatctttccctgttgtccacagagtatgggttgtcatgtgaggcaggtcctagaggggtgtacagcagctcccaagttctgaaaatcctcagcctatggaactctcatgagaagtgccaccacactcagaatttcttcctggagactttttgggaataactcaaagaatgtcacatagatataaggaaat

SEQ ID NO: 39964 - DNA, 864 bp, Homo sapiens
cacacacacacacacacacacacacasaagaatttgccggccgggcgtggtgtctcatgcctgtaatcccagcactttgggaggccaaggagggtggatcaccaagagatccagaccatcctggccaacatggtgaaacctcatttctactaaaaatacaaaaattagccgcatgtggtggcctgtgccttgtagtcctagctactcaatgggctgaggtaggagaatcacttgaacctgggaggcggaggttgcagtgaacagagatagcgccactgcactctaatctgggcaacagagtgagactccatctggaaaaaaaaaaaaaaaaagaatttgcctttacatagcataagatccagaaacacataagaggcagtactttcacaaaactttaaaaatgtctgaatatacatgagggcaagagcctttctttacatcacatagcttcatgttgaatttgaacaccttagtatcatgtatctagtgtgaactcggtttattcaaataaaaggaattttttatttggttttgtgagacagcataatataatttacttggcttcaaggacataaatattccatcacagattaagaagaaaaatgagaagagatgctgaaatgtaagtcccacttcatcttgtttctggctaacctatttccccaatatgaaaggacccatttctcttgtcactactggtaaaataaaaaacataagagagttgcatttttgcacatcaaaaagataaagatgaagaaaaactaatagaatgaaatgaaaattgtcaatttttgtgtctttgtattaattatcactaagactgaataactggcagtaagccctagatgacagagaaataggtca

SEQ ID NO: 39965 - DNA, 1562 bp, Homo sapiens
gcctgccttccgtgttatctgacttatcttccaatcaaattctgatatgaccagaagggagcagacctaaacccttgttctatctttttattcccttgtctcatgactttagtgttgaaggatttcttaacctcagggtcaaactaatagcctgaacttccccatatggaaacttcaaacacatacaaaagtagaacattctagcttctgaaatcctaactcttagcagcaaaacctggcttacaagcttctatgtgaacatcatgtggtttttattccctatgggggaaaatgtcagattctgttcaaaccagagccttttgaacagaatctgtagcacttttttccatcagggagaaccagaatgtctctaacccataaatctgggtttagaagccacaatcaaaggaaaacaagggtgagagaaaagaccctctgtaaatactgggaaacctagagctagtgtcttgaagtcccttgggattaacagtctgaaggctcttctgtaattcccaccttgttgctgtgctacagccctcaccagacaagcccacgactgggccagtggcaggactccatagctcaatagctagcaatcggctacaaaggcaattgaaggtattggaacttgcatccttttcaaagcacctgtaggcttctatgacttggatctaaggacaaagcagagactggctaccagccttttgagctctgactcttccatttgagaagtccagcctaggctgacaatgtgggctcctgaggggccagggagatgtgtgctatatgggatccaaaggccttgggagaacagggcctccagcatgttggggtgccatggcttgctttcatttagctgggtaggcttgagcttgaagtcttattttctcacttttcatttaacttgacagttcttgaaccaaacactaccttaaattgtaaacagattcttgatgccagcaactgctgggtgaaataatcaagtcaaacgaaacagggcttccagctctgccttcagatcagtggtgactgaggtaccttctcagcttcagttcagctggtgagagggctgcctttcctgcttggccagtcaggagtttctgtaggcatgctatttgcctcaactatggttccagcttgccctagaacttataggtattaggatggaaaaatcctctattagcttctgactataacatcccaaatgctccagctgartgctggccttctcatcttcttgcttactgtgagacctgtatctagtatcttacagatgtttccagagtttgcctgtctctaagtatgatccatttcaaataggtcacagaaacatggacttagtttatctaaaacatctttgggctatgtttttctttgagctttaggaacttatttaggcatcttaggcctgtgtaagagttagatttctgagataacatgatataggacttggatgtactccatctgtaggaaagaacacacagatctgactcttcaaaaagcttactgttggagactagactgtccaaaggtctaaaaaattgggtctcctatagtaaaaa

SEQ ID NO: 39966 - DNA, 658 bp, Homo sapiens
atcttatactactttcatttagagaaagagaaaattagataatataaatttaaagaaatacactgctataatagaacaggctgggagttttataggtctttccctgcctcttaaaatagaggtcagcaagccttgactacaaacagccggatagttactatcttaggtactgtgaacaagagacaaaattgcagatattatggaggtacttatgggaacttcaaggcttctattgatccaattctaagacataactgaatacaacttgccttataggtctaataaggaaaaatagaactagttgagatacctacttgagttcagttagtgttcctcataatatcaattgcaagtgttcatctgttgacagtttattcttcactgtgtccaaagacctaaaaatgaggtctcatttgtagtcaaatgctcatctayaagacttcatgtatttttgtaagacccttcaggcaggaaagtgctaccaaaccctaacttattagtagaccagtattataagatcatacactatcctctttaatgttagcaataaaatcatttagctaaacttgtcccttaggaggagggttcaggagcacagtaggtaagaaggcagtaaagacagagatagaacagaaacaaggggcacatgtactgtgaa

SEQ ID NO: 39967 - DNA, 324 bp, Homo sapiens
gcaagaaccagggtcagaggctgccttcttcatgcctgcagtaacttcccataagctactgctctacaccagaaggatcatagcagatagcctaattagtaaagtccgactcaaaaggaagaaagggtgggacaagagwttgaagggagtaaccaagagttttccaactaagacacaaacccagagacccaagaagttcaaacctcaaaccaagtaggttaataaaagataggccatgtcagcttggataaccaccgagataaaaatcccaggaacagccaggaagacacactatggatcatggctcatctctcaaacccacaa

SEQ ID NO: 39968 - DNA, 541 bp, Homo sapiens
tacccaatgtccaggtctgcccccagaacaccctggtatgggattcatgtttcaatatttaaaaggctccccagggatgtctgtttccagctgtattagcccattttcacactgctgataaagatatacctgagactgggcaatttacaaaagaaagaggtttaattgacttacagttccatgtggctggggaagcctcacaatcatggmagaaagcaaggaggaccaagtcatgtcttacatagatggcagcaggcaaagagagagagctcatgcggggaaactccctcttatagaaccatcagatcttgtgagacccatctactatcacaagaacagcatgggaaagacctgcccccatgatcaatcacctcccactgggtccctcccacaacatgtggggattcaagatgagatttggatggagacacagccaaaccattctgcccctggctcctcccaaatctcatgtgctcacatttcaaaaccaatcatgccttcccaaaagtcccccagagtcttaattcatttcagcattaac

SEQ ID NO: 39969 - DNA, 541 bp, Homo sapiens
tacccaatgtccaggtctgcccccagaacaccctggtatgggattcatgtttcaatatttaaaaggctccccagggatgtctgtttccagctgtattagcccattttcacactgctgataaagatatacctgagactgggcaatttacaaaagaaagaggtttaattgacttacagttccatgtggctggggaagcctcacaatcatggaagaaagcaaggaggaccaagtcatgtcttacatagatggcagcaggcaaagagagagagctcatgyggggaaactccctcttatagaaccatcagatcttgtgagacccatctactatcacaagaacagcatgggaaagacctgcccccatgatcaatcacctcccactgggtccctcccacaacatgtggggattcaagatgagatttggatggagacacagccaaaccattctgcccctggctcctcccaaatctcatgtgctcacatttcaaaaccaatcatgccttcccaaaagtcccccagagtcttaattcatttcagcattaac

SEQ ID NO: 39970 - DNA, 1019 bp, Homo sapiens
agccaacccaatcaaagtggaccatgtggttatataaaaaaaatgtaactgaagataaatctgggaaaagccttgaggagaaaagttactcagaaacaggccattttgcaaactatccacattgtgccttcaaaaatatctcttattggaaaatgatatggagggtatctgtcaatagacctgaatattgcatcatggaagacacagtgtgtaaaatgtagcaaatgcaagaacttttttggaatttattttttgggttttcccaatccacttatccataaatcatttgtaattagtatagtcaagggaataggtacactactcatgtgaacttacgtgcagtacaccaaaaagctatttgataagattaataatatagcaggagacatgcagtttagattcatttaagtagtaatgaatcccatgtaacttcaaaattgaaaatgcccttttagaaactttctggtgattgtggtctasgatattcagatctactttcttgttaaaagcaataaaaattgctggttaaaaatttcatttaaaaattaactttgaattgctgaaagaatgatgaggaaattccaggtcaatttatgggtgaaagtctgtatccagacaggtagctagaatattggcatatacaggcttcttatgcccttatgctatttgtccatgcaacacatttagatttgggttagtggctcagtggagtaagagggacaaaagtcaagacccaagtcatgttgaagttggagagctttatgggatattctccctaattaagttggcactcaaagagctacagacttagggctgaacgaggactaaactcactcttttccccttaattttaaggtgtgtagaagaaagtttatccatgctgagcacagcagtagaagagaaggatgtgagggaaaaatttaaaacagaaatccctatctctgagatagctacagactggtacagatttgtagcctggacatatataatctgggtgagcgtagatctcaagccttggt

SEQ ID NO: 39971 - DNA, 2168 bp, Homo sapiens
attagcatgagctaatttattatattttactgttcaggtcttgatcctgctgcttatttgtgtgtatgtatgtgtgtatgcttgatttatggtttcttgaggggtgagtatgaaatttccagccacacctgttgatttatctatttcttcctaaaattctgctggttggtttttgatattatttacagctgtgtgattaggtgcgtaacagattaaaatggttgtatctttttattctattgctcctttactgtatatagcatcctgctttgtccctattaaaatttttggtttttcaattttattttgtcagctattaagatgtctaccccaaatttctttcaatttatattttccaaatatcttttttattttttttaactttctatgtcctttatcttaatttatctttgggactcaacatattgtttcatttcttaaaaaatctaatctgtttctttcaacaaaagtgtttaactcattatatttaatgtaatttttaaaattgctatttggtctttcattttatatttttcatttactgcatgttttgccttctttttctctttcctattttctattgaatagaccaacttattttctcttctggtttaaaagctatgtgttctatttttgttcttatagtgataagatatgtatcattactggtccttatttgtttcttaaacttagcaatatctagatgtggtattcaaagtactatataacaattgaaaacgtcactgacactgaccaacagaaaatcagaatgatcactggttagtatgcttatgggcatgggtttggaagacatcagtgttacaggctaaatggtgtcccctcaaaattcgtatgctgaagtcctaacccctgtacctcagaatgtgactatatttggggatagggtctatacagagatttttaagttacaataaggttgttaggatgagtcctgatccaacataactagtgtctttataaaaagaaattaggatacagatgcatgtctgtgaagacgtaggaaaaagacagccaactacaagtcaatgagggaggcctcagggaaaacccaccttgccaagaccttgatctggacttacggcctccagaattgtgagaaaataaacttctgtcatttaaaccagtcagcctgtggtactttgttatggcagccctagcaaactaatacaatcagtctgtcaagatctgtgtcttctccctaaacatagaagtggtctgacaggttccgtggtcccttagtgtcctatgatccacatcctacatcatgttgatattgtctagaatcccaaaatactttctccttctctctttcagcatatatcttaagtatatttacttctaaatatacttgagtatatctgagtatatttacttctaaacagtactttccccaaaacattttcaatgtatcctttcataaaacaaaaatttgagaccttccatacctgggaatattttyattacccttcacaatcaaatggcaattttattagatgtaaagctttatgttcaatgttattttctttcagtattttaaaaggactgcttcactggcttctcacaccgtgttgctgttaaggaatctgataccaatctcattcttgtttattttagttaatcttcactttctggcaacttgtagaactttttctttgtacttgatgttcttagatattatcataatgtgtagggtgggttttccttttcttttatgtttgacaattcattagccctttcaaactgaagtcttctgtcttttttttaagtaggagtaattacctctattctttctccagattatttccttccatatatctccactttccttctgagtgttctaatactagatattggcacttctatccaccatgcctgttagctttttaaatttctctatttattttcttttttatatacattcctgctgccttctggaagaatttctcaattaactgttctactgcattaatttattttttcagttatatctgtcctcctatatatttttcttccttttaagccatattttattattccacttgttgtcattgctttgtcttacactgctagtattttcccttatcagcttaagtgtttctatcatatttattttaaattcttagtccacttctaatatttccgtttca

SEQ ID NO: 39972 - DNA, 636 bp, Homo sapiens
gaatatacgtggcccttcaactaggcttgggaatgcccagtgatggctttcactgaatccagttttctaatcctctgccatgacacaaacttaaactaatcaagcaatcaactgaccaacaacaaatagattcactcattcatcaatgtattttaattgagcactgactatgcacagcacacttggttaggcttgcactgccatggagagaaacactcgtacacacatgaagattatcatctagtagggtaagtttcaaacaaatacagaaagagattgtaatgttgaagctgaatgagttccctsaagacggtttatatatgtttatgaaaaacataataaagatattaagcatagtcaagaaatgaaggaaagatctctttctctcactacaaagcgacaactggcctcagaaataggctgagtaggagataactaggtaaagaggggaggaaagagtgttctagacagaagagtagcatgtaccaagacctatggagtcaaaaactgccataggcagtccaaggcaggcccctggggctgaattcactgcatgcaccccacctccaggtccaactcatggctccctcttttgtctcccacagtccagccatctagggcttttagtagcaggaa

SEQ ID NO: 39973 - DNA, 1253 bp, Homo sapiens
tttttgcatcagctaaactgtggaatttacacaattgaaaaaactagacttatctgacactttgctgatttaagaaaagaagacwaatatattttcaaaagcttagcccttctaccaaatgactgacaagtagttcttcaagtgcggtgcagggataggaaccctcaccaggctagtattttgcctgatgatatgaagggcacaattgctgtcttacatatttatgtctctccccgcagtgtaaccactctttccaacttattggttgtccttaaaaaaatagtcaatgtgtttaaaagcacagatattttaaacatactacactctccttttaatacaaatggaggtataatgcatcatgcatatcatcttgcacaccacattcatgttttattaatgattaaatataacacacataaaagtgtataaaacattaatttagggataatgaattattgttgcatgaaccacaatgcaatcaccatccagtttaataaatagaatattgccaacacaccttcacatacacatactcttgcaaataaaatgggaaagttcttctctatactggaaacaaaaaaagctagatttcattgcattcacttcttgattttcttccttaccacttacagatgataactaaatcctataatttagcttttcctgtttttgaattttattaaaagtattctttagtgtctaaccttttctggtgaaacattatgtatttcagattcaaatatatcatgtgtagctatagcttgtttattttctttactgtatggtattctattataaaaacaaaacaatttactcattctcttggttgatagatatttgaattgtttatagtattgacatttatgtatagtatataatacttctgtgtaccttgtattttaaaatttatacaccttggaggtgttttctatatttgtatgtgtatgtcatatatatgataaatatgtatatatgctatataatactatatacatatatagacacgatgtatatcatgtacattatgtatgtgcattgcttacacacacatttcatctctaacacaaatatatttcttttaaacgattacatggtttcgatctgtggctgtagacagtttctaacctgtcttttattgaagggcatttaagttgtggttagtcttatggtattacaagcaattctattgtacatcctactacacttgtctttgcacacacatattggagaacaaatatccagtaatagaattt

SEQ ID NO: 39974 - DNA, 1253 bp, Homo sapiens
tttttgcatcagctaaactgtggaatttacacaattgaaaaaactagacttatctgacactttgctgatttaagaaaagaagactaatatattttcaaaagcttagcccttctaccaaatgactgacaagtagttcttcaagtgcggtgcagggataggaaccctcaccaggctagtattttgcctgatgatatgaagggcacaattgctgtcttacatatttatgtctctccccgcagtgtaaccactctttccaacttattggttgtccttaaaaaaatagtcaatgtgtttaaaagcacagayattttaaacatactacactctccttttaatacaaatggaggtataatgcatcatgcatatcatcttgcacaccacattcatgttttattaatgattaaatataacacacataaaagtgtataaaacattaatttagggataatgaattattgttgcatgaaccacaatgcaatcaccatccagtttaataaatagaatattgccaacacaccttcacatacacatactcttgcaaataaaatgggaaagttcttctctatactggaaacaaaaaaagctagatttcattgcattcacttcttgattttcttccttaccacttacagatgataactaaatcctataatttagcttttcctgtttttgaattttattaaaagtattctttagtgtctaaccttttctggtgaaacattatgtatttcagattcaaatatatcatgtgtagctatagcttgtttattttctttactgtatggtattctattataaaaacaaaacaatttactcattctcttggttgatagatatttgaattgtttatagtattgacatttatgtatagtatataatacttctgtgtaccttgtattttaaaatttatacaccttggaggtgttttctatatttgtatgtgtatgtcatatatatgataaatatgtatatatgctatataatactatatacatatatagacacgatgtatatcatgtacattatgtatgtgcattgcttacacacacatttcatctctaacacaaatatatttcttttaaacgattacatggtttcgatctgtggctgtagacagtttctaacctgtcttttattgaagggcatttaagttgtggttagtcttatggtattacaagcaattctattgtacatcctactacacttgtctttgcacacacatattggagaacaaatatccagtaatagaattt

SEQ ID NO: 39975 - DNA, 1253 bp, Homo sapiens
tttttgcatcagctaaactgtggaatttacacaattgaaaaaactagacttatctgacactttgctgatttaagaaaagaagactaatatattttcaaaagcttagcccttctaccaaatgactgacaagtagttcttcaagtgcggtgcagggataggaaccctcaccaggctagtattttgcctgatgatatgaagggcacaattgctgtcttacatatttatgtctctccccgcagtgtaaccactctttccaacttattggttgtccttaaaaaaatagtcaatgtgtttaaaagcacagatattttaaacatactacactctccttttaatacaaatggaggtataatgcatcatgcatatcatcttgcacaccacattcatgttttattaatgattaaatataacacacataaaagtgtataaaacattaatttagggataatgaattattgttgcatgaaccacaatgcaatcaccatccagtttaataaatagaatattgccaacacaccttcacatacacatactcttgcaaataaaatgggaaagttcttctctatactggaaacaaaaaaagctagatttcattgcattcacttcttgattttcttccttaccacttacagatgataactaaatcctataatttagcttttcctgtttttgaattttattaaaagtattctttagtgtctaaccttttctggtgaaacattatgtatttcagattcaaatatatcatgtgtagctatagcttgtttattttctttactgtatggtattctattataaaaacaaaacaatttactcattctcttggttgatagatatttgaattgtttatagtattgacatttatgtatagtatataatacttctgtgtaccttgtattttaaaatttatacaccttggaggtgttttctatatttgtatgtgtatgtcatatatatgataaatatgtatatatgctatataatactatatacatatatagacacgatgtatatcatgtacattatgtatgtgcattgcttacacacacatttcatctctaacacaaatatatttcttttaaacgattacatggtttcgatctgtggctgtrgacagtttctaacctgtcttttattgaagggcatttaagttgtggttagtcttatggtattacaagcaattctattgtacatcctactacacttgtctttgcacacacatattggagaacaaatatccagtaatagaattt

SEQ ID NO: 39976 - DNA, 1205 bp, Homo sapiens
attgaaaacyttcagtgttgaagtatcaggcactttggtaagtgaggagtgttattttggaaaagaatttaaggacctacaatgtgtgcctcacacatgttttataagtgaccacatatttaagctcttgataagaatttttttctatttatacacaagtatgaggggcagtgtggtaagatgttcttcataaaacaaagtcttaaatgttatctgaaactatccaagaaagaaaaccttagacatcctccttgaggttatggtgtgcaccttaaagccttttatgtctccagcaacttacaaaagacaggaatttgttgttcatactcattatgaggatgatgatttcatgactttgtaaatccacaactttgtatgcagatagcaatctccttgaaagactgattgctaatgttcaaattgccttttttgtgcaaagctgacaaattttagaccaaattgctgttggctatgttttcagaaaggtagatcttaataatgacatttaatttttctttttgaacaaatgaatgagtttcaagaatgtttctacaaagacagagtcctatctaaattccacatgaaagcaaaccctaatttaaaaaataataccctaatgatgtctaattacttccttgagaataagcagcaacctaattagtcacctttatcttcatatgcacctggaattgctattgtgaataaagcatacaaagcacagtccatttttaaaacaatactctgcagtataggaaactgaaaaggtttgggttaggaaggcaaggtaatttatgacaaatcattagtttctaatggcatttgatccagtttttgagggaattgataaaataattaacagagtttggaaaactttccattgcaaataacatagaattatggtcatgagccacttagcgacattttggtcaatgatggactgcatatacaataatggtcttataagattataatatcgtatttttactgtatcttctctatgtttagatacacaaataccactgtgttagacttacctacagtattcaatacagtaacatgtacaggtttatagccaggagcaataggttatattatatagcctaggagtgttgtaggctacaccatctaggtttgttaagtacacgctattatgttcacacgatgacgaaatcacctaaggaagcatatatcagaacatattccca

SEQ ID NO: 39977 - DNA, 1205 bp, Homo sapiens
attgaaaactttcagtgttgaagtatcaggcactttggtaagtgaggagtgttattttggaaaagaatttaaggacctacaatgtgtgcctcacacatgttttataagtgaccacatatttaagctcttgataagaatttttttctatttatacacaagtatgaggggcagtgtggtaagatgttcttcataaaacaaagtcttaaatgttatctgaaactatccaagaaagaaaaccttagacatcctccttgaggttatggtgtgcaccttaaagccttttatgtctccagcaacttacaaaagacaggaatttgttgttcatactcattatgaggatgatgatttcatgactttgtaaatccacaactttgtatgcagatagcaatctccttgaaagactgattgctaatgttcaaattgccttttttgtgcaaagctgacaaattttagaccaaattgctgttggctatgttttcagaaaggtagatcttaataatgacatttaatttttctttttgaacaaatgaatgagtttcaagaatgtttctacaaagacagagtcctatctaaattccacatgaaagcaaaccctaatttaaaaaataataccctaatgatgtctaattacttccttgagaataagcagcaacctaattagtcacctttatcttcatatgcacctggaattgctattgtgaataaagcatacaaagcacagtccatttttaaaacaatactctgcagtataggaaactgaaaaggtttgggttaggaaggcaaggtaatttatgacaaatcattagtttctaatggcatttgatccagtttttgagggaattgataaaataattaacagagtttggaaaactttccattgcaaataacatagaattatggtcatgagccacttagcgacattttggtcaatgatggactgcatatacaataatggtcttataagattataatatcgtatttttactgtatcttctctatgtttagatacacaaataccactgtgttagacttacctacagtattcaatacagtaacatgtacaggtttatagccaggagcaataggttatattatatagcctaggagtgttgtaggctacaccatctaggtttgttaagtacacgctattatgttcacacgatgacgaaatcacctaasgaagcatatatcagaacatattccca

SEQ ID NO: 39978 - DNA, 727 bp, Homo sapiens
tggagcagattagaaacagaacaggtagcaytgggggcagtccattagtgctctctttaaaaccaaggtggcaaactcttgttttgaaactaacatagaacaagcaatttgagagaagggaaattggtgtagcccaatgttgttatttttttcttattaacagtctcaaagtccctagtgaaggaggggaacatccaaacagttagcagccagggacattcttaggaaggacagcggaagccacagcactgcttctgctgtggggtctacatgcctaaaactgagcaaagaattcgacttggtgggctggactctgcctcaaaagtgaatgaaaacaaaacaagacttcaagttagcatttgtggaaaggggaaaaaaaccattgtctgcctttctgtctcacgaacacagaaacaaaacactaatgaaggctcccaatctggcagaaatctaaggaattagaggaaaaggaacaaaaataaacaaaaggacaccagacttcaagtttctcaagccagatgtgaccctggaaactggtgtgatgaggaagaaaaacagctgttgactcagtcatgtgatgattcaatgatacaattatttcatcatcaaaagaggctttgataacttcgccattagcagtaagagtaaaaatagaaaaagaggaaggaggagctcgatttcagcactaatctgattcattcgctttaaaagacctaggcttagaggc

SEQ ID NO: 39979 - DNA, 727 bp, Homo sapiens
tggagcagattagaaacagaacaggtagcactgggggcagtccattagtgctctctttaaaaccaaggtggcaaactcttgttttgaaactaacatagaacaagcaatttgagagaagggaaattggtgtagcccaatgttgttatttttttcttattaacagtctcaaagtccctagtgaaggaggggaacatccaaacagttagcagccagggacattcttaggaaggacagcggaagccacagcactgcttctgctgtggggtctacatgcctaaaactgagcaaagaattcgacttggtgggctggactctgcctcaaaagtgaaygaaaacaaaacaagacttcaagttagcatttgtggaaaggggaaaaaaaccattgtctgcctttctgtctcacgaacacagaaacaaaacactaatgaaggctcccaatctggcagaaatctaaggaattagaggaaaaggaacaaaaataaacaaaaggacaccagacttcaagtttctcaagccagatgtgaccctggaaactggtgtgatgaggaagaaaaacagctgttgactcagtcatgtgatgattcaatgatacaattatttcatcatcaaaagaggctttgataacttcgccattagcagtaagagtaaaaatagaaaaagaggaaggaggagctcgatttcagcactaatctgattcattcgctttaaaagacctaggcttagaggc

SEQ ID NO: 39980 - DNA, 589 bp, Homo sapiens
ttgctatcacatccctctaagtgcctagcataatgcccaacacatagtaggctctcactaaaagtctgatgaatagatgggtctatactgatagcatgtaatgagtattgggtttatagaggcaaagtcctttgaaaagatacaaagcattatacaaatataaagtgtttgtacttttcttttcttttttttctttttttgagacagagtctcgctctgtcgcctaggctggagtgcagtagcgcgatctcgactcactgcaacctctgtctcccaggttcaagtgattctcctgcctcagcctgctgagtagcygggattataggtatgcacaaccatgcctggctaatttttttttttttgtatttttttagtagagacggggtttcaccatgttggtcaggctggtctcgaaatcctgaccttgtgatctgcccgcttcggcctcccaaagtgctgggcttataggcgtgagccacttttcttcttctctttcatctcagtccctctctcccccagtcttctccaaggcataccaacaggttggcagagaaaattaaccaagaattatgtgagaaatgtggaacta

SEQ ID NO: 39981 - DNA, 589 bp, Homo sapiens
ttgctatcacatccctctaagtgcctagcataatgcccaacacatagtaggctctcactaaaagtctgatgaatagatgggtctatactgatagcatgtaatgagtattgggtttatagaggcaaagtcctttgaaaagatacaaagcattatacaaatataaagtgtttgtacttttcttttcttttttttctttttttgagacagagtctcgctctgtcgcctaggctggagtgcagtagcgcgatctcgactcactgcaacctctgtctcccaggttcaagtgattctcctgcctcagcctgctgagtagctrggattataggtatgcacaaccatgcctggctaatttttttttttttgtatttttttagtagagacggggtttcaccatgttggtcaggctggtctcgaaatcctgaccttgtgatctgcccgcttcggcctcccaaagtgctgggcttataggcgtgagccacttttcttcttctctttcatctcagtccctctctcccccagtcttctccaaggcataccaacaggttggcagagaaaattaaccaagaattatgtgagaaatgtggaacta

SEQ ID NO: 39982 - DNA, 589 bp, Homo sapiens
ttgctatcacatccctctaagtgcctagcataatgcccaacacatagtaggctctcactaaaagtctgatgaatagatgggtctatactgatagcatgtaatgagtattgggtttatagaggcaaagtcctttgaaaagatacaaagcattatacaaatataaagtgtttgtacttttcttttcttttttttctttttttgagacagagtctcgctctgtcgcctaggctggagtgcagtagcgcgatctcgactcactgcaacctctgtctcccaggttcaagtgattctcctgcctcagcctgctgagtagctgggattataggyatgcacaaccatgcctggctaatttttttttttttgtatttttttagtagagacggggtttcaccatgttggtcaggctggtctcgaaatcctgaccttgtgatctgcccgcttcggcctcccaaagtgctgggcttataggcgtgagccacttttcttcttctctttcatctcagtccctctctcccccagtcttctccaaggcataccaacaggttggcagagaaaattaaccaagaattatgtgagaaatgtggaacta

SEQ ID NO: 39983 - DNA, 994 bp, Homo sapiens
ccaatacagactcaccctagctgtttggtttcagtctgcccaggacggcagctggagctgcggtgtggtgggcagagataaggtctccgccagaggcgggcattgagcagggctgagatgtctgggcgggaatgggatgtgggaggggccaccctaatatgcgggatatcatcagtccgctgcccatctgaaaagaaaagacagggacaggggcacagagagaggggtgggggtagttctaaaagcccaggggaaggagaaaaggaggagaaatcaggatattgaagaaaaaataaacagatatggtggaaaaagaagggaagaaggaaaaaaatatttttgcatcctcctggaaagcaaaacagagaaaataacttcattcctaaattgcagtaggaagtattgggctagatgggaggaagaagagaggccctacctaacttttatccactagcctgagttatacagtgaaatgccttctttagaagttccaggataggatgaaatgctttagagggaagagaggggtcagccctaaatacatgcagggaagtgggccaaaagacctctgagaggcccttctaagtagaccttaagattttctaagagggaaaagacagagaaggcaaaacaactctaagaaccagaggaaggggcagaactgacrtttattgagagccaccatatcaagcacagggctgggcacgctgcagacattatcccatctgtaattcacactccagccctccaaagtaggtgctatttctctgtttcacaagtgggtaatttgagtaatatacaaggctctcttagttgaatggcaattaagtagcagaatcaggatttgaactcaggtttgacacaaatatccatggtctttctaccaggctccttcttgggaatgggcagttggaggattcttactggtggtagaggaagctgaaatggtataatggagagaagactgaacctcaaagaccaaggtcaaacaact

SEQ ID NO: 39984 - DNA, 644 bp, Homo sapiens
catgaagatgttggagctggagaaagacttgttttctttgaactgcaataggagaaagacctcaacttccaagttctagaagatgcctgagggcttataatttccttttagcaataagctgcttaaaaagaaggtagagaacaacctttctcttttaatggatagcatctcttatttttactgtgtgtttactgcatgcttgatattgttaacatgatgatgacatgatggatcccagaagaccactttctagaaggtatgagtgtatttgagtcaggaaaggggggccgttcagggagagatacctgaataaggaaggaggcagaggggataaattaaaacctgaaggctagaggatttggccattcagtgactctgtacatgatgttcacctttgttctgcaaatgagccaagaactaatggtgtccctcagactgtgctgagggctgttgraagaaaccaacataagacagaccagctcccaggatgctattaaggaaattacatgactgcaggggagaacagacccagatattagctctaaaatgccagtcctagatattagctctaaaatagtttagctctaagttagctgaaataccagctatcatttctgagattctcaccacaaccctgagatagg

SEQ ID NO: 39985 - DNA, 981 bp, Homo sapiens
cctgtaatcccagctactcaggaagctgaggcaggagaattgcttgaacctgggaggtggagggtgcagtgtgccaagatcatgtcactacactccagcctgggcgacagagtgcgactccatctcagaaaaaaaaaaaaaaaagtaagggcaaagtattcacacagatggtgggagattatttcactgggttttaactcaccagcaagtggaacagtcacgatgtcctaaatctcttgagcccagtggggtgcctgctcctgcggggagtctgggatagatgaggctcacagctccctggggaagctgggactcacagaccaggaagagagaaggaagctggaagggaaagcctgctgtgtgtggatgtctgagagccgtgggaagctcagagaggagacacagtaggcaatttctggaaagtcttctggaggaggtggtccctgaaaaaagagtgagggtgggagtgcctcagggccgtggttgtggtatggtttgggatccttcctactgatctttatcactgtttcctgaaccccacttgtccttccaacaaacatctggctgggagtggtcccaccattaatttcattaaatctattaattccattaaatggacagaggtaaggggcagtggtctctttcagcttaggggtaattgtgaatgggcatgatcacctgcctcctatgcttcataacaacaacctggttrtttaaagtgctctcctgatcactttcctcccaagagagcagataatagctggaggctgcatcctggggctggtggccaggaggaggaggaggcaggaaacaagaatgtcatcttccctccctgctggccctctccacttctgtcctataccattctttcccccattttgggcaaggagccagctcaggctagactgtcccgggtcttcctgggtgggtttctcgtagtgcccgtctggttctggcaccgcttgagaaggtctctctgga

SEQ ID NO: 39986 - DNA, 981 bp, Homo sapiens
cctgtaatcccagctactcaggaagctgaggcaggagaattgcttgaacctgggaggtggagggtgcagtgtgccaagatcatgtcactacactccagcctgggcgacagagtgcgactccatctcagaaaaaaaaaaaaaaaagtaagggcaaagtattcacacagatggtgggagattatttcactgggttttaactcaccagcaagtggaacagtcacgatgtcctaaatctcttgagcccagtggggtgcctgctcctgcggggagtctgggatagatgaggctcacagctccctggggaagctgggactcacagaccaggaagagagaaggaagctggaagggaaagcctgctgtgtgtggatgtctgagagccgtgggaagctcagagaggagacacagtaggcaatttctggaaagtcttctggaggaggtggtccctgaaaaaagagtgagggtgggagtgcctcagggccgtggttgtggtatggtttgggatccttcctactgatctttatcactgtttcctgaaccccacttgtccttccaacaaacatctggctgggagtggtcccaccattaatttcattaaatctattaattccattaaatggacagaggtaaggggcagtggtctctttcagcttaggggtaattgtgaatgggcatgatcacctgcctcctatgcttcataacaacaacctggttgtttaaagtgctctcctgatcactttcstcccaagagagcagataatagctggaggctgcatcctggggctggtggccaggaggaggaggaggcaggaaacaagaatgtcatcttccctccctgctggccctctccacttctgtcctataccattctttcccccattttgggcaaggagccagctcaggctagactgtcccgggtcttcctgggtgggtttctcgtagtgcccgtctggttctggcaccgcttgagaaggtctctctgga

SEQ ID NO: 39987 - DNA, 548 bp, Homo sapiens
agggcacgactcgtgcctccacacaggtgcacgcaggcctcacagaggggatgacatgccagttgggcctcaaaggatgaatagaattttgacaggcagaggcaggggaaaggcacaccaggcagaagaagcaacacaaagacagtgggattaacctggcacatcgtgtttggggagatgccagtcatgggtggagtagagggagtgaatgggaagcagcaggaggcaggaggggtgggctggggctggcctgggagagccttgggtgatagtctaagaattctggctacagaaaagtgggagctggtgatgcatttaagcaggggaaggatacagtcagcattatttagaaagatgactctagtggaggcactctgggggcaaaggggcgggaaacaagaggcagagggcccagccaggaggcccagcctattgccgtggaaggggccaggcctcaaggaggcccagggtagacagcggtagtgggtgtggagatgaggtaayagtttagagttgtcaagactccgtgcctcaatgggaaaggaaga

SEQ ID NO: 39988 - DNA, 794 bp, Homo sapiens
agataggcttgagcctgcagaggaccggcttctcttcttggcagcactgggcacattcataaatgttgtctatgatctttctgctctgcagaggcagggtgccttcatgcacttctgaatccttactgtccatgccatagtttccagaagatagacatgtccaacggtatatgtccaagaaatgtgaggtgcagctagcccccatgagtcctttgggtctgatggaggcacctccttgagaagtctttcttccctgacacatcctttagttaactccatgctcctcaccatgggtctccacagccttgttgcgctcagtattgtaggctcaaaaaacatttttctgaatgaatgtagaacttgaagactgcctctcctctgaacagttgccacgtccagtgctctcagcctggaatcctcttccttcttcattcacctgttcagtttatttcaaaatttgagggattactaggtgttacactcttactgggcccagggattacctcctccagaragcctttctgacccttccattaggggctcctcttccccatggctactgtaccgaggtggacctctgagcccccagatcaagacggtcccttgagcacagaaaccagctctgattcatctctctgtgcttggcaccagcctcgttcaggaaacacccatagaaggcaccatcttcttacggaagagaccacctctggggcagacagatcctggttgggattctagatctgcacttgatagcttggccaagttcctttctctctatcaatttcctggagtaa

SEQ ID NO: 39989 - DNA, 612 bp, Homo sapiens
cagttactgaattttaaaatcacttgaaatagttcttttattttgagtcaagytggcaaccaaggtaggcttgaccacaaagaaaagaattattccaagtgacaacatttagatttaagctcagaggctccattttattttctatgctttgggattgctttttataaattttttattttgctttatagaattatgagaaattaatggataaaaatctttacatgtagaaatgctaagttactcctgtgatatctaaaagtctgataatgcccaaaaggatgattacatgctggaaaattcttcctattttgagaacacatgttgaacatgtgatagatgcaaagatccaattgattatttctctttgtgtatatgatgttgccctgattgccctcaaactgttttacattagagaggtttgctttctataacagacataccagatcccttgaaggggtagggtatcattgatgttgtgccatcaaaagacatatgcctaatggggaagagagtgaatgagggcacacagtggtgagaacctgtcatgtgtgctagatatcattaaagtctcacaattgaatattttaaaaaaagtaaatactgcattctgct

SEQ ID NO: 39990 - DNA, 629 bp, Homo sapiens
caaagctaaacccatgctctgtatcagatcagggaccaactctcatctcagctgtcgacgctgctgtggttccaggcctcttgaatgaactggttgggctgcctgagcagtttatttctaaagggtataggagcctctgggatagaactcattmcagggggagagcgaggcatagtgggcctcgccaacagtgaagcgtcaggtgtcggaggcaagctgcgattctgacttcagtgtggttgcatctgttctccatctggtcccttggagacctcatctgggtcacaggagagaaagggtggccagtaaaatatatctacacacatatatatatatgataaaatattctttaaaaatctcagcttcatcctgtcacccaccaactgtgtgactgtgggcaggttacctctcctctctacgcctcagcctcctatcattaaatggtgatgcccgcagtgcctgagagggctgctctgaagtcattggagttcgtgtttgtaaactgcttagaatgctgtaaatgctaagtgttatataaacaaaacgcaaagcacctgtaagacagggcacaagaagctctagtttgggactgtctgacagtgcccaaggaggagagcgaagcaggcctc

SEQ ID NO: 39991 - DNA, 1155 bp, Homo sapiens
  misc_feature (1)...(1155): n = A,T,C or G
atttgtacaagcatactactatggtaaactgagtcacactcaaccaaattcacacaggcaaaacctaggtgatcacgatccctcccactgcataatggtgagttgtgcagtcaggatcatatcacacgagcacctgtcctgaggctgggttgcttttgatttgacttttacatttaacacagggagtaaaagcacttagatattgttaatgattcaacttagaatcaaattttcctcctactccacatttaaggtattgggtctgtttaattgagcgcatcctgagatttcaaggcaagctgtttaaaaattaaaaataaagtaaagcaaaacaattttatgacttacttctgtgaattgaactttctcaacattggacaatagaaacaaatgcaggaataaattgaataccaaggctgacataaaactgcaactgtacccatgaccatgaatgtcaaatgtttacacttcttaaaatactcacattgttcagagtgactggctttataacaatgtgtgcctataaagtacatatctaccaataagataacttttcatctgtttcttctattggttttgaatataacatttatttgaaaaacaagttacatttccaaatgtttgtgatctctgacgtggatgacggtgaccagggccagctcctacgcgggcgtgggcgagtgctgtggccagatgtgtgcgtttgaggcaggccaccctggctgctgttggaaagggaactggagccagccagcctccactctrggcagacgactggaaggtgctgggagtcaggctagagataaagatttggcatcgcaagcctggtgggaggtggttgacgtcttgggtgctgaggctggagcccagggcgagtgtgaagtaagaggaggaggtcaagatgaaagcctgagaagccatcttcagccgctctttccacaggcatcagcatcaacctacttgactacgggacaccctggaggagtgagactttggaatcaacattcttgaacaccccatgagacctaaaaaaaacccctgcatatagcagctgttctgtaaatgttctagactgacttattttttccagancagcaagggattgtagtataatgagatctcatttaaacaaaatcancaaattncctgtattna

SEQ ID NO: 39992 - DNA, 1155 bp, Homo sapiens
  misc_feature (1)...(1155): n = A,T,C or G
atttgtacaagcatactactatggtaaactgagtcacactcaaccaaattcacacaggcaaaacctaggtgatcacgatccctcccactgcataatggtgagttgtgcagtcaggatcatatcacacgagcacctgtcctgaggctgggttgcttttgatttgacttttacatttaacacagggagtaaaagcacttagatattgttaatgattcaacttagaatcaaattttcctcctactccacatttaaggtattgggtctgtttaattgagcgcatcctgagatttcaaggcaagctgtttaaaaattaaaaataaagtaaagcaaaacaattttatgacttacttctgtgaattgaactttctcaacattggacaatagaaacaaatgcaggaataaattgaataccaaggctgacataaaactgcaactgtacccatgaccatgaatgtcaaatgtttacacttcttaaaatactcacattgttcagagtgactggctttataacaatgtgtgcctataaagtacatatctaccaataagataacttttcatctgtttcttctattggttttgaatataacatttatttgaaaaacaagttacatttccaaatgtttgtgatctctgacgtggatgacggtgaccagggccagctcctacgcgggcgtgggcgagtgctgtggccagatgtgtgcgtttgaggcaggccaccctggctgctgttggaaagggaactggagccagccagcctccactctaggcagacractggaaggtgctgggagtcaggctagagataaagatttggcatcgcaagcctggtgggaggtggttgacgtcttgggtgctgaggctggagcccagggcgagtgtgaagtaagaggaggaggtcaagatgaaagcctgagaagccatcttcagccgctctttccacaggcatcagcatcaacctacttgactacgggacaccctggaggagtgagactttggaatcaacattcttgaacaccccatgagacctaaaaaaaacccctgcatatagcagctgttctgtaaatgttctagactgacttattttttccagancagcaagggattgtagtataatgagatctcatttaaacaaaatcancaaattncctgtattna

SEQ ID NO: 39993 - DNA, 1155 bp, Homo sapiens
  misc_feature (1)...(1155): n = A,T,C or G
atttgtacaagcatactactatggtaaactgagtcacactcaaccaaattcacacaggcaaaacctaggtgatcacgatccctcccactgcataatggtgagttgtgcagtcaggatcatatcacacgagcacctgtcctgaggctgggttgcttttgatttgacttttacatttaacacagggagtaaaagcacttagatattgttaatgattcaacttagaatcaaattttcctcctactccacatttaaggtattgggtctgtttaattgagcgcatcctgagatttcaaggcaagctgtttaaaaattaaaaataaagtaaagcaaaacaattttatgacttacttctgtgaattgaactttctcaacattggacaatagaaacaaatgcaggaataaattgaataccaaggctgacataaaactgcaactgtacccatgaccatgaatgtcaaatgtttacacttcttaaaatactcacattgttcagagtgactggctttataacaatgtgtgcctataaagtacatatctaccaataagataacttttcatctgtttcttctattggttttgaatataacatttatttgaaaaacaagttacatttccaaatgtttgtgatctctgacgtggatgacggtgaccagggccagctcctacgcgggcgtgggcgagtgctgtggccagatgtgtgcgtttgaggcaggccaccctggctgctgttggaaagggaactggagccagccagcctccactctaggcagacgactggaaggtgctgggagtcaggctagagataaagatttggcatcgcaagcctggtgggaggtggttgacgtcttgggtgctgaggctggagcccagggcgagtgtgaagtaagaggaggrggtcaagatgaaagcctgagaagccatcttcagccgctctttccacaggcatcagcatcaacctacttgactacgggacaccctggaggagtgagactttggaatcaacattcttgaacaccccatgagacctaaaaaaaacccctgcatatagcagctgttctgtaaatgttctagactgacttattttttccagancagcaagggattgtagtataatgagatctcatttaaacaaaatcancaaattncctgtattna

SEQ ID NO: 39994 - DNA, 542 bp, Homo sapiens
tcataatgactgctcacatactaagactgagttcttccctattgtctaaactaaatgagccagaggcaaattgttctattatcttgtttccctccatgtgcatatcttgtaagtgtgatattttgttgcattaccttccttataaaaacactcatggmatatttctgatgcgtaattgttgcccattttataaggatcataatttcttcctcagtgcattgctaaaataaacaatgtgtcttttttttgagacggagtctccctctgtcgcccaggctggagtgcagtggcttgatctgggctcactgcaacctctgcctcccgggttcacaccattctcctgcctcagcctcccgagtagctgggactacaggcgcccgccactacgcccggcggctaaattttttgtatttttagtagagacggggtttcaccgtgttatccaggatggtctccatctcctgaccttgtgatccgcccgcgttggcctcccaaagtgctgggattacaggcttgagccactgcgcccagccaacaacatg

SEQ ID NO: 39995 - DNA, 947 bp, Homo sapiens
tggatggtaataatggttgcataacaatgtgaatatacttgatcccactgaatttaacaaataaaaattgttaatatggtaaaaaaaatcgtttcactatctggatgtcagtcagagatggccartgcacctgatggtcatgtgactactgtctcacgtcctcttctgcaaaattattatcttggcatgattgtttttcaattaactgcacactcctttagtgcttagatagtgtgctatgggaagtcctgaggggggagaaaacatatagccaggatatgcacgaatctcatagatattcacagaatgaatagctccccattccagaattgaagagatctgatacaatcaacctaccactccatggctaccgagcatcctgaagggtgaggctattttgtgggctcaccaacagcctttattgcttgtaggtagtacattcttcagcagtcatcactagagcaacgttggaaagcaggatctcataccttagtcccatgcagagcttccatttctgctactcaatttactttgtacataggcctaccacacaaaatgaccaaggaaaaaggcatgctgacatcaactgatcaagtcaccattgggtatctcatgtctttttcttagtgttctcttgtgtgtgctggtgaatactataaacttttcacaccctggtcaatacatgtgcctctagactacatatccctaaccatccaatcagctaagcaatttcctgccattcgtaattccatatctattcttactggggaccacttctctcttcccacaaggtagactacagagtgcactacctaaaataaatttagagtcatctttgggtgaggggataaggatacagctgcccatttgtggcatgcacagcatattaagctgtctcatctctgaactcagctctgattcctttgctttaactaacttggtcatta

SEQ ID NO: 39996 - DNA, 947 bp, Homo sapiens
tggatggtaataatggttgcataacaatgtgaatatacttgatcccactgaatttaacaaataaaaattgttaatatggtaaaaaaaatcgtttcactatctggatgtcagtcagagatggccaatgcacctgatggtcatgtgactactgtctcacgtcctcttctgcaaaattattatcttggcatgattgtttttcaattaactgcacactcctttagtgcttagatagtgtgctatgggaagtcctgaggggggagaaaacatatagccaggatatgcacgaatctcatagatattcacagaatgaatagctccccattccagaatkgaagagatctgatacaatcaacctaccactccatggctaccgagcatcctgaagggtgaggctattttgtgggctcaccaacagcctttattgcttgtaggtagtacattcttcagcagtcatcactagagcaacgttggaaagcaggatctcataccttagtcccatgcagagcttccatttctgctactcaatttactttgtacataggcctaccacacaaaatgaccaaggaaaaaggcatgctgacatcaactgatcaagtcaccattgggtatctcatgtctttttcttagtgttctcttgtgtgtgctggtgaatactataaacttttcacaccctggtcaatacatgtgcctctagactacatatccctaaccatccaatcagctaagcaatttcctgccattcgtaattccatatctattcttactggggaccacttctctcttcccacaaggtagactacagagtgcactacctaaaataaatttagagtcatctttgggtgaggggataaggatacagctgcccatttgtggcatgcacagcatattaagctgtctcatctctgaactcagctctgattcctttgctttaactaacttggtcatta

SEQ ID NO: 39997 - DNA, 947 bp, Homo sapiens
tggatggtaataatggttgcataacaatgtgaatatacttgatcccactgaatttaacaaataaaaattgttaatatggtaaaaaaaatcgtttcactatctggatgtcagtcagagatggccaatgcacctgatggtcatgtgactactgtctcacgtcctcttctgcaaaattattatcttggcatgattgtttttcaattaactgcacactcctttagtgcttagatagtgtgctatgggaagtcctgaggggggagaaaacatatagccaggatatgcacgaatctcatagatattcacagaatgaatagctccccattccagaattgaagagatctgatacaatcaacctaccactccatggctaccgagcatcctgaagggtgaggctattytgtgggctcaccaacagcctttattgcttgtaggtagtacattcttcagcagtcatcactagagcaacgttggaaagcaggatctcataccttagtcccatgcagagcttccatttctgctactcaatttactttgtacataggcctaccacacaaaatgaccaaggaaaaaggcatgctgacatcaactgatcaagtcaccattgggtatctcatgtctttttcttagtgttctcttgtgtgtgctggtgaatactataaacttttcacaccctggtcaatacatgtgcctctagactacatatccctaaccatccaatcagctaagcaatttcctgccattcgtaattccatatctattcttactggggaccacttctctcttcccacaaggtagactacagagtgcactacctaaaataaatttagagtcatctttgggtgaggggataaggatacagctgcccatttgtggcatgcacagcatattaagctgtctcatctctgaactcagctctgattcctttgctttaactaacttggtcatta

SEQ ID NO: 39998 - DNA, 526 bp, Homo sapiens
gaacttgcctagtaaaatcatgtagagatttaaccctagttattggtctaagaaagaagagatgaaggcagattccaaggaaggaagcattatcttacaagataccttcttactggacatttgtatagttcttaagcaaggcaagtttctacctttgaactgaggaagggaaacagttaagtgaattgttccatccactgatattaygcaaatgtatctaaacttgatttaatatttatgattttgttaataccctaatcttgtcattttctctctttaaatgttagagatatggtttgagacagggcattcttttctacctgtgttacattccagattaacacaggtaaaggcttagcagctacattccataatgagcaatgagtagaaatggggttcatcagccagtaagtaacccaactctagaagctcatccatagagcttactttggaggaccaattttgtttttccttcctttatccagcactcttcgaatccactcctgtcctaccctcccagttcctg

SEQ ID NO: 39999 - DNA, 2954 bp, Homo sapiens
tgcatggctattttttttttgtatttttagtagagatggggtttcaccgtgtgagccaggatggtctcgatctcctgacctcatgattcgcccaccttgtcctccgaaagtgctgggattacaggcatgagccactgcgcctggcctggagttatttttttaatattgtgcattgtatatttttttctgttttcatagatttatttaggagagtgtatgacatgatgaaacagtgagacagtacttggtaagcttagtagaggccaccttaaatagcaatctcattccttctagtttttcagtcaaagaagaaaaagtacaaatgaaatatttgcttgcactaatcaaaacacacagcaaaaattctgagcaaaagtgtctctgaaaaaytagagaacatttaaatttatttcccaagtgaaagaataaattcgatagtataagaatagtaattggtatttgtttacacagacacacatgtcagaagcatgtgaaccagagcaactccatcttaaataggagctgggtaaaatgaggctgaaacctactgggccgaattcccagatggctaaggcattctaagtcacaggatgagacaggaggtcaacacaaaatacaggtcataaaaacactgctgataaagcaggttgcaggaaggagctggcaaaaacccaccaaaaccaaaatggtgacgaaagtgacctctggtcgtcctcactgctacactcccatcagtatcatgacagtttacaaatgtcatgacaacatcaggaagttactctatatggtctaaaaaggggaggcataaataatccaccccttgtttagcatatcatcaagaaattaccataaaaatgggcaatcaacagccctccaggctgctctgactatggagtagctattctttgattcctttactttcttaaaaaactagctttcactttgcaatgtggactcccccagaattctttcttgagcgatatccaagaaccctcttttggggtctggatcaggatgcctttcctgtaacacacaaaccaccaccatcaacaacaaagcattccttctttataaagatacacttccaggcatatacctcccttggtgtggatatttttatatttgggttgtctgctgtagctaaagtaataataattaagaagttccaaaacaaagaaatgataaggactcaaggtgatggataccagaaatgcctgacttggtcataacatattctatgcatgtagagagctcttacatgtaccccagaaatatgtaacacattacgtatcaataacagaaaaatatgtaaaataaaataattttttaaaaagcagttacatacaaaataagaccctattgatttttgttattgttttatgaattagaaaaacaaagaccaacatcggcttatagtcacataactaactaggaataaattagaaaaaaaaatcttttttttgtcacagatatcaagttattcattgaacaactataatgtaagaagactgtaattaccaaacattcctggggttgtggcaaccatacggccctaatttgacatgcagacattttagctaactcctctttttaaaatccagtaaatgtatttaatgctacagtgttattaaatgaatattatagcttacaatcaactggatcttagaatcacagaaaatttcatttgctcaatgaactatcaataggaactaaaaataggtaagtaattattcttcagtgtaagaaaattttggtctacttgaaaaaatatatgcatgtattatattcagattctttatagatatgtttgatatatgtgtatatatacttatatgtatattatatttatgtatttgtgtatatatgcatatataaaaaataaggaaagaataaaacctaaaaaaatacaatattaaaatgaatacttcaaaatgctatctatattttaaaggaaatcttttttactgagaaaaatatcctggtaaaacattagtctatgttctaaaaattcaaactaaatcactaaagctacatgttgtgttaaaataaaataagtagtctctttctctgagttttattagactgagttgagattggtaacaattcacaaattgagaaaatgttattatttcaaaaattgatgattatttgtccaataaataatgtgatataaattcattattactcctcaaaatttcataagactatgaagtacttcatgactgtctttagatatcatttcttctgctccttcaaaagaatttccaccaagatgcaatcagtatttgtcaaattatcaatcattttatcattccaatgcttgtaaacctttaagcattatatctaatctcacttaaattattcagaaaaatgtttaactgtgaagaaactatagatattacactatatgtttgttgacaaatattacattgttgacaacttaatttttattatctaatgtttgctctgtaagctcattttaactttataaaaatttatgtaggaaatgttattggctatttaaagttgtatttactttctcttattttaaacttaaagttagtacttttctctaaagtatcatttttaacaaaatatctattaagcatggaatcaaaatatgtgtacacatgtacactggtttatcaccaaaatttttagcacttcctctctccaccatccagacaatatggtagttaataagaaaaaaaattgaagaaacataaaatataggccataatattattaaaattaagatgactggcaaatgtcagttagtgtaattaaaagcctaatttacactcaatatgaataatatttatcagattatttattcatttagcaaactacattattgaatttgacatgtattatgtaccaggacaatattgtatattataaaacctattcattagttgtctctttaagaacagattattctgttttgaggatcg

SEQ ID NO: 40000 - DNA, 2954 bp, Homo sapiens
tgcatggctattttttttttgtatttttagtagagatggggtttcaccgtgtgagccaggatggtctcgatctcctgacctcatgattcgcccaccttgtcctccgaaagtgctgggattacaggcatgagccactgcgcctggcctggagttatttttttaatattgtgcattgtatatttttttctgttttcatagatttatttaggagagtgtatgacatgatgaaacagtgagacagtacttggtaagcttagtagaggccaccttaaatagcaatctcattccttctagtttttcagtcaaagaagaaaaagtacaaatgaaatatttgcttgcactaatcaaaacacacagcaaaaattctgagcaaaagtgtctctgaaaaattagagaacatttaaatttatttcccaagtgaaagaataaattcgatagtataagaatagtaattggtatttgtttacacagacacacatgtcagaagcatgtgaaccagagcaactccatcttaaataggagctgggtaaaatgaggctgaaacctactgggccgaattcccagatggctaaggcattctaagtcacaggatgagacaggaggtcaacacaaaatacaggtcataaaaacactgctgataaagcaggttgcaggaaggagctggcaaaaacccaccaaaaccaaaatggtgacgaaagtgacctctggtcgtcctcactgctacactcccatcagtatcatgacagtttacaaatgtcatgacaacatcaggaagttactctatatggtctaaaaaggggaggcataaataatccaccccttgtttagcatatcatcaagaaattaccataaaaatgggcaatcaacagccctccaggctgctctgactatggagtagctattctttgattcctttactttcttaaaaaactagctttcactttgcaatgtggactcccccagaattctttcttgagcgatatccaagaacyctcttttggggtctggatcaggatgcctttcctgtaacacacaaaccaccaccatcaacaacaaagcattccttctttataaagatacacttccaggcatatacctcccttggtgtggatatttttatatttgggttgtctgctgtagctaaagtaataataattaagaagttccaaaacaaagaaatgataaggactcaaggtgatggataccagaaatgcctgacttggtcataacatattctatgcatgtagagagctcttacatgtaccccagaaatatgtaacacattacgtatcaataacagaaaaatatgtaaaataaaataattttttaaaaagcagttacatacaaaataagaccctattgatttttgttattgttttatgaattagaaaaacaaagaccaacatcggcttatagtcacataactaactaggaataaattagaaaaaaaaatcttttttttgtcacagatatcaagttattcattgaacaactataatgtaagaagactgtaattaccaaacattcctggggttgtggcaaccatacggccctaatttgacatgcagacattttagctaactcctctttttaaaatccagtaaatgtatttaatgctacagtgttattaaatgaatattatagcttacaatcaactggatcttagaatcacagaaaatttcatttgctcaatgaactatcaataggaactaaaaataggtaagtaattattcttcagtgtaagaaaattttggtctacttgaaaaaatatatgcatgtattatattcagattctttatagatatgtttgatatatgtgtatatatacttatatgtatattatatttatgtatttgtgtatatatgcatatataaaaaataaggaaagaataaaacctaaaaaaatacaatattaaaatgaatacttcaaaatgctatctatattttaaaggaaatcttttttactgagaaaaatatcctggtaaaacattagtctatgttctaaaaattcaaactaaatcactaaagctacatgttgtgttaaaataaaataagtagtctctttctctgagttttattagactgagttgagattggtaacaattcacaaattgagaaaatgttattatttcaaaaattgatgattatttgtccaataaataatgtgatataaattcattattactcctcaaaatttcataagactatgaagtacttcatgactgtctttagatatcatttcttctgctccttcaaaagaatttccaccaagatgcaatcagtatttgtcaaattatcaatcattttatcattccaatgcttgtaaacctttaagcattatatctaatctcacttaaattattcagaaaaatgtttaactgtgaagaaactatagatattacactatatgtttgttgacaaatattacattgttgacaacttaatttttattatctaatgtttgctctgtaagctcattttaactttataaaaatttatgtaggaaatgttattggctatttaaagttgtatttactttctcttattttaaacttaaagttagtacttttctctaaagtatcatttttaacaaaatatctattaagcatggaatcaaaatatgtgtacacatgtacactggtttatcaccaaaatttttagcacttcctctctccaccatccagacaatatggtagttaataagaaaaaaaattgaagaaacataaaatataggccataatattattaaaattaagatgactggcaaatgtcagttagtgtaattaaaagcctaatttacactcaatatgaataatatttatcagattatttattcatttagcaaactacattattgaatttgacatgtattatgtaccaggacaatattgtatattataaaacctattcattagttgtctctttaagaacagattattctgttttgaggatcg

SEQ ID NO: 40001 - DNA, 2954 bp, Homo sapiens
tgcatggctattttttttttgtatttttagtagagatggggtttcaccgtgtgagccaggatggtctcgatctcctgacctcatgattcgcccaccttgtcctccgaaagtgctgggattacaggcatgagccactgcgcctggcctggagttatttttttaatattgtgcattgtatatttttttctgttttcatagatttatttaggagagtgtatgacatgatgaaacagtgagacagtacttggtaagcttagtagaggccaccttaaatagcaatctcattccttctagtttttcagtcaaagaagaaaaagtacaaatgaaatatttgcttgcactaatcaaaacacacagcaaaaattctgagcaaaagtgtctctgaaaaattagagaacatttaaatttatttcccaagtgaaagaataaattcgatagtataagaatagtaattggtatttgtttacacagacacacatgtcagaagcatgtgaaccagagcaactccatcttaaataggagctgggtaaaatgaggctgaaacctactgggccgaattcccagatggctaaggcattctaagtcacaggatgagacaggaggtcaacacaaaatacaggtcataaaaacactgctgataaagcaggttgcaggaaggagctggcaaaaacccaccaaaaccaaaatggtgacgaaagtgacctctggtcgtcctcactgctacactcccatcagtatcatgacagtttacaaatgtcatgacaacatcaggaagttactctatatggtctaaaaaggggaggcataaataatccaccccttgtttagcatatcatcaagaaattaccataaaaatgggcaatcaacagccctccaggctgctctgactatggagtagctattctttgattcctttactttcttaaaaaactagctttcactttgcaatgtggactcccccagaattctttcttgagcgatatccaagaaccctcttttggggtctggatcaggatgcctttcctgtaacacacaaaccaccaccatcaacaacaaagcattccttctttataaagatacacttccaggcatatacctcccttgrtgtggatatttttatatttgggttgtctgctgtagctaaagtaataataattaagaagttccaaaacaaagaaatgataaggactcaaggtgatggataccagaaatgcctgacttggtcataacatattctatgcatgtagagagctcttacatgtaccccagaaatatgtaacacattacgtatcaataacagaaaaatatgtaaaataaaataattttttaaaaagcagttacatacaaaataagaccctattgatttttgttattgttttatgaattagaaaaacaaagaccaacatcggcttatagtcacataactaactaggaataaattagaaaaaaaaatcttttttttgtcacagatatcaagttattcattgaacaactataatgtaagaagactgtaattaccaaacattcctggggttgtggcaaccatacggccctaatttgacatgcagacattttagctaactcctctttttaaaatccagtaaatgtatttaatgctacagtgttattaaatgaatattatagcttacaatcaactggatcttagaatcacagaaaatttcatttgctcaatgaactatcaataggaactaaaaataggtaagtaattattcttcagtgtaagaaaattttggtctacttgaaaaaatatatgcatgtattatattcagattctttatagatatgtttgatatatgtgtatatatacttatatgtatattatatttatgtatttgtgtatatatgcatatataaaaaataaggaaagaataaaacctaaaaaaatacaatattaaaatgaatacttcaaaatgctatctatattttaaaggaaatcttttttactgagaaaaatatcctggtaaaacattagtctatgttctaaaaattcaaactaaatcactaaagctacatgttgtgttaaaataaaataagtagtctctttctctgagttttattagactgagttgagattggtaacaattcacaaattgagaaaatgttattatttcaaaaattgatgattatttgtccaataaataatgtgatataaattcattattactcctcaaaatttcataagactatgaagtacttcatgactgtctttagatatcatttcttctgctccttcaaaagaatttccaccaagatgcaatcagtatttgtcaaattatcaatcattttatcattccaatgcttgtaaacctttaagcattatatctaatctcacttaaattattcagaaaaatgtttaactgtgaagaaactatagatattacactatatgtttgttgacaaatattacattgttgacaacttaatttttattatctaatgtttgctctgtaagctcattttaactttataaaaatttatgtaggaaatgttattggctatttaaagttgtatttactttctcttattttaaacttaaagttagtacttttctctaaagtatcatttttaacaaaatatctattaagcatggaatcaaaatatgtgtacacatgtacactggtttatcaccaaaatttttagcacttcctctctccaccatccagacaatatggtagttaataagaaaaaaaattgaagaaacataaaatataggccataatattattaaaattaagatgactggcaaatgtcagttagtgtaattaaaagcctaatttacactcaatatgaataatatttatcagattatttattcatttagcaaactacattattgaatttgacatgtattatgtaccaggacaatattgtatattataaaacctattcattagttgtctctttaagaacagattattctgttttgaggatcg

SEQ ID NO: 40002 - DNA, 549 bp, Homo sapiens
ctatcttttccaattctgtacctcttctagtgattttacactgttaaacagacatgataaatcatccaatatcctagactctgctttttgagctcaccattatgattactsactgattattatattctataattatgtcattcagtttttccttcttctacaaaccactaaactcatttcttctgaactatttgacttcactttttttgatcactcttcatcagccttcctgtgttcagcactctccttgtccagacttgattcattgcttatcacacgactcattcatcagccagtgccctcaaatcaccggtgcatctttcattccctttccccacattgaaaaataaaataaaagagtcacaacaaatgcctctctattctgtatttgaatttatattggttaggaaagctaacacaagtgatgagactgtttccttttttatttcaggataaattctattatttcgttggccattttccaattcatgatatgaaattattatacaagcttttctatccccttacttaccattctctatcctctgc

SEQ ID NO: 40003 - DNA, 549 bp, Homo sapiens
ctatcttttccaattctgtacctcttctagtgattttacactgttaaacagacatgataaatcatccaatatcctagactctgctttttgagctcaccattatgattactgactgattattatattctataattatgtcattcagtttttccttcttctacaaaccactaaactcatttcttctgaactatttgacttcactttttttgatcactcttcatcagccttcctgtgttcagcactctccttgtccagacttgattcattgcttatcacacgactcattcatcagccagtgccctcaaatcaccsgtgcatctttcattccctttccccacattgaaaaataaaataaaagagtcacaacaaatgcctctctattctgtatttgaatttatattggttaggaaagctaacacaagtgatgagactgtttccttttttatttcaggataaattctattatttcgttggccattttccaattcatgatatgaaattattatacaagcttttctatccccttacttaccattctctatcctctgc

SEQ ID NO: 40004 - DNA, 548 bp, Homo sapiens
gaaatgaaaagatataaatattttctttgaattttgttggtagcttctaaataattagaataattggcagcttctaaataattcttaaatattatacttagtacagaaataatttgcaagttatacatatttacaacttgacttatgctttgaaaatatccttaaaataacagaawcttatttgaaatatttattatgacttattctgtgtaaagatttttccactttacataactgatgagttctacattagcaatactataacaagtactgtttttttaagtagaggttatgaagcctctataactcttagaacctttgtgatttttcttcagagtaccttctgaagtcaaaggtctccaaaagcaaagataaaagctatacatggactctgtagggaacaaccacacagaatgagttgaatgatactctgggagccatcttttgaagatagatactctctctgggtcaggttggagtacagtgttaatgtcaaacgaccatcacacaaaccaagctcccctgtgactttagcagtgatgtatact

SEQ ID NO: 40005 - DNA, 548 bp, Homo sapiens
gaaatgaaaagatataaatattttctttgaattttgttggtagcttctaaataattagaataattggcagcttctaaataattcttaaatattatacttagtacagaaataatttgcaagttatacatatttacaacttgacttatgctttgaaaatatccttaaaataacagaatcttatttgaaatatttattatgacttattctgtgtaaagatttttccactttacataackgatgagttctacattagcaatactataacaagtactgtttttttaagtagaggttatgaagcctctataactcttagaacctttgtgatttttcttcagagtaccttctgaagtcaaaggtctccaaaagcaaagataaaagctatacatggactctgtagggaacaaccacacagaatgagttgaatgatactctgggagccatcttttgaagatagatactctctctgggtcaggttggagtacagtgttaatgtcaaacgaccatcacacaaaccaagctcccctgtgactttagcagtgatgtatact

SEQ ID NO: 40006 - DNA, 746 bp, Homo sapiens
taaggaacataaagttaattaaaaacttacacctaattatgtaaattgccttgttaaagacatgtgatttgtattttagatgcttgtttcctattaaaatacagacatttctaccctcagtttctaaatgtagactatttgttggctagtacttgatagattccttgtaagaaaaaatgctgggtaatgtacctggtaacaagcctgttaatatattaagattgaaaaagtaacttctatagttactccttctaaaatatttgacttcctamattccccccacccaaaatctttcccttttgaaaatactaaaaactaagttatgttattataaagtgtaaaatggtttgtcttaattataggagaaaaaggccttgttagaaataaaataaactgacttatttcactaatgaaaacttctgtttcctttttgttttcttgtgagcactgatacctcaatacattgatacctcaatacctttgaggtattttttgatacctcaaagatactagcttatttgaagctagagaagaatatttcttcaataacattgcacagttagaaaacattaaaatatcattcatgggccaggcaccgtgtctcatgcctgtaatcccggcactttgggaggctgaggcaggcggatcacaaggtcaggagatcgagaccatcctggctaacacggtgaaaccccgtctctactaaaaatacaaaaaattagccgggcgtggccgcgtgcgcctgt

SEQ ID NO: 40007 - DNA, 604 bp, Homo sapiens
gggaggtgggtggatcacccgcggtcaggagttcgagaccagcctggccaacatggcgaaacccccgtctctactaaaaatacaaaaaattagctgggggtagtgatgggcctataatcccagctacttgggaagctgaggcaagagaatcgcttgaacccgggaggcggaggtagcagtgaaccgagattgyaccactgcactccagcctgggcgacagagcgagactctgtctgaaaacacacacacacatgcacactcgctcgcgcacacacaaaatctatataccatatataagtgttaaagggtggggagagctggatatcgttcacaactttgtataaaggaaatatagaaaccaggtgggttcaactacaaaaatatcagaattaaaaagttaggggggaatattccaaaatttaattatcgattatctcttactaaaggaaccagaactattgtttcccaatctattattctctattttcataattaacattctacaatttaggtatgttaactttaaaatctaagggaaaagaatacctgtatttctgttactgatgcggtaggtacatcaaagcaaacaccctagaaatcaaag

SEQ ID NO: 40008 - DNA, 612 bp, Homo sapiens
cgggttcaagtgattctcctgcctcagcctcctgagtagctgggattacaggcatgcgccattatcctcggctaattttgtatttttagtacagacaggttttctccatgttggtcaggctggtctcaaactcccgacctcaggtgatccgtccacctcagcctcccaaagtgctgagattacaggcatgagccacggggcccagccgaaagattactataaatagtaggttcagcatgcactgaggatgagataaagcatggtgtactgggcactgctggagtaaatggtrttggtagcaatgaggtagaaattaagctgtaaggttagcagaggccaggacatgaaggatcttatcctcctatgaaagggttgagactttatcccacaagttttgtggagttgcttaaggagataacaacatggctagacatgcaataagttgaagataaatccgattagttcactaggccaatggaaacctggaaacctgagatcttttaggggcttcgccaagtcaaaattattttcataataatgttgccctttccacactcattccctcaagggtacagtggagtttcctagacatatatgacgtgataaaatcat

SEQ ID NO: 40009 - DNA, 1110 bp, Homo sapiens
gctgatataacagcactatggaaatgaggtacagaggtgcttacattagcttgaggttttgacagcattggaaaagagacatctttggccggcgcggtggctcatgcstgtaatcccagcacttcgggaggccgaggcgggtggatcacgaggtcagcagatggagaccatcctggctaacatggtgaaaccccgtctctactaaaaagtacaaaaaattagccgggcgtggtggcgggcgcctgtagtcccagctactcaggaggctgaggcaggagaatggcgtgaacccggtaggcagagcttgcagtgagccgagatcacgccactgcactccagcctgggtgacagagtgagactctgtctcaaaaaaaaaaaaaaaaaaaaaaaaaaggaaaagagacatctttgaatacatttatcatatgtatatttatgcatgtatctagctcctaaattcaaacttttaaatgattttgtaagtgcttaacctttagtctcattgtttctttagtcaattactttctggatgttttgaaccaagtagtaggagacagggtttcagagtcacattgtcacatcagtcaccccagaagagggcaccattatccaagtaatgtttggaagcggcttctgcttcttccagacatctactcctttcttttttcaggcccgctcttaggacctctgacattttttccaaaggggaaaaaatgttactaaggtttcaaagggaagaaagtcctgtaagacaccagcaaagtaatgatgaatttgtctttgatgcccccattcttgtttcatgacattcatgtcgctcttccccacccttgttaagcaatagcctgttttcccaacacccaaaaagccttagtagctgtagataggttctcaaaatgccatggttcccaatcttttcccttcaggctctttccattgctcttcctcatagacttgacattttggtttggggtgtgtgtgtgtgtatgtgcgcgccactacataaaaaaagatctggggccgggcgcggtggctcacgcctataattccagcactttgggagactgaggcgggcagatcacctgaggtcaggggttcgagaccagcctg

SEQ ID NO: 40010 - DNA, 590 bp, Homo sapiens
gtgggttataaaaatatagaattcaaatatgttagggcaataataaattatatatagatgcattgatgttgcagtacataaatgagcctttcagtcattttgcattctagatagatgtaatcttttttaaaaaaattaattgctttcatcttgagcctgggatgtcaaggctgcagtgagccatgattgcattactgcaytgcagcctgggtgacagagagagaccctgtgtcataaacataaataaatatttttaaaaagattctaaggctgagcatggtggctcacacctataatcccagcactttgggaggctgaggcaggaggattgcttgagactaggagttcgagaccaacctgggcaacatagggagactcctgtctctacaaataaaaattaagaaaaatttattagaggctgcaatgtctattactatttttaagttatttattattattagggtttgaaaaaaatctaggatgggaaaacaaaattcaagaatgcaaccaggaactatgtgtcaaggagaaatcccagagaaagtatagctttcgttaagcctcgcccatataactcataatgcaaccag

SEQ ID NO: 40011 - DNA, 590 bp, Homo sapiens
gtgggttataaaaatatagaattcaaatatgttagggcaataataaattatatatagatgcattgatgttgcagtacataaatgagcctttcagtcattttgcattctagatagatgtaatcttttttaaaaaaattaattgctttcatcttgagcctgggatgtcaaggctgcagtgagccatgattgcattactgcactgcagcctgggtgacagagagagaccctgtgtcataaacataaataaatatttytaaaaagattctaaggctgagcatggtggctcacacctataatcccagcactttgggaggctgaggcaggaggattgcttgagactaggagttcgagaccaacctgggcaacatagggagactcctgtctctacaaataaaaattaagaaaaatttattagaggctgcaatgtctattactatttttaagttatttattattattagggtttgaaaaaaatctaggatgggaaaacaaaattcaagaatgcaaccaggaactatgtgtcaaggagaaatcccagagaaagtatagctttcgttaagcctcgcccatataactcataatgcaaccag

SEQ ID NO: 40012 - DNA, 647 bp, Homo sapiens
tggctgcagctttagcccacatttctggtgcatcaagctttgaaccacgatctttgatcacctctgataaggtagaaatctgtgagaaaattgtacatgagtgggaaaaggttaaaattgaacatagkaaatattgtagtgaattattgtgctttttgtgcagaaaaaaactgttttgctctatgagaaactggtctccttattttcctctactccctaataaatccttttttgacaatcacctcttccaaatttttcaaacccacagaaaaactgaaagaataatgcagtaaccacatacgatccacctagattcaactgttaaaagtctgtatcatgtgctttatatccttttttagctctaatttgtaattaaaaaaaaaatgacatgtaataattgtacatatttatagggtatgtggtgatgtttcagtacatccgtacataccatgtataggtatcagatcaggatcattagcgtatccatcgtctaaacatttatcatttctttgttttaggaaccattcaatatcttccttcttgctttataactttataagtttttttttttttttttttgagattgagtcttgttctgttacccaggctggagtgcaattacgtgatcttggttcactgcaacctct

SEQ ID NO: 40013 - DNA, 1143 bp, Homo sapiens
ttaaatgaaaaaatgtgaaactgtatattatagcatttgctcaactatgtaaaaatattcataaaaagtgaaagagatatgttaaaattataacaatcattattattgcatgttaggattataagtgaccattatattcttttttatgatgagttttccaaatttctacaatgaaaatgcaatcagcattaatcaaccccctgaacaaataaaatgtttatacacaccactagaaattccctgggatagaacatgaarttggagttaagaatgagtaatgtttaagtatttattatgtgacaaaaatgtgatagggctttatgtatgttatttcctttagtcttagaacaaccatttgagatagatgtcagctctaatgattgcttcacaatatggctttgggtttgggataacatattgctcaaaagatgccaaatgaataaatcagatattgtttagaaaagagaatgattaaagagcttcaggtattgatttatgatgcaagacagagtgtatacacagttctgtcaggcataaatgtggtcaagaggagacaaagtaggagcataaaatggcaaaattatttagagtatagattgggtaaaattagtggaagaaattgaattatcatgtgatagtggagcatatctaggttgtcgtcagaatctaatgaggagcctgtagtttgaaaacaattatttagtatttaaaaattaatactcggggccaggcatggtggctcatgcctgtaatcccagcagtttgggaggccaagacagttggatcacctgaggtcaggagttcaagaccagcctagccaacatggtgaaatgccttctctataaaaacacaaaaattagctgggtgtgatggtacatacctgtaatcccagctacttgggaggctgagacaggtgaatcacttaaacctgggaggcagaagttgcagtgagctgagatcatgccactgcactccaacctgggcaacagggtgagacttcttctcaaaataaacaaataaataaataaatattaatacttgttaacaaagctcttgttttgtaatagcaagataaactggacaaatcctaagaacaagtaagaaggtgcagaagacagagtaatttccactggggcaccagtt

SEQ ID NO: 40014 - DNA, 1143 bp, Homo sapiens
ttaaatgaaaaaatgtgaaactgtatattatagcatttgctcaactatgtaaaaatattcataaaaagtgaaagagatatgttaaaattataacaatcattattattgcatgttaggattataagtgaccattatattcttttttatgatgagttttccaaatttctacaatgaaaatgcaatcagcattaatcaaccccctgaacaaataaaatgtttatacacaccactagaaattccctgggatagaacatgaagttggagttaagaatgagtaatgtttaagtatttattatgtgacaaaaatgtgatagggctttatgtatgttatttcctttagtcttagaacaaccatttgagatagatgtcagctctaatgattgcttcacaatatggctttgggtttgggataacatattgctcaaaagatgccaaatgaataaatcagatattgtttagaaaagagaatgattaaagagcttcaggtattgatttatgatgcaagacagagtgtatacacagttctgtcaggcataaatgtggtcaagaggagacaaagtaggagcataaaatggcaaaattatttagagtatagattgggtaaaattagtggaagaaattgaattatcatgtgatagtggagcatatctaggttgtcgtcagaatctaatgaggagcctgtagtttgaaaacaattatttagtatttaaaaattaatactcggggccaggcatggtggctcatgcctgtaatcccagcagtttgggaggccaagacagttggatcacctgaggtcaggagttcaagaccagcctagccaacatggtgaaatgccttctctataaaaacacaaaaattagctgggtgtgatggtacatacctgtaatcccagctacttgggaggctgagacaggtgaatcacttaaacctgggaggcagaagttgcagtgagctgagatcatgccactgcactccaacctgggcaacagggtgagacttcttctcaaaataaayaaataaataaataaatattaatacttgttaacaaagctcttgttttgtaatagcaagataaactggacaaatcctaagaacaagtaagaaggtgcagaagacagagtaatttccactggggcaccagtt

SEQ ID NO: 40015 - DNA, 531 bp, Homo sapiens
tgtatatcctattctagagaaaaactgaacaccaatttttatccatgttctaaccactatacatttgcctatgctttttcttctactgggaatgtcctccatcccccccctcatcctctggaggcattactatcttttgaaattgtactcagtcctgcagatggatgtggcttcctgggtcgctggagtcctgcagagttggagccatcagattagcttctattggccctttggcttcaccaccaaggagtaagccatgagtgctgctcacaggcaacgcaggcttgtgtactcaacactaccctttcttgctgatgtgcaagccttcctaggtatacctcatatccacagcagcagttctatcaagagtaaccatatatcatccacacctgaacacttgtttagtgaagggagtcactaggacaacaggtgtatcytgggcaaaccaggacatctagtcattcccctaactaaatctcatgaactacacccaaatatacttagtatatctttaattttcttatttctgtg

SEQ ID NO: 40016 - DNA, 1313 bp, Homo sapiens
acttttgcacagctccagagaatactggattaaaaaataataataataaaaaataagacaagccatgtcaggggatataggtctagctacaaccagccatgcttcctgccccatcctccagcragctggggaaaggcagaggtatgctaaatggcaaactccttataacaagtcagaaaaggtggttgggggcacggggaggggggagattggcttgcagcctctgggatagttgcctatttgtaatctttttctcttcctgaactccaactctccttctgtgtctcattgtgtctgtctctgcctgtctgtcagtttgcctcctttttcaaaaaaatctgaataaaacagagcaaactgtcttcctttcctatctgagagcagagaataaagcagtcacatgtcaagggcacattttcaggttttattttcgtcagcaatattctccccccataattgctatagaaacaccaaatccccttccatccttttgtgtgtgctgacagaatccactttaacttaccctcagatgaacctcactcatgctcgatgccggctgcagcacacgccagcactcaaggatatgcaagagtaggttgaaaaacacctgtcctttagatgctgaatgtgttctccttccccaatctgactccttctcatctaacttaagatgtggcaccggggtgctgcctgcatggcagcgttgacaacagaggcggttcttgggaaagagagcagctcagccaggaaaggagggggcgctcgctggcaggcttctggatgtgcaacatgcctgtgcacccacagaatgttccgagtctgatgcagaggtcctggagctctgcacagccaaaaggagaaaggaagggcttatatcatcgaagctagaagccaatctcctcatgtacttgcctatctggctgcacgagtgctgtctgagggctacgtgaaacagtaacaagtccctgtaggtccagctgcaccatttctggcataaatgtcttcagctcctggaaggaagcaaggccaaaggaagctgcacatgtcttggatgagctaaggacctgctgctaatccttgccagggtctctggcacccaggaaagagctttgggagaatacgggaacagggacaggttggttgttgcacccacagtgagataacacagaggctcttaatgcagagaggccaaagcctttcctaaatgcctttgcagacggatttgatcaaacagagtctagctggagctgtaataaccctgaccctctacacccctggaaggattttgttccaggcaatgtaggctgcccaaa

SEQ ID NO: 40017 - DNA, 1313 bp, Homo sapiens
acttttgcacagctccagagaatactggattaaaaaataataataataaaaaataagacaagccatgtcaggggatataggtctagctacaaccagccatgcttcctgccccatcctccagcgagctggggaaaggcagaggtatgctaaatggcaaactccttataacaagtcagaaaaggtggttgggggcacggggaggggggagattggcttgcagcctctgggatagttgcctatttgtaatctttttctcttcctgaactccaactctccttctgtgtctcattgtgtctgtctctgcctgtctgtcagtttgcctcctttttcaaaaaaatctgaataaaacagagcaaactgtcttcctttcctatctgagagcagagaataaagcagtcacatgtcaagggcacattttcaggttttattttcgtcagcaatattctccccccataattgctatagaaacaccaaatccccttccatccttttgtgtgtgctgacagaatccactttaacttaccctcagatgaacctcactcatgctsgatgccggctgcagcacacgccagcactcaaggatatgcaagagtaggttgaaaaacacctgtcctttagatgctgaatgtgttctccttccccaatctgactccttctcatctaacttaagatgtggcaccggggtgctgcctgcatggcagcgttgacaacagaggcggttcttgggaaagagagcagctcagccaggaaaggagggggcgctcgctggcaggcttctggatgtgcaacatgcctgtgcacccacagaatgttccgagtctgatgcagaggtcctggagctctgcacagccaaaaggagaaaggaagggcttatatcatcgaagctagaagccaatctcctcatgtacttgcctatctggctgcacgagtgctgtctgagggctacgtgaaacagtaacaagtccctgtaggtccagctgcaccatttctggcataaatgtcttcagctcctggaaggaagcaaggccaaaggaagctgcacatgtcttggatgagctaaggacctgctgctaatccttgccagggtctctggcacccaggaaagagctttgggagaatacgggaacagggacaggttggttgttgcacccacagtgagataacacagaggctcttaatgcagagaggccaaagcctttcctaaatgcctttgcagacggatttgatcaaacagagtctagctggagctgtaataaccctgaccctctacacccctggaaggattttgttccaggcaatgtaggctgcccaaa

SEQ ID NO: 40018 - DNA, 690 bp, Homo sapiens
gtggctrttcccaagcccaagggcagggaaaaagcttttctgagttttcagtcctcaggagaaatctccatccctgtcactcaggaggggattttcctttgtcacatccaggaaaaccccacaagctctgagccctcagttgatttgcaccctagtcccagatggagaaaacaaccccaagcacccgtctgatcgcatttgtgacagtaattatccaggcattggacaccaagtcattaccagtgaatgaattattactagaaacagttagtgtccaataatgaagttaatgggagataatatgacagtcattagactgacatggctctcttcattgttgaagaaagaggaacagtcatcaaaagctggcaacaggcaggcaggattaatctatgtcaggcagtgtttacgatacgtctcctggactctcttcttgtggcagggccatgattagagggttagtgtttcctgttggaagtcagcatcagctgttcagaagagagcccactgtgctgcaataaaactgtcagtcttgcagctccctgaccataggatgcccttgcacatggttatgttttcgcacgctctgttccctctgtctgaaatgtcccttttctttcacctgtaaaattcctacacttccttccatccctaactcaagtgttacttccagggtaaaatcttctacaa

SEQ ID NO: 40019 - DNA, 602 bp, Homo sapiens
gcatgtataaccaaaagtgaatggctacataatcatggtacatcctaaactattaggaacaactaaaaacaatcggttataaaaaatccatcagtggctgccctttatataagtgtggagtattggttttgtgtgtgtatacatgtgtgttttaatgactgtacattagttataaatctttttataaaatatggagtgttgtttgtgtatcgtgtgtatatgtgttacakgttataagtatgtatatatgttatatgttataagttatatgtccataactttttatccaagtttgcctttttgctctccagattagctttactttcaaggagtgaattattctacgctgtacatgttcgtctctgtttgattaagcatagagcaacttgtggaataatatatatcaaatcgttaatgttgcttacttctggtagaggaatttcacaggtttgtaaaaaaggttttactttttttctaaaaccatctcttaactctaatttgtcgtgaaaagcaagtgttacattggcaaatttataaaataaaaagtttaagacctcaagaagcaaatggaaaaaaaaacaaaaaaccaaaaaactgttccc

SEQ ID NO: 40020 - DNA, 1898 bp, Homo sapiens
  misc_feature (1)...(1898): n = A,T,C or G
catgtgtttgtacgtgtgtgcacgtgtgtgtgtgtgcatgtgcgtgtgcctgtgcatgtgtgtgtgaaagctggcttaaaaatcaaagttcacaaatgtgggccccagctaacaagtctgacatcaagggtctgattgctggaggttcattagtgcctcttactgaatggggttgggcagcgggcttgttttccatgggcacgagagagttaagaaagaaactgccaacaagtttttcagccaaccagattataatcagcwggctccacctgaacctggtgcccatacagtcatttcagttaacacctggaagtctccagaagttggtgggaagcagatgaaaagattcagagttggggaaaacatgttaaggggctgggccttgagctcacaaatagacttgggttgcagccctgtgagatgaagaaaacccatgtgtgatgaaatacaggagtgcgccctggaggtataactcacactgacaaatatagacattctatggcctacagatcctcctaaccaggggagaaggcagggacctttccaggcatcttggatgtttctgcgtctcagggaagtttctctggtggccccccttagggatccctctgcgctcttgtcttccttccttccctttgctgtctcctggcctcccttcaggcacatatttactcagtacaagttttcctgcccagcacaagatgccctcttgctccctctccacgccctgttaaaacccacccccagaaatggatctaatgtcagccatttcttcctggctcatctcgagcccagtcacatccagtcagaagaggtgtctatctaacataacatgctcctaggacggtgacaagggggtgttnnnnnnnnnnnnnnnnnnnnnnnnnnnnnnnnnnnnnnnnnnnnnnnnnnnnnnnnnnnnnnnnnnnnnnnnnnnnnnnnnnnnnnnnnnnnnnnnnnnnaacaccactgtgaacacaggtcagccctcaggggatgctttgcaacccaaggaatgcccagcattgctgcagcatcaggagcccagagagaggcccagcacagaggatccctcagggcctctggaaggaacagaccagcaaacacctggatcaagacttctggcctcaagaacagtgagaggatacattaccattactttaagccacacagtttgaggtgatttgttacggcagccttaggggttagaactgtgaataaatgttagtagctcttattaaattatctatactataaaatgaaacaatactgctagacactagttagggaagttatcggtggtatttaatgtatcttacattggtagtagtggggaccccacaattatttcccacttctcattccttattcgatggagacatttcaggattttcctctccatcccttccagtgagatgcctgtgtcattattttcctttgtggcccataatgccaagggggaggtgtttttctcctgggtctgcttgatgtggagcaacccccctggggtcccccactccccacacacaaggccgcacgcccgaagagcaggatggttttcaggtctgggttaaccctgccccttggattgctctcaaatcctcgctggaaattgacaccacatctttgttgtgtactttatctccatttctcttcccaaaccccagtctcctcttttctgtctgtcctgaacagcgctggccaggagggaacatgggtcagaagggcaggcagggaggagctggtacaaatcacggcaccaagaccctggtttttggtgtactgatgcaaattctgccaaagagttttcaccagtctgcctgggggcctaaaaacatcttcatcagggccttaaaccagagcctttcattggtccagaatcccaataggagaggtgc

SEQ ID NO: 40021 - DNA, 1898 bp, Homo sapiens
  misc_feature (1)...(1898): n = A,T,C or G
catgtgtttgtacgtgtgtgcacgtgtgtgtgtgtgcatgtgcgtgtgcctgtgcatgtgtgtgtgaaagctggcttaaaaatcaaagttcacaaatgtgggccccagctaacaagtctgacatcaagggtctgattgctggaggttcattagtgcctcttactgaatggggttgggcagcgggcttgttttccatgggcacgagagagttaagaaagaaactgccaacaagtttttcagccaaccagattataatcagctggctccacctgaacctggtgcccatacagtcatttcagttaacacctggaagtctccagaagttggtgggaagcagatgaaaagattcagagttggggaaaacatgttaaggggctgggccttgagctcacaaatagacttgggttgcagccctgtgagatgaagaaaacccatgtgtgatgaaatacaggagtgcgcccwggaggtataactcacactgacaaatatagacattctatggcctacagatcctcctaaccaggggagaaggcagggacctttccaggcatcttggatgtttctgcgtctcagggaagtttctctggtggccccccttagggatccctctgcgctcttgtcttccttccttccctttgctgtctcctggcctcccttcaggcacatatttactcagtacaagttttcctgcccagcacaagatgccctcttgctccctctccacgccctgttaaaacccacccccagaaatggatctaatgtcagccatttcttcctggctcatctcgagcccagtcacatccagtcagaagaggtgtctatctaacataacatgctcctaggacggtgacaagggggtgttnnnnnnnnnnnnnnnnnnnnnnnnnnnnnnnnnnnnnnnnnnnnnnnnnnnnnnnnnnnnnnnnnnnnnnnnnnnnnnnnnnnnnnnnnnnnnnnnnnnnaacaccactgtgaacacaggtcagccctcaggggatgctttgcaacccaaggaatgcccagcattgctgcagcatcaggagcccagagagaggcccagcacagaggatccctcagggcctctggaaggaacagaccagcaaacacctggatcaagacttctggcctcaagaacagtgagaggatacattaccattactttaagccacacagtttgaggtgatttgttacggcagccttaggggttagaactgtgaataaatgttagtagctcttattaaattatctatactataaaatgaaacaatactgctagacactagttagggaagttatcggtggtatttaatgtatcttacattggtagtagtggggaccccacaattatttcccacttctcattccttattcgatggagacatttcaggattttcctctccatcccttccagtgagatgcctgtgtcattattttcctttgtggcccataatgccaagggggaggtgtttttctcctgggtctgcttgatgtggagcaacccccctggggtcccccactccccacacacaaggccgcacgcccgaagagcaggatggttttcaggtctgggttaaccctgccccttggattgctctcaaatcctcgctggaaattgacaccacatctttgttgtgtactttatctccatttctcttcccaaaccccagtctcctcttttctgtctgtcctgaacagcgctggccaggagggaacatgggtcagaagggcaggcagggaggagctggtacaaatcacggcaccaagaccctggtttttggtgtactgatgcaaattctgccaaagagttttcaccagtctgcctgggggcctaaaaacatcttcatcagggccttaaaccagagcctttcattggtccagaatcccaataggagaggtgc

SEQ ID NO: 40022 - DNA, 623 bp, Homo sapiens
ttcctctcagctcacattactagacaatatcactgtattactgcagttactgacatctgctgacttctatccagggttcatcccatgacccctgccccgcagagataacgtgggccagaaaaggtaaactgggagggagttgacggtgatcctagtggggctggttcttgggaaaggaggttctgaagcaggggaaggggttaagaagggatatcactctgtgggagtagcaaatctctccactggcttcctcrcatgttaataaaagctccattcttcaaggctgcttcacatacactatctgataggtacttccccagcccatgaaccaagcaggttatgaatacatcctagtgtcataagaggatggcaggagggggattttcctttaaagtcctatggaaaccgaagtccttggtcaacagttttaaacccttctaaggagaaactctggaggccaaagtgctgcaaatgttaaaaccatcctatgtgaacctttctaacttagcctgtccatgtgggaggtgagtcttaagggtcaacatacagaaagccctgggcaggcctgggacaggatggctcagggtaaaattgtgccaagaacctggtacacagaacagtgg

SEQ ID NO: 40023 - DNA, 1173 bp, Homo sapiens
tgcatgtggtcctggttcaatcattttaactgttgtatgacattatgtgagtacactacaagttactcatttattttttggttagtggattcttggctccttcctctcccccaccactataaaaggtttttttttttttttttttcctatgacaaatagtgctgcagtaaatactctttggctttaccagttactttgggaactcgtgggagtcttttccgtatattcttagaaatggaaatgctgaaaactagaacatgaacatctctagtgttactaaatattgccaaattccgctgtaaattaaaccatgctcttccatggacagggtgtaagaattcctatgtctctacatcctcaccaactcttgatgttgtcatttttaatttttgcccatctagtgcaaagcatgttatgggccttggacatttctccaccttggcttcctgcctgtagcatctggggagaaggttcctgccaggcatgatcggaatgaaaagatctccttgttttactttgcacttccctgmttactaatgaggtcaaacattttttatatgcttagaagccattcgtattttgtcttttgtgacctttcaatgtataccctttaccttccattttattgagtcatgttctcactgaattgtggatataacttttgtatattccagatgctaatttttaaaatgtatctagtctcactctgtgatttgcattttactttgtttgcagtagcttttgttttctagatgattttaattttaatgtcttcagattaccatattttctttgtcatttgtgtttccaaaagcaattctctaccaagaggtcataaaggtagtcttcctatattttctcttaaatgcgttttttttttttttttttttttttttcttttgagacggagtttcacactgttgcccaggctggagtgcagtggcgcgatctcggctcactgcaagctccgcctccggtttcacgccattctcctgcctcagcctcccgagtaactgggactacaggcacccgccaccacgcccggctaattttttgtatttttagtagagagggggtttcactgtgttagccaggatggtctcgatctcctgacctcgtgatccgcccgcctcagcctctcaaagtgctgggattacaggcgtgagccacagt

SEQ ID NO: 40024 - DNA, 1173 bp, Homo sapiens
tgcatgtggtcctggttcaatcattttaactgttgtatgacattatgtgagtacactacaagttactcatttattttttggttagtggattcttggctccttcctctcccccaccactataaaaggtttttttttttttttttttcctatgacaaatagtgctgcagtaaatactctttggctttaccagttactttgggaactcgtgggagtcttttccgtatattcttagaaatggaaatgctgaaaactagaacatgaacatctctagtgttactaaatattgccaaattccgctgtaaattaaaccatgctcttccatggacagggtgtaagaattcctatgtctctacatcctcaccaactcttgatgttgtcatttttaatttttgcccatctagtgcaaagcatgttatgggccttggacatttctccaccttggcttcctgcctgtagcatctggggagaaggttcctgccaggcatgatcggaatgaaaagatctccttgttttactttgcacttccctgattactaatgaggtcaaacattttttatatgcttagaagccattcgtattttgtcttttgtgacctttcaatgtataccctttaccttccattttattgagtcatgttctcactgaattgtggatataacttttgtatattccagatgctaatttttaaaatgtatctagtctcactctgtgatttgcattttactttgtttgcagtagcttttgttttctagatgattttaattttaatgtcttcagattaccatattttctttgtcatttgtgtttccaaaagcaattctctaccaagargtcataaaggtagtcttcctatattttctcttaaatgcgttttttttttttttttttttttttttcttttgagacggagtttcacactgttgcccaggctggagtgcagtggcgcgatctcggctcactgcaagctccgcctccggtttcacgccattctcctgcctcagcctcccgagtaactgggactacaggcacccgccaccacgcccggctaattttttgtatttttagtagagagggggtttcactgtgttagccaggatggtctcgatctcctgacctcgtgatccgcccgcctcagcctctcaaagtgctgggattacaggcgtgagccacagt

SEQ ID NO: 40025 - DNA, 1315 bp, Homo sapiens
gctcttgtccatcctctggtctcawcttaaatatcctctgcaagatccttcctgaccccatctccataaaacaacgccccccctccattattctctaccccatcctcttcttttctttcatggaattgatcacaatccatatttgccttgattatttatttgtgtacttgttcgtggtttgtcatgccctctagaatggatgatgcagggaccttctctggtgctatggcctgaattgtgtcctttctccccccaaattcatatgttgatgctataactcccaacatgatcatatgtggcctctaagaaagtaattaagttaatacaggtgaggccttgatctgatagggtaagtgtccttataagaaggttagccagaggactcgttctctttgttgtatgaggacacagttgagacgatggaacctgggagacggccctgaccaggaacctgaccaggccggctccctgatctcaaacttccagccttgacaacggtgagaaaataaatgtctgttgtttaaaccacccagcctgtggctttagttatagcagcccaagctgactaatacatctggctttccccctctgaatctatgggatctacagtgctaggcagtatctactagatgaatgaaggaacacaccaaagctacagatgctcaaaggactccccctatgcccacaacagacttgcaataaggctgtgatgttctaaaaaccaaaagatacatccctcttggctcatgggcctaaattctttcctccttctcatgcataaactctaatattcagaaaatccagaccccagcaaaaatgtaagcatttgcagagaggacttttaattatgaccaaatcaagagatttctcaccttaataggtcctaattggggatcattctcagcttgtgcaaaacctgacctgaggggcagccccctggtgaatcaggtacctgctgcctgctctaactgaagtcagtcactttgcccagttccccatggatgtgataaattgaattgagaggtgtgtgagtaaataaaagtagcataaagaacctgcataaagtagcaaataatgaaatgtctaaaaaacaaattaattttcccattttgaaagcaatataagcactttccaggagctctgaaagtagaaaaactaaaccactcataacttaagacctaccataagcctcagtaatcattcaagtgcatatttgtctttttaaaaaaaaagacatggtttttgtttgtgtttttgtccatcatttgttaagaacttactatatgcatgataacagtttatacaacactctacg

SEQ ID NO: 40026 - DNA, 724 bp, Homo sapiens
atggtaacattcccacaggaaatgggaaatcagttggtattctccctcactgtgttcaggtgctgggtccatgaacactcctcttttctrttgcttgcatcagacttatctgtgtgttaactaatgacccaaagtcatgcgaggccagggtcccctggagtatttgcaagggggccttggctccatacatactccaatgactttgtgttgagggtattgtacacatatgagtactcctctccacatgtaatttcttttttttttttttgtttttgagatggagtcttgttctgtcgcccaggccggagtgcagtggcgtgatctccgctcactgcaagctccgcctcccgggttcatgccattctcctgcctcagcctcccgagtagctgggactacaggcacccgccaccacacccggctaattttttgtatttttttagtagagatggggtttcaccatgttagccaggatggtctcgatctcctgacctcgtgatccgcccacctcggcctcccaaagtgctgggattacaggtgtgagccaccgtgcccagcctccacgtgtcatttcatgcagtgaccttacactttatgctgagcatgagatgaaaaatgcagattggtttaatcttagtgggcttggttttcagggcctcttagtatgagcatcttgcctgtgggaaacacgtgatcccagtgttgaagatacacagtattcctacg

SEQ ID NO: 40027 - DNA, 724 bp, Homo sapiens
atggtaacattcccacaggaaatgggaaatcagttggtattctccctcactgtgttcaggtgctgggtccatgaacactcctcttttctgttgcttgcatcagacttatctgtgtgttaactaatgacccaaagtcatgcgaggccagggtcccctggagtatttgcaagggggccttggctccatacatactccaatgactttgtgttgagggtattgtacacatatgagtactcctctccacatgtaatttctttttttkttttttgtttttgagatggagtcttgttctgtcgcccaggccggagtgcagtggcgtgatctccgctcactgcaagctccgcctcccgggttcatgccattctcctgcctcagcctcccgagtagctgggactacaggcacccgccaccacacccggctaattttttgtatttttttagtagagatggggtttcaccatgttagccaggatggtctcgatctcctgacctcgtgatccgcccacctcggcctcccaaagtgctgggattacaggtgtgagccaccgtgcccagcctccacgtgtcatttcatgcagtgaccttacactttatgctgagcatgagatgaaaaatgcagattggtttaatcttagtgggcttggttttcagggcctcttagtatgagcatcttgcctgtgggaaacacgtgatcccagtgttgaagatacacagtattcctacg

SEQ ID NO: 40028 - DNA, 1103 bp, Homo sapiens
tgcaatttactttaaaatcctgcagtacagggagcgtgatgatttgtatatgtcaattggcttaaactacactcgaggggcagtccgcggtcctgaccaggaatctacattctgagagtggactccagcatttaatcagaaaggccacactcctgaggctgttcccagaagggcgtcttcatctttctttaccactgaactttgatcatcactagagactttgctaattagctcaaagaaagttccaaatgggttttcattggtgaaaaaaaagggctcgttatttagcataatggatataataagtgagttctcactggtgagtattcaagatgagaggtttggctaagatattttcccgaagctcctcatccttgcctgaaggggatctgaacagcttgcagacgctgtccccttctcccacagggatggtacttgagacttgatcccccaaacattcgttcattcagctgatagtttggaggatttgggttgcctgatgatcattgtgagattagctctctcctgcctcttgagtgctgtcataactgcctggggtgagtggtccatgtgaggtgtggtcaggacacctacaaggacaggcagctgggattttgttgatcttaaacatcaagttttagagcctagtgtctgcttactaataagtgtctgcatatggcacagggtttggtctgagaagtgcttttattataacctggtagcaaagttgcaggagagtagctaattatcaacctcctccaactactgatggacatgaacgtcagtaactaccacgaagaactaaatatgtgcacatggtgagaytggcttatgttagtttacactccctggcaaaagtactaccttttgcacaaatgggagggattttgttttccactttatgtaagatccgtttaagtaacaacctggacaaccaaatccctagcaaattacatcttacttagtgaagaggcacaactttcatctttaatataagcctcgattccccatgaaatctgaagccatcttttcatcttacacatcaccttggggtcagagaaggaacacaccactccaggcctgtctcccaggatcctaggact

SEQ ID NO: 40029 - DNA, 539 bp, Homo sapiens
cagtttctgaaatgtgccattgaccccctggctacaggacctttccttgttcccatatttgccttaacttttccttctcattatgaggatctcaggccaatagtctcttcctcaaaaaagcctttcttcaccctacgaggtgctcttatggcagtgggtcttcctcactgaaaacagtaatcacgggtaaatgactcaagatggccgaataggaacaactctggtctgcagctcccagtgagatcaatccagaaggtgggtgatttctgcatttccaactgaggtacctggctcatcttattgggactggtcagacagtgggygcagcccacagaggatgaacagaagccaagggagccgtgagggactgtgccgtgaggcatggtgcactctggcccagatattatgcttttcccatggtcttcacaacccacagaccaggagattctctcgggtgcctacaccaccagggccctgggtttcaagcacaaaactgggcagccatttgggcagacactgagctagctgcagtttttttc

SEQ ID NO: 40030 - DNA, 1186 bp, Homo sapiens
ttgcagaattatattgtcatttagtatcacccttcagatcagtcagtgtctacacaaacatttctgtgacaaagtaaaaaaccttatttgtttgtttatttatttattccttttttaagacagagtctcgctctgttgccctcccgagttcaagggattctcctgcctcagcctcctgagtagctgggattacaggcacgtgccaccacgcccggctaattttttgtatttttagtagagacaaggtttcactgttttagccaggatggtctcgatctcctgacctcgtgatctgcctgccttagcctcccaaagtgctgggattacaggmgtgagccactgtgaccggcctatttattaaaatttaattacaattaatttgtgcttttaaaggctctttatctgtgaaaaatttttttgtatcctgaaatttcctaaaataatgaacttttgtattgtttatttaaaaacaagaacctttgacatagcttaagagttaacattaatttctcttagtattcttgtgttcagcattgttgcagtagctatggaaataaaaagaaatataatttaacaaacatgtaaaaaatacccatgtatgctgggctggcccagtgaagataaaaagagtttgttaagatgaaaaaagacacagataaataattgcaaggtagttggagaaacagggaatacatatatatattaggtattgaaatgataaattgaatattatagacaaaataaattttactgttctttcattcaacagtggcctatttaattcacatagtactttagtaaattcctttaactcagtgttctgtgttatatattgattgccatataaagctacttagttctttttcatccattgttttctttttatttatttatttattttgtattattattataaaaacatggaacgcttcacaaacttgcgtgtcatccttgcgcagggccatgctaatcttctctgtatcgttccaattttagtatatgtgctgccgaagcgagcacttcatccgttatttatttaaggaatatgattgttaacaaaaggactgtgtattttcattatactttgtcttttttccatgggactgtcacagagtatgtttataatgagtggcatatagaattaaacttatattaccgtatatttatattcctagaagttgatgca

SEQ ID NO: 40031 - DNA, 1186 bp, Homo sapiens
ttgcagaattatattgtcatttagtatcacccttcagatcagtcagtgtctacacaaacatttctgtgacaaagtaaaaaaccttatttgtttgtttatttatttattccttttttaagacagagtctcgctctgttgccctcccgagttcaagggattctcctgcctcagcctcctgagtagctgggattacaggcacgtgccaccacgcccggctaattttttgtatttttagtagagacaaggtttcactgttttagccaggatggtctcgatctcctgacctcgtgatctgcctgccttagcctcccaaagtgctgggattacaggagtgagccactgtgaccggcctatttattaaaatttaattacaattaatttgtgcttttaaaggctctttatctgtgaaaaatttttttgtatcctgaaatttcctaaaataatgaacttttgtattgtttatttaaaaacaagaacctttgacatagcttaagagttaacattaatttctcttagtattcttgtgttcagcattgttgcagtagctatggaaataaaaagaaatataatttaacaaacatgtaaaaaatacccatgtatgctgggctggcccagtgaagataaaaagagtttgttaagatgaaaaaagacacagataaataattgcaaggtagttggagaaacagggaatacatatatatattaggtattgaaatgataaattgaatattatagacaaaataaattttactgttctttcattcaacagtggcctatttaattcacatagtactttagtaaattcctttaactcagtgttctgtgttatatattgattgccatataaagctacttagttctttttcatccattkttttctttttatttatttatttattttgtattattattataaaaacatggaacgcttcacaaacttgcgtgtcatccttgcgcagggccatgctaatcttctctgtatcgttccaattttagtatatgtgctgccgaagcgagcacttcatccgttatttatttaaggaatatgattgttaacaaaaggactgtgtattttcattatactttgtcttttttccatgggactgtcacagagtatgtttataatgagtggcatatagaattaaacttatattaccgtatatttatattcctagaagttgatgca

SEQ ID NO: 40032 - DNA, 1186 bp, Homo sapiens
ttgcagaattatattgtcatttagtatcacccttcagatcagtcagtgtctacacaaacatttctgtgacaaagtaaaaaaccttatttgtttgtttatttatttattccttttttaagacagagtctcgctctgttgccctcccgagttcaagggattctcctgcctcagcctcctgagtagctgggattacaggcacgtgccaccacgcccggctaattttttgtatttttagtagagacaaggtttcactgttttagccaggatggtctcgatctcctgacctcgtgatctgcctgccttagcctcccaaagtgctgggattacaggagtgagccactgtgaccggcctatttattaaaatttaattacaattaatttgtgcttttaaaggctctttatctgtgaaaaatttttttgtatcctgaaatttcctaaaataatgaacttttgtattgtttatttaaaaacaagaacctttgacatagcttaagagttaacattaatttctcttagtattcttgtgttcagcattgttgcagtagctatggaaataaaaagaaatataatttaacaaacatgtaaaaaatacccatgtatgctgggctggcccagtgaagataaaaagagtttgttaagatgaaaaaagacacagataaataattgcaaggtagttggagaaacagggaatacatatatatattaggtattgaaatgataaattgaatattatagacaaaataaattttactgttctttcattcaacagtggcctatttaattcacatagtactttagtaaattcctttaactcagtgttctgtgttatatattgattgccatataaagctacttagttctttttcatccattgttttctttttatttatttatttattttgtawtattattataaaaacatggaacgcttcacaaacttgcgtgtcatccttgcgcagggccatgctaatcttctctgtatcgttccaattttagtatatgtgctgccgaagcgagcacttcatccgttatttatttaaggaatatgattgttaacaaaaggactgtgtattttcattatactttgtcttttttccatgggactgtcacagagtatgtttataatgagtggcatatagaattaaacttatattaccgtatatttatattcctagaagttgatgca

SEQ ID NO: 40033 - DNA, 1186 bp, Homo sapiens
ttgcagaattatattgtcatttagtatcacccttcagatcagtcagtgtctacacaaacatttctgtgacaaagtaaaaaaccttatttgtttgtttatttatttattccttttttaagacagagtctcgctctgttgccctcccgagttcaagggattctcctgcctcagcctcctgagtagctgggattacaggcacgtgccaccacgcccggctaattttttgtatttttagtagagacaaggtttcactgttttagccaggatggtctcgatctcctgacctcgtgatctgcctgccttagcctcccaaagtgctgggattacaggagtgagccactgtgaccggcctatttattaaaatttaattacaattaatttgtgcttttaaaggctctttatctgtgaaaaatttttttgtatcctgaaatttcctaaaataatgaacttttgtattgtttatttaaaaacaagaacctttgacatagcttaagagttaacattaatttctcttagtattcttgtgttcagcattgttgcagtagctatggaaataaaaagaaatataatttaacaaacatgtaaaaaatacccatgtatgctgggctggcccagtgaagataaaaagagtttgttaagatgaaaaaagacacagataaataattgcaaggtagttggagaaacagggaatacatatatatattaggtattgaaatgataaattgaatattatagacaaaataaattttactgttctttcattcaacagtggcctatttaattcacatagtactttagtaaattcctttaactcagtgttctgtgttatatattgattgccatataaagctacttagttctttttcatccattgttttctttttatttatttatttattttgtattattattataaaaacatggaacgcttcacaaacttgcgtgtcatccttgcgcagggccatgctaatcttctctgtatcgttccaattttagtatatgtgctgccgaagcgagcacttcatycgttatttatttaaggaatatgattgttaacaaaaggactgtgtattttcattatactttgtcttttttccatgggactgtcacagagtatgtttataatgagtggcatatagaattaaacttatattaccgtatatttatattcctagaagttgatgca

SEQ ID NO: 40034 - DNA, 1243 bp, Homo sapiens
cattacttcgggaagagcaggcacaaatgctattgaatgaacaggcacaacaactacaggaattgaattataracttgaattgcactccagtgaggaagctgacaaaaaccaaactcttggagaagctgttaaggtaagagaataaagggatatttgcataaagggatattttatctatgtgtggatcttagagggaattatgatatctcctgaataggaatagatcccaagatgtaaaattttattctatgaggatagaatgaaacatgtttctgagacctcagttataagcctgcattcacatgcatcgagaaggtaaaagtaggctttacttgctggttgaaaacgaagtgaaggtcttttccagtaataataacaattattattaacaataaaattaacaataaatttttgtttcttttatcttctttatttcttcctctctttagaattttccttttcttgttttgtacccaatggactttggaaactccacacatcttttggattctggaaggttttggtctgggtctgattcttatataagtacatatttggggagaagggaggtttggttagaaagagttgttctctctgtcatatatttgtggtaaaggtatttcaaaggaaaaagagaagctatcatttaaaagttgtcactgagaaaatttcattaatgggtttaaatgttgcctacaaagtataatagaattctagtttttgattataaaacttgtggatttttcactagtgagattatatacgttggaatggaactaaatccagggaaacaaaaatgatatagccactatataggatatcatacttaatacagttaatcaactcagagttggtattaacttatacaaataatatctatttattctgatatcttaataatactattatgatcaatgataaaatagccaaaatttattgttaacttcctgtttaccaggcactatgctaactactttaaaacacttatgtactcctcacacaaactgtatgggattataaaacacttaggtactcctcacacaaactgtatgggattataaaacacttaggtactcctcacacaaactgtatgggattattcctgttttataaatgagaaaacagatacagagaggtgacataacttacacatttcttagtaagtaatatatctagggagtcagatttcacatctgtcttcctaaccaccacatcatatgttccactgattgacagcatgca

SEQ ID NO: 40035 - DNA, 1243 bp, Homo sapiens
cattacttcgggaagagcaggcacaaatgctattgaatgaacaggcacaacaactacaggaattgaattataaacttgaattgcactccagtgaggaagctgacaaaaaccaaactcttggagaagctgttaaggtaagagaataaagggatatttgcataaagggatattttatctatgtgtggatcttagagggaattatgatatctcctgaataggaatagatcccaagatgtaaaattttattctatgaggatagaatgaaacatgtttctgagacctcagttataagcctgcattcacatgyatcgagaaggtaaaagtaggctttacttgctggttgaaaacgaagtgaaggtcttttccagtaataataacaattattattaacaataaaattaacaataaatttttgtttcttttatcttctttatttcttcctctctttagaattttccttttcttgttttgtacccaatggactttggaaactccacacatcttttggattctggaaggttttggtctgggtctgattcttatataagtacatatttggggagaagggaggtttggttagaaagagttgttctctctgtcatatatttgtggtaaaggtatttcaaaggaaaaagagaagctatcatttaaaagttgtcactgagaaaatttcattaatgggtttaaatgttgcctacaaagtataatagaattctagtttttgattataaaacttgtggatttttcactagtgagattatatacgttggaatggaactaaatccagggaaacaaaaatgatatagccactatataggatatcatacttaatacagttaatcaactcagagttggtattaacttatacaaataatatctatttattctgatatcttaataatactattatgatcaatgataaaatagccaaaatttattgttaacttcctgtttaccaggcactatgctaactactttaaaacacttatgtactcctcacacaaactgtatgggattataaaacacttaggtactcctcacacaaactgtatgggattataaaacacttaggtactcctcacacaaactgtatgggattattcctgttttataaatgagaaaacagatacagagaggtgacataacttacacatttcttagtaagtaatatatctagggagtcagatttcacatctgtcttcctaaccaccacatcatatgttccactgattgacagcatgca

SEQ ID NO: 40036 - DNA, 1245 bp, Homo sapiens
ttaaaacttgtacctttggccaggtacgccgtggctcacgcctgcaatcccagcactttgggaggccgaggcgggcgaatcacctgcggtcaggagttcaagaccagcctggccaacatggtgaaatcccaactctactaaaaatacaaaaaaaaaaaaaattagccaggtgtggtggagggcacctgtaatcccagctactcgggaggctgaggcaggagaatcacctgaacccgagaggcggaggatgcagtgagccaagaacgcaccattgcactccagcttgggcgacaagagtgaaagtccgcctcaggaaagaaaaaaaaaaaaaaacttgtacctttaacactaggataaaaacaaatgaaatcgattgatggtaacacatctatacagcttttttacaactttgagaggccctaacatagacaacacgttactaagattagaagacctagattataatcctagctatcactattttgacggaaaatatgaattttaacatgacaatgaaataacagtgaaaggagtttgtcagccactccttggctggtaacatctaccatagcctatcactacaaaaacttgcaaatctatgtagagtagctgcagctacctgaaggcactgttcattgtaaacaccattaacaatttgatgtcccaatttgcatgttttgggggtggggggagacaaggtctcactgttgtccaggatggagtgcagtggcaggatcatggctcactgcagcctcaacctcccaagctcaagcgatcttcccacttcagcttctccaacagctggactacaggtgtgagccaccatgcctggctaattttttgattttttggtagagatgaggtctctctatgttgcccaggctggtgaactcctgggctcctaaactcacctaggcctcccaaagtgctgggattacaggaatgagccacctcacccagcctgcacgtattttagaactacattttaagataatgtgaagactgcttcataaaaacascttaaatatatacttgtcaaaacttgtgcttacttatggaaattgcattaaattcaataaattctttaaatctcacttttaaaaatggcaatcttcccgaacattaaaccaaattacatttctccctgaatttgctgccacttaatttcagctactcttctacagaatagtacccatgttatctttttttctgtctggttcctactcaaaaagaggggaactgctt

SEQ ID NO: 40037 - DNA, 795 bp, Homo sapiens
gggagtctgggggtcctgggtcgcggcgagccccgcaaaggaggaggaagccgcgcgtgcggggcgtgcccagcctctgggtgtggagcagatgacgcccctaccccggcctcgcgcktgggacttgatcccgggccgtggtgaggaggccctcgcggcttccctgcagccctgctttctcgtgcttgttaaatcccaaaacgggcggagaagggaaagcctgatctaaggcaaaagaggtgcagctggttccgcgcagtgccttaggagagcccagggaacagttgcgagagacagtcctgtggggtccaactgaggagaaggttgatgaggatggagcctttactgcttttatgtttgtgaatagagtggccgctccctttgggaacccagggccacatcccttaaattaaacgttaggtagggctgactcagtcaagcagtgttcagagctgctgactatatattaactcgtttaatttctgcaacagcctcatgaagtgcatggggaaacaaaggcacacaaggctcgaaagcaccccgtggttgtgcagctgacaagctaacaggcagcagaggtgggctttgaacccaggcagcctggctccagcaaacctgcttctaaccattagctatactgcttctcacgcatctgggatgccccccactctccaatccttttaaacaagtcctattattcttacgcgaaaatacctctcataaattcccagcattccaatattgaaaatcattctgggtcatgcttttctcatctattaactatgcttccatttt

SEQ ID NO: 40038 - DNA, 758 bp, Homo sapiens
catattagccaggctggtctcaaaccctgacctcaagtgatccacccaccttggcctcccaaagtgcagagattacaggcatgagccacctgcttttaacttgttcagctacaaaggcatgtctgtgaatgcacaaccataatgactcatcatgggcccagagctataacaatgataaggtaccaagcatcttacaccatgtgcgtgttgatgagaatcaacatccttgcctgttcttgtgattttgtggcagagtatagcttcttgggggcaagtatgtattctacaccactaggagcaagcttctttatcatacacttctgggcttctctggggaagccaaactctaaaggccttttctgaggagtgtcgcaaatgctgcctgcagtacgaggcacattgccagttcctgactgcattagcaggttccagctgccaggacgcctctgagtgtgtaccttgtgacagaaaggtacttctcagctgtagtaaaggatgctctcaagggtactctgcaaagcttctgactgcgaggcacttctcagtaaaaagctttgtttttcagacctttttattttgtgggyttggtcttttctgttttaccttctcgttgctgtaattctgatggatgaaaggtacattttgcagaactgaacttcctgcctgaaaggagcctttacatggggattagccatcagtaggcatccggtcttagagggtcctatgagtgctccattgggcccgtcggccacttccct

SEQ ID NO: 40039 - DNA, 2501 bp, Homo sapiens
ctggagattgggagtgggctgaaagtcccaacagtctaattctgcctcggtctttctggtgactagttcccatcctgaaaacaccttaggactgccagcccagtcatatcattagtatacaaaaagacatttattacttgggagattccagggattttaagaattctatgccatgaaatgggaggaaaaccaaatatatatatttcacgatctcacatcccccaatacaaataattgtttcagtatgtgtttgccacttcggaacttctttagtgatttgttttgataatacaataaaaatttttagtcatcactttgtatttaactcctttgtatgtttagatcccaggtgcacacttaaacggacatgcatgtatgcatatacaaagtctagagaataaaataaaatgaaaatgaaaattaactcaaagtaattttgccctcagctgtgaatattgccttttcccttattacaccacttggaatgtgcaccagcagaggccgttctttggactcatcccattttctgggcttcatattttaaatgctagttaatttttcccacatttgttgccacaagataataaattattaatgtatttactgagattttactcgtttaggtactgtgttagggatacaacagtgaacagggtagacatatttctgacctccgagtgataaaacttttgtgttggagtgaggatgataatttgatatgctgtattcctgggtgtaaaggtttgcaggagtacatagaataaccaaccaaggctttgtgggaggatggggagagcatctcagtagctgtggttcttttcactttatcctggtgcagcctgtcagaaggtttcagttgcgagtccctcgctttagggagggcagtctggaagaatctgtggagtttggggaggtgggaagaagggagatgctttaagaaactgggtggtaattcagttcagttggtggttttctgcacagtttcatgacagggatagaaacttgagcagaagttaaagctgtatttgcaagtttctgccttgggcacctgagtcaatgatatgtccttcaataagagagattggttatcagttcgtatttgttttaaatgagaagtagggaattgattttgagaactctgcaggatcataaggtgttcactgggcattcacttagataattttgtgctgaaactgagcatatggttgtgaacagaagccatgagaaactgggagcacaggagcataactcaaggagacaasgaggtagactcctttgcacacataccgtggcctgtcaccaggatcaacgctgtctgtggatccatgcatacctgtgggttgcaccacactggcgctgggcttctcttcagcagggctgttccctcttcccaccagtggagttgtgtgcttaccaaagccaggtcagcttccaaacttgttcatcgatcatactcattcgtgcagctgtgtgatttaattaatataaattgatcaaaatagtgtaaaagcagttactcatttgaaaactttggagtatctcaaaaacaaatcacagagaaactgctgatgaattagatatgaaaataaggataaaaactgaagaagagtcatagaagcattgtactattcagagggttttcctgtctctcagctgcactttaaaaaacaatgaagatctttgttgatgcattatggatatagtttatgtgggaaagaaataatatctaattgaccaagtctcagaaaaaggcccgtgtgaatgaagatgtataaaatagctaaagatttatgtattcatctttatgattgcccatttgatttactatttcttttgattgcacagggcaagagagcttttgccctacttagtgcagaagagcattcccaagaggctgagaaagcaggtgacgaagtggaagagggtagagtgggcttcaagggaaaggctggtctgttccactgtgctgtgagaggtcctccctgtccaccagcaagcaggaggctggttcttgtagaaggaaagttttctgggaggttggagatagaaacagttgagagctgcctcttcagcaggaggccaggaggacgtccagtcctgctgattctgccctccttccctgctcctcagctcctcccttgctcctcagctcctcccttgctcctcagctcctcccctccccacgttcactttcttttttttgcgacagaataagctgttgaaacagtgacagggaaggattgaacataatggaaaaaaacataattgcaaagacaggagtaaatgggatctagactgggcatggagggactaatgaagataggatcctgacttcggtcaagtgttttatgtctgctctatttagattccttgtcttgacttctgaggtgtgattttcaagagctatataggattataattgttatggaatatttccctttcactgaaatgctaagaaatacgtatatattaggaatattaaattcaagaaaggaggactt

SEQ ID NO: 40040 - DNA, 699 bp, Homo sapiens
caggaaacacctgcaggggatcaggagtgtgggagggggaaggaaaggcagccaggggctgatgcatttaaaatccagctatgacttgtgagcaaatggagcttatgcccrctgggaaagccctgggagtgcaggatgcacactgtagagttgcccttccacagggcgagggagctagggtggttactcaccaacacctgtcagtcatcagggaggggtgcttctacgtggccttaataccctaggattgcaggcccaccccgcggacaggcgcaatgcgctgcagcagtcagagatggtcctcagcagagacatgcaggcactggccattggaacttggcagaattggaaatgaagtgatcaggaggcggagagaggggtgaggcggtgcagtttagtaaacacctactgaattatgctcaatgaacttcagaggtctttgggaattgactgtttttcttttctatcactacaaagggatacacaaaagaatgaatgttattctatttaattattcacaattttgctggagaatcttaggctggttacttcagtctactattccctcccaattgcctttcctttaaaaaacaaaaagacacaaatatatcctctaattggacatctgtcacaaattggacggttgattctgattctgtggttgaacaagtgagtggtgtctccttctttccttcctct

SEQ ID NO: 40041 - DNA, 564 bp, Homo sapiens
tgttctgaagcttatagtctattggggagagatagtaaataagacggaaacaaataaatacacagtttcagagagcaatgagttctacaaatgagcagtgagccctataaacaaaatttagattaaattaaattaggataggtcagcctctttgttatagcagatgatactttttatatggtttagcaaagagtcaggaggaagtaattttaaaaagaaaacaaaaaaacctcttaccaccactttaagccactgtggtgattgagcaaacacaaagggaaagtcaaacctctgtcatttgcctggactatctggatgtgatgtaaactgggaaggtgaactttatgaaatctatgcaactaagatcagaagctgagctatgcccctcaaggagtgatatcttacaattttatcttaaacatrggtcatattgatcatttatgtcttaatttagtgatataaaattagagcctgaaagagtacctaaaaacaattgtccacacacaggacagttctgaaagaaatttatataacactattatatgcagtgtttttcaagttttc

SEQ ID NO: 40042 - DNA, 1946 bp, Homo sapiens
ttatgtttatctttaggattaagtgaggaaaagtttatgacagaaatttcaaagtgcatggtattttcccactgcatgccaaaatataatattccatctgctattggtaatacaatccaacttgtttgtaatataatagtaatttctaataaaatcaaaattttcataggtagtatagcatatactaaattttattttagaactttatgaatttacagaagcaagtcaagttgctgagagtattacattatagtatatgtaccaatggcatttggttttaatagggagatatacattatatctctcacttaaaaaaatcataagcaatttgatatgcatttttacttytgaaatagtctcacacagtttctaaatttctgctattttaagagatgaagattttttgttcttaaagacctataaagccaggaatttctgtaagttatataaaatttacaaagtcatcttaaacagggatgcatttatattatagaggcctatgaaaatgctgtcaaactaacaatcagaaggccttaagagaagaaatcaagataaagacagaacagcaatagccaactaaattttctgatgcataaaaggtaaactttaaaaatttaatcccacaatcaatggcttaactaaaaaagaaaaaaattcctggatctatgaaatgtgagataaaagaaaaaacaaaatgtgtatgtaaacttttttattactaatattcagccccaaagtagttagaaataaatgacatcttcaagtgtcctctctatatccaaaacaaaaccagggcttttcatgactattaaactggctcacagaactattataaaattagatgtcatattataatagttatttcaggataaataacaatgatctaaagcagccaaagtagtggattattttagaaagaaaatgaaagaatccatataaaattttacaacatagtattttaaaatagtgctccataaagatgcaaatcaagtgtcacttggaaggttaattgggaatgttttcttccactatcttaatatatttccttccattttaatatatttccttccattttaatatatttccttcttaaaatccatcttaatatatttccttccagtttttctaaatttcctgcacaattggtacctaattctatctatataattgggaccaaacattgtgcgtttttacatactttaaaaaagttatatacttttttaaaagtataaaagcattctgtgatatcactagaaactttaaaaaacattatattggccacatcacattctgtcttatcaaagagtataatatacttaaagtatccccaaattgttagataatttctttttccaaatatttgctattaaaaatacctacccctcattctctaccccaaattccccaaattgttcacgtcttcttgtctcttaggataagttcttagatttcactccgaagttttatatgtttctagacttggttacatactaagttacttctagaatggttttgccaatttacttctccaccggcagtttatgtattatttcaaatcctcataaccctaaaaggtaggtacttgtcaccccctcttatagatgaagaaatgggatgcagagaagtcatacaacttacccaagttaactgatggtgcagctatgtttaaaaagtttctagctaattcaaagtctgttctttctacaagccacactacttcctgattcgttataatgaatacatgtacacgggtgcacatgcctacatgtactaacatacatgtatgaacaaccatacacatgcatggatacacgtaaacacacatacaggctctcctgtcctgtttcctgccctttcactaactgccccggctcgggatgtagaattcagctctttgaacataccttgattaggtgcctatgccacgagccaaacataagggagaa

SEQ ID NO: 40043 - DNA, 617 bp, Homo sapiens
taaagtcttttggaaaaaacaataaaatatgattttwaaatacttctgtgttatcctgggagatatttttagagacagtgaaatgttgaaactataggtttggaagtcagacaaacctggactcaattccctgttctgccatttattaactgtgtgaattggggcagattgcttaattcctataaatctcagattctgcatttacaaattggagctaatggcagtgttgtgaggactacataaagtaacagatattaagtaacctgtatagctattggaatttaatactttttctctctcattttccccttttttttctaattcctccttgaacgactttctgtaaaaaatgtttgtgccatttaagtcattttgatgtcatgtataatgctagcatactatgataactttatcatgaagctaagaactaaattctccactttaactcaggagttgtggaagcctggaaaatatatctgaaaattgcattgttctcatttttcctgcgtagacattgtacgtggacatgcacctctccttaacctcgtggtctgtgaggccatcactaatttcatagagtatttacttgacaactttaaaaccttatgaaaacttaa

SEQ ID NO: 40044 - DNA, 1197 bp, Homo sapiens
catggcttgtggcaacagaaccccagtctctgcctgcactgtcctccctctgcgtgtgtctgtgtccctactttcttttaaggacaccagtcattggattaaggccaaccccatccggtgtgaacccgtcttaatgaattactaattacatttgyaatttactaattacaaagactccatttccaaatcaagtcccattctgaggttccctgtagacatgagcatttgaggaacactgttcaatgcagggctccatatcttgtaggcttagtccccagggcatggtcctgggcatgatcccagccgtcaggcctcactgaaggcaaaactgacccccagaaaataccagaagcctcctgagggtttgttgtgcacggggttctgccctaggtgttgtgagaagcgcagtgaagaagccgcgcaggttaggctccggggactccgcggtgtcggggagttcacaggcaccgtcccgcggtcacaggtggcatgttttgaggagttcgcaggcaccgtcccgtggtcacaggtggcgtgttttgaggagttcgcaggcaccgtcctgcggtcacaggtggtgtgttttgaggagttcgcaggcaccgtcctgaggtcacaggtggtgtgttttaaggagcatcacaggaagtacagttccgttcagtgtttattgagcatttactatatacacagcaatacgtatttagggaaggatgcagatatgggaaagatcagttcctggcttggaggagccactcacaggatgccctcctgttggaatgctcagggacggccatggggcagcaggatagggcggcctcccacagccacctgccatgaacacactgaccagcttggctcctgccgagaccacagcacatccctgtggaccccacggcctgattgtcttcattccacttgaggactcccagcccctgtgtccccattgatggccccttccccaggcgaagccctctggctctgggcagtgcgattctgcccctccctcccactcccctgcttgctcctcagtctccaagcttctccttccaaaattctctgtcatgtccccatggccggctctctcctgactactctcttctccctgcccacgctccctgagggcttcttcccagccagggctcgctctcccacctactagggtgcagggatggctgcccctctgtttgtcttctt

SEQ ID NO: 40045 - DNA, 1197 bp, Homo sapiens
catggcttgtggcaacagaaccccagtctctgcctgcactgtcctccctctgcgtgtgtctgtgtccctactttcttttaaggacaccagtcattggattaaggccaaccccatccggtgtgaacccgtcttaatgaattactaattacatttgtaatttactaattacaaagactccatttccaaatcaagtcccattctgaggttccctgtagacatgagcatttgaggaacactgttcaatgcagggctccatatcttgtaggcttagtccccagggcatggtcctgggcatgatcccagccgtcaggcctcactgaaggcaaaactgacccccagaaaataccagaagcctcctgagggtttgttgtgcacggggttctgccctaggtgttgtgagaagcgcagtgaagaagccgcgcaggttaggctccggggactccgcggtgtcggggagttcacaggcaccgtcccgcggtcacaggtggcatgttttgaggagttcgcaggcaccgtcccgyggtcacaggtggcgtgttttgaggagttcgcaggcaccgtcctgcggtcacaggtggtgtgttttgaggagttcgcaggcaccgtcctgaggtcacaggtggtgtgttttaaggagcatcacaggaagtacagttccgttcagtgtttattgagcatttactatatacacagcaatacgtatttagggaaggatgcagatatgggaaagatcagttcctggcttggaggagccactcacaggatgccctcctgttggaatgctcagggacggccatggggcagcaggatagggcggcctcccacagccacctgccatgaacacactgaccagcttggctcctgccgagaccacagcacatccctgtggaccccacggcctgattgtcttcattccacttgaggactcccagcccctgtgtccccattgatggccccttccccaggcgaagccctctggctctgggcagtgcgattctgcccctccctcccactcccctgcttgctcctcagtctccaagcttctccttccaaaattctctgtcatgtccccatggccggctctctcctgactactctcttctccctgcccacgctccctgagggcttcttcccagccagggctcgctctcccacctactagggtgcagggatggctgcccctctgtttgtcttctt

SEQ ID NO: 40046 - DNA, 499 bp, Homo sapiens
accccctgggttcatcctgagaccctcagcagggttagggctgatatatcaactccctgtatctgctttttttctccccctttttgagacagggtcttgctctgttgcccaggctggaatgcagtggtgtgatcatggcttactgcagcctcaacctcctgggttcaagcaatcctctcgcctcagcctcccaaatagctaggactacagacacacaccaccacaccccgcyaattttttttaaaaaaaattgtagagaggagatctcaccatgttgcccaggctggtctcgaactcctgggttccagtgatcctcctgcctcagcctcctaaaagtactgggattacaggtgtgagccaccgtgcccggctgtatctgctttaaaggacaaaaattgcacttaaccttggtactgccaatggactcataactgagtattctttttctctattttacaaaacaacccaggtatgctcaaagccccataaaaacccagtg

SEQ ID NO: 40047 - DNA, 841 bp, Homo sapiens
tgaatgagtcacaagctyattcaccaaaaaataaagtgaggaatccacagcagtactccctcagtgaaatgcacacatacccatgcatccacgtgcacatatacacacacacatatgcacaggaatggttccaagccaatcttaaatgcacatgttaaattgcacaaggaggattctcatcttcctggtatcatcctgctacgctgctgttctctctcaaccccagtggcctcatggaaggattcctgtgactaattagtagcctgagatgccaaataaatcaataaatggatagatacgtagatagatagatagctcttggtttacagatgcttcttcctgatttcctggggccagcactggtggacttatggtaaatgattgtacttcttaattcaatgctggtcctaaagagaagtaatcctgttgtctaatttgcctggaagaagtcatagattgagttaagtaataacaaaaaccagtggaccagtgggtaatgattaataatttgagcaggtagtcagaagcttagaagtaacaagaatattttggtagagggtagtggatatctttttccatctgaatgctctcagagtggaaaaatattagtgtaccatttgaatgcttatcaagagtctcttaaggttcaggatagatgataactcactctctagatgtcagtcagcctccccgcccattctcctcatacttgcataatgatctcatgaattatgtagcaatggtgatagtgaaaactactgtgttggattgaatgatggtccccaaaagatatgcccacatcctaatccccagaatctgtgaatatgaccttatttgagaa

SEQ ID NO: 40048 - DNA, 562 bp, Homo sapiens
ccttacagcagtgtcttaactttatccatgggatccttcattgaaccggaattcttaattttgacacaaacaaatttatcaatttcttttttgtgtgtgttttttttttctgtgtgtggtttttgtttttcacatttctgagtatgacctagatttatcctttgataacttcttctctcttccccattttcctccactggaggtcagctatatgtgtgtgagagggttaggtatatgtggatatatagagaaagtttaggtatacatatgtggagaggtcagataaatatgtatatatgggagagatattgggtatatattttggggaggggaggtcaggtatatgtggacatatggggaggggagaccacagctctcctggagtcaccctcttcctcttcccttctggggaggtaacggtggggastgagagggtgttcctcccttcttattattagcccctgggtactttagggtctctagtggttatttttcacagaattttaactgataactaatgaacaaatgttttccccacagaaatatctttacgccttttaca

SEQ ID NO: 40049 - DNA, 522 bp, Homo sapiens
tttttwaaaattactataattaagtacaatgaataaataataaataaagtgaagttgaatatatcttagttttaaattatcatttgcataaatgaataaggatgtttttaccatctgattgacaagaatgggggaacacttaaaagtactgagtcttttatcttggaagaatgttacagtcatgaaatatttgtgatctgactcaacctccttataacctcacacaactcagctctcttttgttcccccgatagaaaacacacttgaagcgggagacccagcacatgcagtgttcaagaggattcacaaacagcacaccctaaaccagcacatcatcccaagatggaaggcctgtaccaataagcagatttttaactggggtgggataatagaggcacagcaatttgtgccatttaattcttggtccctatacataataaagtggtctatatgctatttactgggtattttaaaaactcaaatttatccgaacaagtacatgggttatggtgaatttggaaa

SEQ ID NO: 40050 - DNA, 612 bp, Homo sapiens
tgaagttcagctagtttcagccacgagaaaggaaaaccacaccgtaggatatgacagggtggaaagaactgaagtcctgggctggccttgcaaaggagagttcacctacctaccctggtctgttagtggcaaacaaacaracaaacaaaaaaaacccataaaaacaaaaacaactatttcttttttaagtaactacaattttagatcgctttgttacaatatcttagcctgtaccacaactaataaatgaacttcagatgtatttcctcatttaagttttaaaaccaccagctatcttgagtattatctccattttgctcttctgctcaaaacactaggctacataataattaaggttttcagctcatatagagtggagaaaagatttgaatagataacccattttttaacattatattattattttttcctgaattaatttcccctttccattcccatgtagtttgctcctggatttttctctcttctgctcctaggtgtcttgctcctctgtgagttccctggttttgtcttgcatcctcaacagctctccctcgtcatttctagattcaacatttcccagaactgcagtagcaaagtgttctggtttgt

SEQ ID NO: 40051 - DNA, 612 bp, Homo sapiens
tgaagttcagctagtttcagccacgagaaaggaaaaccacaccgtaggatatgacagggtggaaagaactgaagtcctgggctggccttgcaaaggagagttcacctacctaccctggtctgttagtggcaaacaaacaaacaaacaaaaaaaacccataaaaacaaaaacaactatttcttttttaagtaactacaattttagatckctttgttacaatatcttagcctgtaccacaactaataaatgaacttcagatgtatttcctcatttaagttttaaaaccaccagctatcttgagtattatctccattttgctcttctgctcaaaacactaggctacataataattaaggttttcagctcatatagagtggagaaaagatttgaatagataacccattttttaacattatattattattttttcctgaattaatttcccctttccattcccatgtagtttgctcctggatttttctctcttctgctcctaggtgtcttgctcctctgtgagttccctggttttgtcttgcatcctcaacagctctccctcgtcatttctagattcaacatttcccagaactgcagtagcaaagtgttctggtttgt

SEQ ID NO: 40052 - DNA, 723 bp, Homo sapiens
aaactgaggactttctgggggaaattagggggatttttttcctattcctttccagttaattaagtaggagaagctggtcttaaaatcaacagcaaattaatctgagctctagtggacactggagctctgctcttggtgcttaccctcaactccttttcagaccccccctccttagagtaatcaaacaattgaaatagtgagggttgctaaccaaactatgaccgtctttaagtctgagccagtttcttatcaattagggccccttgccggccaacacagtttgttgttgtcctctctgcccaatccacytgatagtgaaagataatctgaaaaacaccaagcccacatttctttcacccacaagggagatatcatcttagaagtctccccaaccaaggtttcagcctctagtgtcactcgcatcttctccctgctagtttctagctatgtagttgtcactgaacacccagttctatagcaactgcctgaaaccctttgggtgaaagcggatacagatgttggcctgacccattcagcatcacttatttctatacagatagacactaacagccctcttccaattttaaaacaatgtcccctcaattctgaagcttgagctgatatagaatctatagtcggttgtttcatttcccagggactcatagtcctctacaccagtccctgtaatacatccgttctgccagtctgtaagcctaatgtgaa

SEQ ID NO: 40053 - DNA, 629 bp, Homo sapiens
gattttgaagacagaaaataaatcaaagatttaaaaaaaggaaaagagaatcaaaaatttttttaaaagaataaaaataacgaaaaatgaacacataaaaaagaaagaaaagaattttaaaaattgaactagtctcagaaataatacttttataatgttaccaacacttgttaactgaagatagtatttttagttgattatgaatatgactgaagatgttggtgaagtccccgtgcccaaatgctgtgaaattcayaagttcatttcttctggaaatgtacccgatgcgttacagtgtcgtatatggattggcatgatgtgatgtgcctgaggaagggcagagctaccttccattctctgggtgccttccctcctcctgcacttttcagtgatggtttcaggttcctgaaggctaccgtgtgccacaaggcaggagctgccatctctccatttggagaggaggagggtcaattcagcatcactgagatggggaagaaaagttcagactttattttgaattaaaatccagcccaactcttcttgcttgttttggtatctagaagagctttccctattctctccttcttctcctataagctgttcacttccttcgccaaattctctgagga

SEQ ID NO: 40054 - DNA, 835 bp, Homo sapiens
ttggatcctgactgatacactataaattcaaagtgtcttagagaggctgagcttgcagtttcccagtgtactttcagtaaataacagaatgtcaaactttcagagctttaaatcagacatactcttattcctgctgatacattctaccaagcatcttttcctaacatggaccagttaaatgtcttatttttctttttttttytccaagaaatagcgtcacttgccaaagatgttttaagttcattaatttaacccttctccccagccatttctgcaggtgtggtagagaatagacctccttagaagttatggttagtgtcagactgggctgccttgccaccttgaagtagcgtagatttgagagtatagattgtctttcagattacagaactagtccctgacttactccagaagttaagtagcagagcttttaccatgcttagttccaaattctagaacaacccccagccttctccaaagttaaaaacagtctaattgacagtggttgattttggctggctgggtgatgatgaaagaaaggagagcacttgcatagtttatggtgaagataaagcacatatcaggcattgtaattatctagccgcacactataaacttttccatttcattcatttccgtatctcttgctctttattgtcagttgcagaggcacaacacttttctcaggattcatgatcaactctgccctttggaattgttcctactgtctaaaaattaattccacatgcatgtacaaacttacattttattttctcactgccttctgattttaaaaatggttctactttcattttgtcataattatgctcctttt

SEQ ID NO: 40055 - DNA, 1102 bp, Homo sapiens
ggagctgactcaccaaacaaggcagtttccacatcctaatgttttcatccctgcttgccccaaccaatcaacagcctcaagtttccagcccctcaccctccataatccccttaaaaccctagccaaggactcctcatggagatggatttcagagtctccttccacctccttgtgcagtgccctgagatcgttaaactctttttctactgcaaatcctgctgtctcagcgtatttaatctgttactgcacagggggcatatgaaactgttggtcctataacatcaacagtaaagcaactatagagtactgacctagaacacttacttccttyttcctattatccctttatatcttacatgattatattctaagaataccctctattattgaggaataaaaccatacacaggcatattggacacacctggctcaacatttcttaaactgtttactctaataaaaatgttatcaagatggaaaagattttagttcaatttattctgaagtggagcagaaaaacatggtaaccatgttaccatgccctgacagctcagctttttttttttttaagatggagtctggctctgtgctcccaggctgcagtgcagtgtgatcttggctcaaagcaatctctgtctcccagattcaagcgatgtcttctgcctcagcctcctgagtagctgggactacaggtgcatgccactgcacctggctattttttgtatttttagtagagatggaggtttcaccatgttggccaggctggtcttgaactcctgacctcaagtgatccacccgcctcggcctcccaaagcacttggattgcaggcctgagacaccgcgcctggcctacagctcagcctttcttacttcacaccctgcaatgactcccaaaacacctctctggaacactttggtctccataaggcatagtttgaggagcagtaagtagaaaaaatgacctctaaagttttttccttgctaataccatgtgggttaatacggacctggaggacaaacctcttagaggtgcaaagtggagtggtactatcaccaactccagtcaactagttcttaatcaacagagcaagactggggagaa

SEQ ID NO: 40056 - DNA, 764 bp, Homo sapiens
gtcccttaggcagagagcatggaggtggctctcagagacaccctctcttccagggctccccagggctcctcagtgtcagccccaactctttcatgagagtgtgctaggacctccttctccaaaagaaaatctccagtgaagatcartgtgtaaccttgggaggttgagatgagagagatgatgagatgatatggtggggatgctttaggagttcccaaggcctgctggtgctctctgcatactcacctgtgcccaaactgaaccaagctcattctcgacgcttttcctctttctctctcccaatccagtcaggtgccttgtcctgccgattccatacccttaatgttccctacccagactggcagttactgtgtagttagcagacaagcaaggactttgggggttaccctaaaaccccaacttagctcttgagtgaatccgggaatgtcagtgtggaagggattttttggatgcagaaaaggtttcttgcaagtacttgttacttaatattcaatgtaatacagtagcttaaaaaaaaaaccctagtcattcttaagcctttaagttcaatttacaaaacttattattcgatttctatgcagtcagtttcaaggggcttttgattaatggtcaatcgactcatactcggttaaatgattcataccatttgcaaacttggttaattaaattatcttcaacattttacacaggacttactaatttaacgtattcaatttccttttttaaacactttcattgcctga

SEQ ID NO: 40057 - DNA, 764 bp, Homo sapiens
gtcccttaggcagagagcatggaggtggctctcagagacaccctctcttccagggctccccagggctcctcagtgtcagccccaactctttcatgagagtgtgctaggacctccttctccaaaagaaaatctccagtgaagatcaatgtgtaaccttgggaggttgagatgagagagatgatgagatgatatggtggggatgctttaggagttcccaaggcctgctggtgctctctgcatactcacctgtgcccaaactgmaccaagctcattctcgacgcttttcctctttctctctcccaatccagtcaggtgccttgtcctgccgattccatacccttaatgttccctacccagactggcagttactgtgtagttagcagacaagcaaggactttgggggttaccctaaaaccccaacttagctcttgagtgaatccgggaatgtcagtgtggaagggattttttggatgcagaaaaggtttcttgcaagtacttgttacttaatattcaatgtaatacagtagcttaaaaaaaaaaccctagtcattcttaagcctttaagttcaatttacaaaacttattattcgatttctatgcagtcagtttcaaggggcttttgattaatggtcaatcgactcatactcggttaaatgattcataccatttgcaaacttggttaattaaattatcttcaacattttacacaggacttactaatttaacgtattcaatttccttttttaaacactttcattgcctga

SEQ ID NO: 40058 - DNA, 546 bp, Homo sapiens
actaaaaatagaaaagaatagccgggcgtggtggtgcatggttgtartccccactactctattcgagaggctgaggcaggaggctcccttgagcccagaaggtagaggcagcagtgagctgtgattggctgcactctggcctgggcaacagagctagaccgtttcaaaataagtaaataaataaaatgtattaagaactttcagtcacttcccatttcttggagtctaaatccaccttagaagatatccagcctcattccggcacatctacagaaactcttctgtgattatccagactactcgtgtccctggcgcacacccacctgctcctgtgcccactcccctcatcctgggagacgcagctgcagggcctctcgcagttattctcagcctgccttcctctcatcccagcttctctcccaactcttctggcagatccgggcccgcttcctagttctcacagctgtagtcattctgcttctaatgaccagaagcctatgtaagggcagggatgcccctcagctcaccgcacctctgtctcaagag

SEQ ID NO: 40059 - DNA, 546 bp, Homo sapiens
actaaaaatagaaaagaatagccgggcgtggtggtgcatggttgtaatccccactactctattcgagaggctgaggcaggaggctcccttgagcccagaaggtagaggcagcagtgagctgtgattggctgcactctggcctgggcaacagagctagaccgtttcaaaataagtaaataaataaaatgtattaagaactttcagtcacttcccatttcttggagtctaaatccaccktagaagatatccagcctcattccggcacatctacagaaactcttctgtgattatccagactactcgtgtccctggcgcacacccacctgctcctgtgcccactcccctcatcctgggagacgcagctgcagggcctctcgcagttattctcagcctgccttcctctcatcccagcttctctcccaactcttctggcagatccgggcccgcttcctagttctcacagctgtagtcattctgcttctaatgaccagaagcctatgtaagggcagggatgcccctcagctcaccgcacctctgtctcaagag

SEQ ID NO: 40060 - DNA, 546 bp, Homo sapiens
actaaaaatagaaaagaatagccgggcgtggtggtgcatggttgtaatccccactactctattcgagaggctgaggcaggaggctcccttgagcccagaaggtagaggcagcagtgagctgtgattggctgcactctggcctgggcaacagagctagaccgtttcaaaataagtaaataaataaaatgtattaagaactttcagtcacttcccatttcttggagtctaaatccaccttagaagatatccagcctcattccggcacatctacagaaactcttctgtgattatccagactactcgtgtccctggcgcacacccacctgctcctgtgcccactcccctcatcctgggagacrcagctgcagggcctctcgcagttattctcagcctgccttcctctcatcccagcttctctcccaactcttctggcagatccgggcccgcttcctagttctcacagctgtagtcattctgcttctaatgaccagaagcctatgtaagggcagggatgcccctcagctcaccgcacctctgtctcaagag

SEQ ID NO: 40061 - DNA, 1992 bp, Homo sapiens
agaccaacctgtccaacatgatgaaaccctatctctactaaaaatacaaaaactagaaaaaaattagctggacacatgcctgtagtcccagttactcgggaggctgaggcaggagaattgcttgaacccaggaggtggaggttgcagtgagctaagattgcaccactgcactccagcctgggcaacagagggagactccgtctcaaaaaaaaccaaaccaaaacaaaaaaaatcccctatcatcccttattattacaacttgaatttaccattgttctgaataagctaacaacagaaagatgaattaaagaatgtctttttttttgtctcactctgtcactcaggctggagcgtagtggcatgatcacagctcacagcagccttgacttcccaggctcaagtgatcctcccacctcagcctgagtagctgggaccacaggtgcgcatcatcatgcccagctaatttttttgttgttgtgttttgtagagacggggtttccccatattgcccaggctggtctcgaactcctgggctcaagagatacaccctcttcggtctcccaaagtggtggaattgagtgagccactgtgctcagtcaacttttaaaaaaagaaaaaatattggaaatgctgatgccacataaaatcatcctataggttagcattcgtagcccttttaacacctttactcctaagtaatttaaagatctctttcaaactaaacatttttcctctgcattctccagctcaggttctgatatgcctcactgagtgagtgagtgggactccctggctgagattcccttctacaacagtgtttgctttgtttttttttttttctctctttttttttttttccacacatggagagtctttgctttttgggcacaattaaaataatcccagaagacagtgtggcctagtgattaagcatacaaactatcacgccaggtgcggtggctcacacctgtaatcccaggactttgggaggctgaggtgggcagatcacgaggtcaggagctcgagaccagcctggccaacatggtgaaacctcgtctctaataaaaatacaaaaattagccaggtgtggtggcaggcacctgaagtcccagctactcgggaggctgaggcaggagaatcactgaaccgggacccgggaggcagaggttgcagtgagccgagatcacgcggctgcactctgggctgcagagtgagactccgtctcagaaaaaaaaaaaaaaagaagtctttgagcgtttcccatttaacacataaggagagtgaggttgagaggataagaaacttgccaaagggccaaggtcgaattgaagtccccggttctgctgctcctgggctcctacttggacaagcccttaacacttgatggcgccatgacagagggatattygggcactagtggccatcgtggcctagaatttattacctactctagttccacactagaattcagaaaagaaagaaactattatgagattgaaatctgtatcccctttggtctaacataaaaatgttctttttatcttctactatatagggcaaaatttttaaaatgcacttcacttccacatccaaaaaaaaaaaataattaatttcagggcttttttcatggttaattgtatctctgcagcagctgagaggaacattaataaaaattatcttttggggttttgggattattaaaattgaggataaggatgttatggaagctttagcttctagatccatcgcccttttaacaaatatacttgttcctttagatttcactcttatttacgaaatacataaatctgaaccaaagcaatatgctgttttggggaaaatatatgaatgcaaataaaagaaagctgattctagtccccacaattctactaagtagccatttgatgctaccagcaatgcaccaaaattgtatcagagtgaaatctgccatcccaaaacaaggtgactacttgctctgaaattctaagagcc

SEQ ID NO: 40062 - DNA, 600 bp, Homo sapiens
cataccttcttaacccaagtgagtatatatttatccttgatgtttgccctttgagttaacttttactcaaaagtgtcaggcaaccgaataatcatagtgcctctagaatatcacttttagagatctttataactgagcgaaatacctayttcaaatgatattttaatattaaaaatgcagcataagaatgaacttgagccaactatttctactgtgtgattaaaaactaaatattaagacattcatactattctgaggtagtattgttggatatatactgagtactaatatagaattcttacctgtaatgtacatgtgtgactgttggtttcctgtatccaaggatccaggtttgaatatctataggttcagctttgggataagctatcgttgtatctattatccactggaggccttttgatttgctgtctgagaacaaagaaaaaaagacttaaaattaaatcaacttttatattatctgcagcaaataacatagattacttgaccagtgtaagatatatcactataccttttgcattaagaaaaattctaaggatgaactttggtgctcctgttctataacactcttcagaagaaatt

SEQ ID NO: 40063 - DNA, 557 bp, Homo sapiens
gtggaggttgtagtgagccgagatcgcaccattgcactccagcctgggcaacaagagtgaaactccatctcaaaaagataaaatacataaaaaataattaataaataaataaagcaaaatatctccctcagttttagcaagagttatatacacagaaagcaataaagcttcctgccctttggaaggtacaactggtgactactgttgtagagagaggatggtaagttctgctaagtttgatcctttgcacactgtttttatcccagcatggggtacaaaggtgagcgagaactgagaggggaaacatcccagaggatactgatggccagcctttagagtaaaatggtccattctttatttgaagtatgtaagaaatccctaaaaaaagagaaatmattttcaagcataagttcaaatgtgcattaggaatcaatgatatattacttttgtatgtcaaataatttaaaactggccttaaattctgtaaagattttagaataacattgtgaaggagaaaaatatacttgtaaaacaagtaaaaaattaatttttaaata

SEQ ID NO: 40064 - DNA, 1157 bp, Homo sapiens
cctcatgaatggcttggtgccctccctgcagtcatgagttagtgcatgtgatagctggttyttcaaaaaagcatagcatctctcttgcttcctctctcaccatgtgacgagtctgttcccctttcaccttcctctgtgattggaagcttcctgagttcttcaccaaaagcagatgctggcagtatgctttttgtacagtctgcagaaccttgagccaaaaataaatctcttttctttatacatttacccagcctcggatattcctttatagcaacccagaacgaactaacatgggtaaaatctatagtcctcatttctgaaatgattagaaggtcctaaatggtatttagtataatttcttacccactgctatattagttaggaaaaaccaaaaggtgtgttaaaggtgatgtcttctattgtttatctaacaagaggtcctgcagaagaggaacgtaatgttaaatgggacgcggtgatgtggtcttgggttgggcttcttagaaacaaagattgtgtgattattcagagcgagctctcaggtgaaaggtaaggggatgaggaaagcagaatagggcaaggaaagcaataggtgataaagtgggttcaggagcttcaggctgatctccatggagagctctagagtgtggatggtgtcatgaaatttttctctcttgggcaagaagccaggctcctgccttctatcagtcagccattggctatgggctgcaaccttccagccatttctaggtgagcccataggattttcaggagaaggatgctgttgtgagctatgagcagctagcactcacaacagcacagggatggtgacttggtctgataaggggggcctgtgctggtaccaacagtgtctaatattgttctgtcctttggaccagtcccatctactcccttctcatattcacttcactccatttcaagcatagattttccaggattctggctgatgacaatttctgggaatcttacaagaggagggaagagggtcccaatactgcaactgaccccaatcattttctctccctaccacctgttctgcattcctctcacccttgtttgacactttcactgaaggatggattcactggctagataaatggctgggcatcagcagcgtctgctacagatgtcaggaa

SEQ ID NO: 40065 - DNA, 1157 bp, Homo sapiens
cctcatgaatggcttggtgccctccctgcagtcatgagttagtgcatgtgatagctggtttttyaaaaaagcatagcatctctcttgcttcctctctcaccatgtgacgagtctgttcccctttcaccttcctctgtgattggaagcttcctgagttcttcaccaaaagcagatgctggcagtatgctttttgtacagtctgcagaaccttgagccaaaaataaatctcttttctttatacatttacccagcctcggatattcctttatagcaacccagaacgaactaacatgggtaaaatctatagtcctcatttctgaaatgattagaaggtcctaaatggtatttagtataatttcttacccactgctatattagttaggaaaaaccaaaaggtgtgttaaaggtgatgtcttctattgtttatctaacaagaggtcctgcagaagaggaacgtaatgttaaatgggacgcggtgatgtggtcttgggttgggcttcttagaaacaaagattgtgtgattattcagagcgagctctcaggtgaaaggtaaggggatgaggaaagcagaatagggcaaggaaagcaataggtgataaagtgggttcaggagcttcaggctgatctccatggagagctctagagtgtggatggtgtcatgaaatttttctctcttgggcaagaagccaggctcctgccttctatcagtcagccattggctatgggctgcaaccttccagccatttctaggtgagcccataggattttcaggagaaggatgctgttgtgagctatgagcagctagcactcacaacagcacagggatggtgacttggtctgataaggggggcctgtgctggtaccaacagtgtctaatattgttctgtcctttggaccagtcccatctactcccttctcatattcacttcactccatttcaagcatagattttccaggattctggctgatgacaatttctgggaatcttacaagaggagggaagagggtcccaatactgcaactgaccccaatcattttctctccctaccacctgttctgcattcctctcacccttgtttgacactttcactgaaggatggattcactggctagataaatggctgggcatcagcagcgtctgctacagatgtcaggaa

SEQ ID NO: 40066 - DNA, 1157 bp, Homo sapiens
cctcatgaatggcttggtgccctccctgcagtcatgagttagtgcatgtgatagctggtttttcaaaaaagcatagcatctctcttgcttcctctctcaccatgtgacgagtctgttcccctttcaccttcctctgtgattggaagcttcctgagttcttcaccaaaagcagatgctggcagtatgctttttgtacagtctgcagaaccttgagccaaaaataaatctcttttctttatacatttacccagcctcggatattcctttatagcaacycagaacgaactaacatgggtaaaatctatagtcctcatttctgaaatgattagaaggtcctaaatggtatttagtataatttcttacccactgctatattagttaggaaaaaccaaaaggtgtgttaaaggtgatgtcttctattgtttatctaacaagaggtcctgcagaagaggaacgtaatgttaaatgggacgcggtgatgtggtcttgggttgggcttcttagaaacaaagattgtgtgattattcagagcgagctctcaggtgaaaggtaaggggatgaggaaagcagaatagggcaaggaaagcaataggtgataaagtgggttcaggagcttcaggctgatctccatggagagctctagagtgtggatggtgtcatgaaatttttctctcttgggcaagaagccaggctcctgccttctatcagtcagccattggctatgggctgcaaccttccagccatttctaggtgagcccataggattttcaggagaaggatgctgttgtgagctatgagcagctagcactcacaacagcacagggatggtgacttggtctgataaggggggcctgtgctggtaccaacagtgtctaatattgttctgtcctttggaccagtcccatctactcccttctcatattcacttcactccatttcaagcatagattttccaggattctggctgatgacaatttctgggaatcttacaagaggagggaagagggtcccaatactgcaactgaccccaatcattttctctccctaccacctgttctgcattcctctcacccttgtttgacactttcactgaaggatggattcactggctagataaatggctgggcatcagcagcgtctgctacagatgtcaggaa

SEQ ID NO: 40067 - DNA, 614 bp, Homo sapiens
tgagaatgcatacacaaaggtctgcctttatctcaccagttgtgtgaattatgtgtctgagcctgagaactcagtcctactgcgttgtgccctgggtgtgttctgaaagtttagccgcttycctaaagctctgagattggcactgatgcgcaatgacatggagctggtagaagacatcttcacatcctgcgaggatgtggtagtacagaaacagatggcattcatgctaggctggcatggggtgttcctggagctgagtgaagatgtcaaggagtatgagcacctgacagagatcatgtccaatgtacagctcaacagcaacttcttggccttagctcgggagctggacatcatggagcccaaggtgcctgatgacatctacaaaacccacctagagaacaacaggtttgggggcagtggctctcaggtggactctgcccgcatgaacctggcctcctcttttgtgagtggctttgtgaatgcagcttttgtttaagacaagctgctaacgatgatggcaacaaatggctttacaagaacaaggaccacggaatgttgagtgcagctgcatctgttgggatgctgctgctgtgggatgtggatggtggcctcat

SEQ ID NO: 40068 - DNA, 568 bp, Homo sapiens
tatatatactttatatatatatatwttatatatatatatatatatatatatatatatatatatatatatatacacactctttctctcgctgtctgaggtttcagtgagccgagatcgtgccacttcactccagcctgggtgaaagagcgaaactccatctctaaaaaccacaagattttagggagcagtgtgatttaaatcaatattaagagcgtcttcatcatgcattaaaatatgcatggacaaactaatgtctattaggaaaaatgtgtaggccagttgttattggtgttattctcagcttactgaaaaatccatgtatttggccagctttttgtggggagcctttattttactagttaaggcagaaaaaaagattactgagcccagaatgctcaccagaatatgcttgcctctcttctgtacatatttataccgtcagaggcatttgaaccacagcaactccatcttgagtgggggctgggtaaaataagactgagacctactgggctgcattcccagccagttaggcattctaagtcacaggatgagataggctggcacaaga

SEQ ID NO: 40069 - DNA, 568 bp, Homo sapiens
tatatatactttatatatatatatattatatatatatatatatatatatatatatatatatatatatatayacacactctttctctcgctgtctgaggtttcagtgagccgagatcgtgccacttcactccagcctgggtgaaagagcgaaactccatctctaaaaaccacaagattttagggagcagtgtgatttaaatcaatattaagagcgtcttcatcatgcattaaaatatgcatggacaaactaatgtctattaggaaaaatgtgtaggccagttgttattggtgttattctcagcttactgaaaaatccatgtatttggccagctttttgtggggagcctttattttactagttaaggcagaaaaaaagattactgagcccagaatgctcaccagaatatgcttgcctctcttctgtacatatttataccgtcagaggcatttgaaccacagcaactccatcttgagtgggggctgggtaaaataagactgagacctactgggctgcattcccagccagttaggcattctaagtcacaggatgagataggctggcacaaga

SEQ ID NO: 40070 - DNA, 569 bp, Homo sapiens
taggagtagaagagtatggagtcggaggagggaacggtttcttaaggtctcctcccactctactcttaagaaagcttcagtagaagcacctgaagaaaactccagcaggaagccctcagataaagaaacttctgaatgaagacacctaggctaggaatgcaaatatgtttaagagcatggrccattaggggaatctgagttccagaatgcaattctctttaaagattgcaatgcactgggtatgccccaagtctggggagggcaactttcctcggaggggtttgccagataaagcctttgtcattgcctgtggttgggcctgaaatatcaaacatagatttttggccaggactcctcagcaggatctagtcagggccttcacaaagtacattcagaatgacaattgacccaccagaaagccatcatgccaccacttgatattttaaatgaaaagacccaccaacatatctgatatccatatctgatacccagtagaattggaatgctgctatcaccactgtcactattgtcactaccacacctgcctctagaaacccagcaatctggag

SEQ ID NO: 40071 - DNA, 532 bp, Homo sapiens
attccttcccaaagttaattcagcctacactcaggaatgaacaaggacagtttaaggattacaagcaagatggagtcggttaggtgtgatctctctcactgtcataatttcctcagttataattttgcaatggcggcttcacatacacaaacatacacacaatgtcaagaaaaaacaatacagaaagaaaagctcacctcaacaggcccaaatttcagtaacataaaactcatattatctaacagaataaatataaaaattcatgtaacatttcttacattatagggcaacatttgaaactggaagatgttttagagactatcttgaccaccccttgaattttcttgttgaggaacttgaagtttagaggggaaaaatgttttcaaaagagtcgggataatgttagcctgtgtcagcactaacatctgactaacragtcagattgctgacactggcccatgctcacaccttaataataatgacaatttaatgacaatgggactaattactaataaatttgagtattttctat

SEQ ID NO: 40072 - DNA, 1574 bp, Homo sapiens
cagtgagccgagatcgtgtcacggcactccagcctgggtgacagaacaagactctgtctcaaacaaaacaaaacaaaacaacctgtaacaaatattaaagataaagtttgtttttaattaattcattcattcatttaataaatatttcttgagacattctatatatataagtatatataaggcgttgggccaggtaccagaaattcagcagagaaaaagacacaaaaggtatctgccttcagggagcttacattctaataggaagacagatgctaaacaactaattatgctatcccttttttatttaaaattgtgataagtgctacaaatagtaactatgacaacacatgggatagattatcttcatttcctcctccaaatgcatcctctcccttctctgctctgtgccatgggagactggctttgttgggcagcatcagtgagttcccctgtacactggcttccctttgggttcagtaggagataggagggccaaaatgtatcaaggtcagggtagttatagtcccagctccctcccagccaggccatagtatgacagtagttgccttcctctgcagtttctgggaaccacttcctgtgccactcaggcgtgggtgtggtcacagctcccacgggccaggctggcattattggtctcccttaaccctgcatacacctttgtggattatctccttgttgaattcatcagtttcccagtttgagtgtgccgcccacttcctgttgggactaactcagaccagatagcttgggggatccgacttagcttagacagaggaggcagygtcaaagatgatctccttgacagagttatatttaagctgcatgctgaaggatgttagtttcctagtcatccctcctcatacctcctcttttcctccattccagcctagaaatatctctgtcaagtggagaatattggcatagttcatcattgttcttttatttatctctttcttccactgatctcccacaaccagcagtaaacactttctttttttggctttaaagcccctcctcattggtctttttgtcctctgagacctttccttctcagtcttcctcccagatctttcatttcctgtcagtgtctatcaaatatgtacaatccctccccatatgacccacctttgatcagcagttgcctcatctctccctgctcctagaaattcagccacactagaccactcactgttcccacgcctttgttcactctgttttcttgccctggatctccctaacctcacccataccctctgctgaaatccaatccagtttaaatgccaccactctgcaaagccttcctaaaggtctcagcaggaagtccttactgccattattttttgctctcataaatactttttttttaacctttgttgcacttcctacatgctttatagttttgatatttgtggaatgtcttatttctctcccatgaccattagctctgagcaggcaggggctagtttttctctggaaagtctgcaacatctaatgcaatgcccagcacgtagtaggaacactatggctttcatattgactgacgcctattttat

SEQ ID NO: 40073 - DNA, 730 bp, Homo sapiens
ttccagtcttttcacatttgagaatcagtgatgccaaaatatttattgtctcaggaaaaataaaatagaaatattttaagggcctccagataccatatagctgcatagagctggagaagtagaaatgagacatagacagattaattgggaggaaaataaaaatatgtttcccctatcttacggttctgcactccaaattgggatttctaaaagttctcctccaggagggttttattatatctaatgtttggtttgaaaatgttggaagatgacaaatatgagaattttaactcctaaaaggcttttcaattaaatgtgttctgtgaaattgaatttggttttaagtggtagtttctctatttttaagatatatttaaaacaacacagtaataaccaccatttattcatcacccaataactattttaatgttataacctgctccaatgcaggtaatattgcccccatttcatagatgaggaaacagaagctcaagatgttaattgctgtattctagggcccagattttgggtgactgtcttctgtggtctcatgctcatgtttttagctaataagcatacctcctcctgttgtgagtgcacatttgcttggccatcctctgtggatgctgcaaatattctataacccactggaacacttccccagaaggcccktctctcaggaaggagagatgaacaggagctaaagaaaaaaatgaactggccagaaaaa

SEQ ID NO: 40074 - DNA, 592 bp, Homo sapiens
aaagattattgagaggagaagaaagaggccggccaacactacctgtatcacgatggttctgaacaccctctcgtgtgaaactactggaaaccacagctctgttaaactgctgttctaaaaatgctccatttatttttctatttacagccatcactttaatagtgttcttttccacttcacaaattcccaatttgccaagattacctctaatcggtttcctggttctttctaaatattagaaaagtaaggaggctctggaaagctgcatatgtcgtaaaaatcactgactaaagtggaagaggaaggtcaaagccgtctctccaaagtaaatgcaatttccgttttacccttaagaaaggaggctctgccctcatagagagtaggtggcctaaccgtctgtgagggcaaaaagtcctgcaatctgcgtggagcagaacatactggttcactacagagcgtctcaatmcccccagccagcaaggcccaaaaggtacatacatcacacgaactgcgctggaagcagtaacatctcaaccaatgagctgccccagaatcaccagcagcaaccttacatttaaatgttcagacactc

SEQ ID NO: 40075 - DNA, 504 bp, Homo sapiens
ttttcagcagccaaatagagtatcacattttcactccatgtttcctgggtgtctgttatgtttcctgggtgtctgactcttaggcttctttcaagctgcagtctgcctaatagagagccttgcatttaatcatcaaaaaggcaaagcaatatgaatcagcaagggtgttttggsaaataacagcaaacctgactgtggcgtaagcttgtggtattgtctccagtgtgatcagatctgtattttaattttttaaatgtaaattaataatgatctgtgaatcaccaaagtagcttggagtagcctagaaaacaatgtatgtcctccgttttcacagaagccacatagtcgtgggttaaatgagtcagcggcagggcactgtgtctcatagttaaaaaaaaaaaaaagtattactgaagtaatgcaggatcttttctgaagtagaaggcatgatgaacccagaaaactaaagcagcaagtggccaccgttcttagcatagttgtttc

SEQ ID NO: 40076 - DNA, 797 bp, Homo sapiens
tttctgaatttgatcaatgtactgtggttttataagaacatctcttattcttagagacataatgtatatgatttactttcaaatggctcagagaaaaaaccctacatagggagaacgctaaggcaaatgtggcagaaagtattatcaaatggtgaacctggttgtaaagagtatatgaattttctgtactgtttttccaggttttctataagtttgaagtcatttccaaataaaaagtagaaaaagaaaaggaaacatacctctcttcaaggccttttaaaatctcaggaccaccactctcaactacctaatttttaaagaagacgtcattagaacggtagggaagtcaataataaaagtcatttcaagtcagttcaatgaaactcggaccattcactgaaaccttccacagcaactgttttctgacattacaatttaatcaggttcatakcatcttcattatactgtagtaactctatttctcttaatttattttaattacattctactggtagtatctaaaaagtactacaatggttcagaaaaatacagcaatcaacactcaattagcactaccgaattctatgacatgctgagctggtgagctcacatatcctttgttgagaagttaaacattacagattcagctggaatcccccaagtactgctccttggtcctattctccctctaccccaagccccacaaacaaaaccatcatcccaaatctgcttccaaatgtttcaaacactacatatcacggaacaacatgtttttctggaaacatatttttgagatc

SEQ ID NO: 40077 - DNA, 797 bp, Homo sapiens
tttctgaatttgatcaatgtactgtggttttataagaacatctcttattcttagagacataatgtatatgatttactttcaaatggctcagagaaaaaaccctacatagggagaacgctaaggcaaatgtggcagaaagtattatcaaatggtgaacctggttgtaaagagtatatgaattttctgtactgtttttccaggttttctataagtttgaagtcatttccaaataaaaagtagaaaaagaaaaggaaacatacctctcttcaaggccttttaaaatctcaggaccaccactctcaactacctaatttttaaagaagacgtcattagaacggtagggaagtcaataataaaagtcatttcaagtcagttcaatgaaactcggaccattcactgaaaccttccacagcaactgttttctgacattacaatttaatcaggttcatatcatcttcattatactgtagtaactctatttctcttaatttattttaattayattctactggtagtatctaaaaagtactacaatggttcagaaaaatacagcaatcaacactcaattagcactaccgaattctatgacatgctgagctggtgagctcacatatcctttgttgagaagttaaacattacagattcagctggaatcccccaagtactgctccttggtcctattctccctctaccccaagccccacaaacaaaaccatcatcccaaatctgcttccaaatgtttcaaacactacatatcacggaacaacatgtttttctggaaacatatttttgagatc

SEQ ID NO: 40078 - DNA, 797 bp, Homo sapiens
tttctgaatttgatcaatgtactgtggttttataagaacatctcttattcttagagacataatgtatatgatttactttcaaatggctcagagaaaaaaccctacatagggagaacgctaaggcaaatgtggcagaaagtattatcaaatggtgaacctggttgtaaagagtatatgaattttctgtactgtttttccaggttttctataagtttgaagtcatttccaaataaaaagtagaaaaagaaaaggaaacatacctctcttcaaggccttttaaaatctcaggaccaccactctcaactacctaatttttaaagaagacgtcattagaacggtagggaagtcaataataaaagtcatttcaagtcagttcaatgaaactcggaccattcactgaaaccttccacagcaactgttttctgacattacaatttaatcaggttcatatcatcttcattatactgtagtaactctatttctcttaatttattttaattacattctactggtagtatctaaaaagtactacaatggttcagaaaaatacagcaatcaacactcaattagcactaccgaattctatgacatgctgakctggtgagctcacatatcctttgttgagaagttaaacattacagattcagctggaatcccccaagtactgctccttggtcctattctccctctaccccaagccccacaaacaaaaccatcatcccaaatctgcttccaaatgtttcaaacactacatatcacggaacaacatgtttttctggaaacatatttttgagatc

SEQ ID NO: 40079 - DNA, 573 bp, Homo sapiens
caagttacttaatctctgtaaaccacagtttcctcatgtgtaatgggggatggttatacttgcttcagacataaacttgctgtgagatttaattagctagcattcaaagcattcccagagtgccttgcagaaagtgtccaataaatgttagctatatttgttagttttttwaaaaaaaatatagacatctatatgcacttttttaaatattttttttggtaccaggtgtaatgaaaattcaaactgtacaaagtcaggtccttgctttccaggagtgtataatcttctaagggaaataatatataattatttatgattcaaggcagtatttgttagttacacataactggtattcgaaaggtttttgaaatacagaggtgagtcgcttctggctaaaattatcaggaggtgttttagagaaggcatttcagatgggcctccaaagacaggcagagttttaaaaattaaaatttgtgagatatactgaaagaatcacgatccagtccaaattgttagggcaacagagaaacacacagttcatttttaaacagctttgttgagatatagttggca

SEQ ID NO: 40080 - DNA, 596 bp, Homo sapiens
gaaactccgtctcaaaagaaaaaaaaaaaaagaaaaaagaacaatatatataacctagagatcattccatatcagtataaattctttgtttttatggctgtatagtattccactgtagtgtataaaccgtattttatgtaactagctccctatgaacgaatatttgggttgtttccggataattaagttattacagtaaaatacaccccaggccccatcttcagcaagtaaaattactttaaaggaatttttaaaactgacaatattaagactaatcacatacctgagtttttgggaaaggcacaaaagaatagtaggttgttaaaaaaaaaaaaaagcaactgatggagagaacatataatgagataaacatttataaartttttaaaatttaaattctacttaaaaagtgggcaaatattgctggtgaaagtcatcatactttgtctgttatttaaatctcttcataatacaggcatcagaagcacttctggatatatccctaaaagctgctcatgaaatcccaagcttcctgaccccaaaccacagaaagtctgtttgaaagtacctgttttttgtttgtttgtttctgtaaa

SEQ ID NO: 40081 - DNA, 1450 bp, Homo sapiens
  misc_feature (1)...(1450): n = A,T,C or G
cccatcctgtaggtcagaaatggttgaatatcagcagtttcatgtggttcaacctaataaataatggggttagactaaaatggttacatatttctcaccccaagttatgtccttataatgtatttatacctgacattatatatttgtgacctgtttccctctaagccatgtgagatcaaagtcactttctgcccagtttgcaccatatcaccaacacccacaacagttcctggcccatctttgctctgtcagtaatttttgagggcttgaacatagtcatttgaatagagagataggctggagtttgtgttttggagacatcttgatcaaaatctcaatggctgtcaacgtccatgtgtttggaggtaatagtttaagaaaatgattataatatgattgctaaatagagtggaatacaaaactccatattcaggatgatccacatgtataaagtattacagatgatactgtaaagtctgaattgggcactgagccttgggttaatctgttactcaaacagtatractatacgctgttgcatttcccagatcttttactcacatgtcttaaatgtagatgtttcacatactggctctttcaagaaagcagttgggtcagaagatggagactagaaagaaaacaggtattgccatcagatctggtttcattctatcttagccaggtaaccttaagatcttctactatttttctgtttatgagacatatggataacctgccctcttaatgtttccttggaagttcaaagtctctaataagtgccttttgtgggatcttgcatgtgttaaccttctcagtaactgagtgccattattgagagtgtgtgcatactggctggagggtccactagttgacactactttacaacaacaggaggaaagaatctgttaaaagaaggatccctggcagggtgcagtggctcacgcctgtaatcccaacattttgggaggctgaggcaggcagatcacctgaggtcaggagttcgagaccagcctggtcaacatggtgaaaccccgtctttactaaaaatacaaaaggtaccgagctcgaattcgaaatgcagttttatagctcttaaggnnnnnnnnnnnnnnnnnnnnnnnnnnnnnnnnnnnnnnnnnnnnnnnnnnnnnnnnnnnnnnnnnnnnnnnnnnnnnnnnnnnnnnnnnnnnnnnnnnnnaagagaatataattgagcatgaaatctcaatttttacattgatgacttatttggggtgatgacgttttgaatatattaggttagacaagattttaaagttaattttacctgtttctcttttactttttcagtgaccactagaaattttaaaactatgtaggtggctaacatcatattgctgttggatgcatcttttaagtgctgctgcctttgattgagctgagtgggttccagttaaccaggcttgagcac

SEQ ID NO: 40082 - DNA, 1450 bp, Homo sapiens
  misc_feature (1)...(1450): n = A,T,C or G
cccatcctgtaggtcagaaatggttgaatatcagcagtttcatgtggttcaacctaataaataatggggttagactaaaatggttacatatttctcaccccaagttatgtccttataatgtatttatacctgacattatatatttgtgacctgtttccctctaagccatgtgagatcaaagtcactttctgcccagtttgcaccatatcaccaacacccacaacagttcctggcccatctttgctctgtcagtaatttttgagggcttgaacatagtcatttgaatagagagataggctggagtttgtgttttggagacatcttgatcaaaatctcaatggctgtcaacgtccatgtgtttggaggtaatagtttaagaaaatgattataatatgattgctaaatagagtggaatacaaaactccatattcaggatgatccacatgtataaagtattacagatgatactgtaaagtctgaattgggcactgagccttgggttaatctgttactcaaacagtatgactatacgctgttgcatttcccagatcttttactcacatgtcttaaatgtagatgtttcacatactggctctttcaagaaagcagttgggtcagaagatggagactagaaagaaaacaggtattgccatcagatctggtttcattctatcttagccaggtaaccttaagatcttctactatttttctgtttatgagacatatggataacctgccctcttaatgtttccttggaagttcaaagtctctaayaagtgccttttgtgggatcttgcatgtgttaaccttctcagtaactgagtgccattattgagagtgtgtgcatactggctggagggtccactagttgacactactttacaacaacaggaggaaagaatctgttaaaagaaggatccctggcagggtgcagtggctcacgcctgtaatcccaacattttgggaggctgaggcaggcagatcacctgaggtcaggagttcgagaccagcctggtcaacatggtgaaaccccgtctttactaaaaatacaaaaggtaccgagctcgaattcgaaatgcagttttatagctcttaaggnnnnnnnnnnnnnnnnnnnnnnnnnnnnnnnnnnnnnnnnnnnnnnnnnnnnnnnnnnnnnnnnnnnnnnnnnnnnnnnnnnnnnnnnnnnnnnnnnnnnaagagaatataattgagcatgaaatctcaatttttacattgatgacttatttggggtgatgacgttttgaatatattaggttagacaagattttaaagttaattttacctgtttctcttttactttttcagtgaccactagaaattttaaaactatgtaggtggctaacatcatattgctgttggatgcatcttttaagtgctgctgcctttgattgagctgagtgggttccagttaaccaggcttgagcac

SEQ ID NO: 40083 - DNA, 1077 bp, Homo sapiens
aggaccacatgacatagtgcgtgggaagaccctgtctactgaatggccagggagggcctctctcaggggtacccttgaggctgagatctgaatgaactactctcgtgaagatcagggtaaagagcattccaggcagagggaacagataatacaaaggacttagggtaagaacgaactgacttttagaataaacaccctggttagctaaagccarggcattaaaaggacacaatgaagaaaatgcctctaagggagatagaaccgaagggagatcatagctggttgtggagccaaaggtaaattattctttaagatgtactagatacttattggcagctgctaatagcaaaataaaaaaggtcctgttgttcacaactgaggcacaaaagtacttaggaatgtagggagcagacaccccctccacatttcacttggagccatgcggtctgtgtcaagatggcctgtgtgaagagccaccagttatagttcatgtgggtttccattattctttgggccttcactttgcccaaggcacacagttaatataaccacaagaatgtgaacacttttatttgttctgaaatatgcttttaacctttacagtgggaaaggcccttaatttatctattccttattattttccagccctcatattttctatttcctttctgtgctcctgaaaaacaagatgccatgtctaaaatcctgtgtgcctttgtgcagggcaaagccatgtcctcgtgcacagtcatggggtatggccgagggttatgtaacaagagctgttcctagtgcagttggctcctgcaggagaccatgatgtggcaactacaaagctcatcgcaggtaggctgagcatgaacttgtcaagcaagagccgtggctcggggcagcctcttggtcagctttgttctgactcagaattattcccttgaaatgcttggtttgggttcaaaagacccaagagttctgtttcatagaggggtgctcctgccagagtcatgatgtactagagatccatactttttttctctccccagtgggtgggtagatattggaaactagatctgttctgat

SEQ ID NO: 40084 - DNA, 1077 bp, Homo sapiens
aggaccacatgacatagtgcgtgggaagaccctgtctactgaatggccagggagggcctctctcaggggtacccttgaggctgagatctgaatgaactactctcgtgaagatcagggtaaagagcattccaggcagagggaacagataatacaaaggacttagggtaagaacgaactgacttttagaataaacaccctggttagctaaagccaaggcattaaaaggacacaatgaagaaaatgcctctaagggagatagaaccgaagggagatcatagctggttgtggagccaaaggtaaattattctttaagatgtactagatacttattggcagctgctaatagcaaaataaaaaaggtcctgttgttcacaactgaggcacaaaagtacttaggaatgtagggagcagacaccccctccacatttcacttggagccatgcrgtctgtgtcaagatggcctgtgtgaagagccaccagttatagttcatgtgggtttccattattctttgggccttcactttgcccaaggcacacagttaatataaccacaagaatgtgaacacttttatttgttctgaaatatgcttttaacctttacagtgggaaaggcccttaatttatctattccttattattttccagccctcatattttctatttcctttctgtgctcctgaaaaacaagatgccatgtctaaaatcctgtgtgcctttgtgcagggcaaagccatgtcctcgtgcacagtcatggggtatggccgagggttatgtaacaagagctgttcctagtgcagttggctcctgcaggagaccatgatgtggcaactacaaagctcatcgcaggtaggctgagcatgaacttgtcaagcaagagccgtggctcggggcagcctcttggtcagctttgttctgactcagaattattcccttgaaatgcttggtttgggttcaaaagacccaagagttctgtttcatagaggggtgctcctgccagagtcatgatgtactagagatccatactttttttctctccccagtgggtgggtagatattggaaactagatctgttctgat

SEQ ID NO: 40085 - DNA, 524 bp, Homo sapiens
cacacaaaacaataagcattcttttattaaagcccaatatgtaaaagatagtagcayggctaatcctccctctgacatgaggcattgcctctaaagccctaaggctcccgggagaacaacttgaaagacctgtatattagttttctattgtttctataacaaattaccaaaaacttagtggcctaaaaaaacacaaatttattatcttatagttctggaggtcaggagtccaaaatggatctcactgggctaaaattaagctgtcagcaggcctgaattcctttctaggggcttgaggagagaacttggtctttgccttttctagcttctggaggcctcctgcattccttggcttgtggccccttcctgcagcttcaaaaccagcagtggctcgtcgagtctttctcacatgacatcactctgatgctgactctcctgcctcccttttctgtgtttaaagggcctttgtgatcacatcgggcccacccaggtaacccaggataatctccctgctttaaagtcag

SEQ ID NO: 40086 - DNA, 535 bp, Homo sapiens
tgagaattagcatatctgccccacaaagctactttgatatttaaatgagaatatatatgaatggctcacactcatagtgattggcctacagtaagcacccaaatgaatacttgttgctcaataaccaaataggtgtatgtgaaataggtgtaaaattaatgtggttagttyctccgaatgcccttcttgctcctgctttttgttcttttcactgatgtaacatagcattatggtcttgtggttggttttcaaacaccaacaaatgaattggtaccaggctgacagcataaaattaccttgtcttgagcagtgactcacacctataatcccagcactttgggaggccaaggtgggaggactgcataaggccaggagttcgagaccagccttggcaacaaagtgagacgctccccctacccgtctctgcataaaaaaacttaaaaataaaattacctggagtgttcacacacacacacaaattccagatctcccttttgagatctgaaaggtgcctcagaaatctgaaacttagaaa

SEQ ID NO: 40087 - DNA, 686 bp, Homo sapiens
aagaaaaaaaatagaagacatccggatggagaagaaggaagcaaaacaatgttcattcatagcggacaaagctcaagatacaaaatgcacagttctatctatatttatctctatatattaaaaaccatggattgacactgaaccctccgactccaatctgacaccacagagttcattccagtttctccattttcaaatctgtaactcccttctccaatagttagacacctagatcccttttatcctcagtagatttactttttgagccaayagtccttctgtgtaactaatctccgatagccacaccatcttctatttgaatacattcctgtcttcagtctctgacccctcacctgcgctgggttgctctcccctaagcagtcacctcacagccagttacgactgccaatacccccttctggggcagacgcccttctgctcactcagcagccctcgctgggttgcccacaccttcactctcactccccccgtgggtgatgccctcctcactcctctggggttcctatattccacactgggccactaccactgcctcctcctcatctagacactccacctaatggtttttaggttgaattattgaagaggagagggagggaggatgagagagagggaggggaagggaactttttttaacctcaactacttcttacattcttgccaat

SEQ ID NO: 40088 - DNA, 866 bp, Homo sapiens
ttttgattaaaggctgcctgctctccactgggaactggacctctgatgatgaactttctccttgtgccatctactctttcatcaagcaaagcttcctgaagcatctgctgtatcaggagctctgctaagagacacagaagagactgtgactaccatttctatcaggtagctggtagtctagtggggaggaagacctggggtaaattgctgctaaagataagtactatgatggaggcttatcaagcattcattcattcaatgataaatgtctattgattatgagacaccagtcagacctgcactggaaactaaggatgcagagatgagaaaacattctggtcctgtccttgtccatctgtccatcctgtctaggagctgcttggcactaccagcattcttctctctccttttctcagtggaaatgaattcaaccagtgttgtagttggccagcagtttaaaataggacagtgaataaaacaagcattttccccctaggaactcagacagttggggctaaaggatttcactcttatccctttgtaccagatcctgccttgaggtaacctgagacggctggcttttcaaatcctgtgtgttctttcctagctggaagtttgttcttcctttgttttaaagtggggggaaatttatgtaaatggatctcagtcatgcaaagaagatttaattggtgatttaggggtataatctttttcctccattgaaaacttggaactggattgttcttgtctgaacctaawctgttttcttcccaggagtcctgactgattggggctcatccctctttggctgggagtctagtcctgggagtgcagggcttgtgtcttctcctgttgtgctaatttcc

SEQ ID NO: 40089 - DNA, 586 bp, Homo sapiens
gagtccttttttgaatacaccttgaaagtctgtttctgaatgactgggaatttcagcaatgcctgtggatgtgagtttcaaagagtcatatgtcgaaaacaaaaggcaacctggactagaggtcagaatgcctcggtgctagccctgagtgtttcacagagagcattagggkagttgtagggtaactttcaaagtattcaggcagcacagatttaagatgagaaggtactttgtctgacatcctcatatcctcattggctagaacagcaaaacataggctattgtatgagggcaggctagaaagtgtcaaactcacctgctcccctcttcttgtgccttctcttaggacaacattcccctccccaccccactacctcccagtttttggtgtatgtatgacaactacaaaataatttaactaaatatttaacttctaaagatataattgtaacagtcacagtaataatcgatggagtaatctgcaaaagtaaaacagcactgatgagcttcatagttgtttattatcattgtgccaggctttgctatttacaaatcacagccattgacatttttactgagaaatcac

SEQ ID NO: 40090 - DNA, 586 bp, Homo sapiens
gagtccttttttgaatacaccttgaaagtctgtttctgaatgactgggaatttcagcaatgcctgtggatgtgagtttcaaagagtcatatgtcgaaaacaaaaggcaacctggactagaggtcagaatgcctcggtgctagccctgagtgtttcacagagagcattaggggagttgtagggtaactttcaaagtattcaggcagcacagatttaagatgagaaggtactttgtctgacatcctcatatcctcattggctagaacagcaaaacataggctattgtatgagggcaggctagraagtgtcaaactcacctgctcccctcttcttgtgccttctcttaggacaacattcccctccccaccccactacctcccagtttttggtgtatgtatgacaactacaaaataatttaactaaatatttaacttctaaagatataattgtaacagtcacagtaataatcgatggagtaatctgcaaaagtaaaacagcactgatgagcttcatagttgtttattatcattgtgccaggctttgctatttacaaatcacagccattgacatttttactgagaaatcac

SEQ ID NO: 40091 - DNA, 1076 bp, Homo sapiens
actagagagatgtgaaaagatgacagggcatcctgggcctccacttggtccagtccccaccctcaggaagcctggatggcttcagagccatgctggtgggcagggatgctgccgtgtgcctgtgcaggcctgcgaaggtgttctcatagcaggtttttgcaacgtggccacggcctgcactccctgatgggtagcttgccggctcccatttctccaccctggactcatccatggggaatcatacttccatggccaatccgtggccatccctcagtccccattaggctgtgaccagccctctggtttccaagaatgccgtgcttcatccctatgacactttccccttcctaaaggacctgttcaaccttctgcttatttgctccttgtacccctttcctttgcctcttttctgatcttttgaccttggctctttaattattttctttttgtcctttagcggggtagtttgggccagggggctgctaggtggtagtgttaggctccaggagaaacatccacatgagatagctgaagttcttccctccatctccctcctcaccatctccccmatgaaatcattcacgggtttgcttccggccctccccgccagcttacaccaacaaccaagcggacatcgccacccagggctggttcattgggcttatgtgcgccatcgccctcctggtgctgatcctgctcatcgtctgtttcatcaagaggagtcgcggcggcaagtacccaggtgagatgtgcaagaggcgtgggcttgcagggtggggcacgtccactttcccgtgagtctccaggtctccagccagatccggggaatgtgttctctcagtgaagccagcccttgcccggattggaaatacaatcctcttgcctgtgcatcttcagactgccagcgagcacttgagttaattaagttcgcctgagttgggcggatggcacagtccaggcggcctcagagaggggatggaaggaaccctggctcctgttaagaatgacctttcctccccttgactcaccacccatctgttctataaattggctttttttcagcctgaatctcatta

SEQ ID NO: 40092 - DNA, 1076 bp, Homo sapiens
actagagagatgtgaaaagatgacagggcatcctgggcctccacttggtccagtccccaccctcaggaagcctggatggcttcagagccatgctggtgggcagggatgctgccgtgtgcctgtgcaggcctgcgaaggtgttctcatagcaggtttttgcaacgtggccacggcctgcactccctgatgggtagcttgccggctcccatttctccaccctggactcatccatggggaatcatacttccatggccaatccgtggccatccctcagtccccattaggctgtgaccagccctctggtttccaagaatgccgtgcttcatccctatgacactttccccttcctaaaggacctgttcaaccttctgcttatttgctccttgtacccctttcctttgcctcttttctgatcttttgaccttggctctttaattattttctttttgtcctttagcggggtagtttgggccagggggctgctaggtggtagtgttaggctccaggagaaacatccacatgagatagctgaagttcttccctccatctccctcctcaccatctccccaatgaaatcattcacgggtttgcttccggccctccccgccagcttacaccaacaaccaagcggacatcgccacccagggctggttcattgggcttatgtgcgccatcgccctcctggtgctgatcctgctcatcgtctgtttcatcaagaggagtcgcggcggcaagtacccaggtgagatgtgcaagaggcgtgggcttgcagggtggggcacgtccactttcccgtgagtctccaggtctccagccagatccggggaatgtgttctctcagtgaagccagcccttgcccggattggaaatacaatcctcttgcctgtgcatcttcagactgccagcgagcacttgagttaattaagttcgcctgagttgggcggatggcacagtccaggcggcctcagagaggggatggaaggaaccctggctcctrttaagaatgacctttcctccccttgactcaccacccatctgttctataaattggctttttttcagcctgaatctcatta

SEQ ID NO: 40093 - DNA, 575 bp, Homo sapiens
tgtttcaatcattcattccaaaacaattctaattttaaaatacagtgaaaaatgagacaaattatcacttgtctacaacttaatgtatgctgtgagttgtgacctatgacatcttcatttttattgatttttaaatattctacaacttcaactttgattagctataaagtttcaggtatttgaaactttgctatgatattgcttttcttgtccacacatttataattaactctcgttatatggacttcgtgaggaagaatgtactctgtaacactttggtcttttcgacttattggagtttcttcaacattttgtgcatgggtaataaatgtgaatttatacagacactgaaaaggaggactttcttattattagtcgattaaaaaaatttaaccaatttatctacatctttattttctttttttgatacagattgctcttwtaaatcaatatacttctgtcattttcacatcaataaattattgcatttctaacagtatttctaattttttgtggctttttaaaataaaaagtgccataaattttataggttttttattataaaatatgttgct

SEQ ID NO: 40094 - DNA, 1149 bp, Homo sapiens
aaatttctcccctccccagcttgggtccactttggctggagagctgaagtaagaaagggagatggagcacaggtggcttttttgtctgttacctctccacctacctctccacttaacccaaccccagcctgatagataggttctgaccaccgtagctcagagtgagctatgaagatcttctctatataaagcttccccaattccttggtgacatgttaatggacccttagaaagtttctctacctagacgatatatacatctatgtagatcaaagagaggtgtccagtgatgggcgtttccctgagtccatgaatatgccacatttcctgaacatcttgtgctatacccctaccccttttctgctgacggcttctccctttttcctctaagcagccaactaaacagagcccaagacatggtcatgtcccttccctgtgagactcacatctgtctgttggaaatgcttaccaatagactatgagagcacataaatttcagtgtactacctctgttctcttgccacacaggttttagtttcttcagatatgagtcaggcaacattggagggaaaatatttcaaagctgacaggtcccatggaaagctcctcagtatgattgagatgaaacagacaggttctcctttctccaccttgggtttggaagaagttgcatctcacagttttctctaaagatatccttctaattaaatttggtttcttactcttcttttacctttaattgtctatgaagtctaagaatcatggcttgagatttcttccactttctccaaaaattctgcataagaaagaggtctgttttgcacttactatggaattctgtgtgttctattttcaggtaaaagtgagccaggaaaattctatcatctagttttacaaaaatgtagaaggattagaggaattttcaaattttcttactgcattcttgaaggtgatttatcagccagtccttctggttctatcttcaaaatatacttttaatcagatcctatctttccatgttcactgctaccacacatgtccaaatcatcgatgtatcactcctggttrattaaaatagtctttctattgttattctttccactgtagcccctcttttagaaattcacctgctatattagataaagtagc

SEQ ID NO: 40095 - DNA, 648 bp, Homo sapiens
atcattgaaatgttatatttgcatacctgaagttgtaacagtgaattacgtaattatctagtaatatagtgataattcaggaaagtcttaggtgctgaatttttgcctgatttaatcttagcgggtaattgttttactctgagaattgaataagatacattttaaactatttttatatttttactgaaatcacggttatagttctaattaaaaatgtagatattatggactttacatytgattttatcattaaaaatacctaaatccacacacttaatggtcaataaaatgtaccagtgttactattgtttggtttttacagaatgccctggtaactgggctgcccaatggtaaagacactgctgaaaaagaagaaaactaaacacaatctactcaacctctgatagtgctactgcaaattttaattgacatactatttgttaaatatacaatatcaagttttcattaaacagatgaattaggtgaaaccatgcacttcaataaacgatgtcatttttgtctgactcttttgtaactcaggaaattgaaaatagaatttagtccaagaatgtctatttttatattagacttaaagttgttggcagaatgaatgaactatttcatatttgagagaataattaaagtatg

SEQ ID NO: 40096 - DNA, 1266 bp, Homo sapiens
ttacaattccttagttttaaagactgtggatctgctaacttatgaaggatactactatrttatttcttcttgatgtagccaaacttttacacaaatacaaagaaaaaaatcacaatgcttgataaattgacttaaattattttatttttgtctgcatgtctgtttctttgtagatattctttgcagcttatctgtaaagaagataaattttacaaagcaatggaaaaatatagtagcctggaaattcatatttctctctcaaaagccattttttgtcaaatgcctaatttaaaaattattttctttttcttttattgtcttttttaaaaagcttctaatttttttttttcttcctgaaagtacactgtcataaaggtttgcttccagtgttttacatgtattagttcattcgagtgagaaaaactaatttgttcagcccacacaaatacatttgtctggagttgaaaaacatttgaattgaaatgaccattttgatctttggcaacacacaaagtaacttttaataagtcacgtgacagtgccacagtaggtgtgttaggtttccttcaatagtcttgggaaaatatgattattttcttaggctgcttttgaatattcttagcttcagacagtttttctctctctttcctctcttcctctctctttccatacacacacatacattcatacatacttttaggggattgtaatttgagcctattgctccttgagtgaagatggaacatatctgtcacttgttttaaacaatcagattggttttctctagaattctacataagacattcccgatcttttttcatttttgtacttaagatgggtaccatcctatgaaatatgtttggtcccaaattgtagcttgaccataattatagagttttgacattgatgactaaataaatgtattctagtatttactaagaatcacatctgatcttgatcttacaattctcaaatgtagattccagtaatttcatattttttattttaattagctcatccatagaattccttaacactgatgcgttttcattgttagataaagcggttcccatagttggaaaaagattgaagatccgcatttacattctctttgttgacacttgatcccaaaatgtctgtgccttgaattcgcagctttagttttgagtggggacctgtaaagttgtgcacaatatgtctataaaatgtatgtatgaccctactgaaagtgaagtttctgcattcatccaattacgctgaacctaa

SEQ ID NO: 40097 - DNA, 1266 bp, Homo sapiens
ttacaattccttagttttaaagactgtggatctgctaacttatgaaggatactactatattatttcttcttgatgtagccaaacttttacacaaatacaaagaaaaaaatcacaatgcttgataaattgacttaaattattttatttttgtctgcatgtctgtttctttgtagatattctttgcagcttatctgtaaagaagataaattttacaaagcaatggaaaaatatagtagcctggaaattcatatttctctctcaaaagccattttttgtcaaatgcctaatttaaaaattattttctttttcttttattgtcttttttaaaaagcttctaatttttttttttcttcctgaaagtacactgtcataaaggtttgcttccagtgttttacatgtattagttcattcgagtgagaaaaactaatttgttcagcccacacaaatacatttgtctggagttgaaaaacatttgaattgaaatgaccattttgatctttggcaacacacaaagtaacttttaataagtcacgtgacagtgccacagtaggtgtgttaggtttccttcaatagtcttgggaaaatatgattattttcttaggctgcttttgaatattcttagcttcagacagtttttctctctctttcctctcttcctctctctttccatacacacacatacattcatacatacttttaggggattgtaatttgagcctattgctccttgagtgaagatggaacatatctgtcacttgttttaaacaatcagattggttttctctagaattctacataagacattcccgatcttttttcatttttgtacttaagatgggtaccatcctatgaaatatgtttggtcccaaattgtagcttgaccataattatagagttttgacattgatgactaaataaatgtattctagtatttactaagaatcacatctgatcttgatcttacaattctcaaatgtagattccagtaatttcatattttttattttaattagctcatccatagaattccttaacactgatgcgttttcattgttagataaagcggttcccatagttggaaaaagattgaagatycgcatttacattctctttgttgacacttgatcccaaaatgtctgtgccttgaattcgcagctttagttttgagtggggacctgtaaagttgtgcacaatatgtctataaaatgtatgtatgaccctactgaaagtgaagtttctgcattcatccaattacgctgaacctaa

SEQ ID NO: 40098 - DNA, 1266 bp, Homo sapiens
ttacaattccttagttttaaagactgtggatctgctaacttatgaaggatactactatattatttcttcttgatgtagccaaacttttacacaaatacaaagaaaaaaatcacaatgcttgataaattgacttaaattattttatttttgtctgcatgtctgtttctttgtagatattctttgcagcttatctgtaaagaagataaattttacaaagcaatggaaaaatatagtagcctggaaattcatatttctctctcaaaagccattttttgtcaaatgcctaatttaaaaattattttctttttcttttattgtcttttttaaaaagcttctaatttttttttttcttcctgaaagtacactgtcataaaggtttgcttccagtgttttacatgtattagttcattcgagtgagaaaaactaatttgttcagcccacacaaatacatttgtctggagttgaaaaacatttgaattgaaatgaccattttgatctttggcaacacacaaagtaacttttaataagtcacgtgacagtgccacagtaggtgtgttaggtttccttcaatagtcttgggaaaatatgattattttcttaggctgcttttgaatattcttagcttcagacagtttttctctctctttcctctcttcctctctctttccatacacacacatacattcatacatacttttaggggattgtaatttgagcctattgctccttgagtgaagatggaacatatctgtcacttgttttaaacaatcagattggttttctctagaattctacataagacattcccgatcttttttcatttttgtacttaagatgggtaccatcctatgaaatatgtttggtcccaaattgtagcttgaccataattatagagttttgacattgatgactaaataaatgtattctagtatttactaagaatcacatctgatcttgatcttacaattctcaaatgtagattccagtaatttcatattttttattttaattagctcatccatagaattccttaacactgatgcgttttcattgttagataaagcggttcccatagttggaaaaagattgaagatcygcatttacattctctttgttgacacttgatcccaaaatgtctgtgccttgaattcgcagctttagttttgagtggggacctgtaaagttgtgcacaatatgtctataaaatgtatgtatgaccctactgaaagtgaagtttctgcattcatccaattacgctgaacctaa

SEQ ID NO: 40099 - DNA, 1266 bp, Homo sapiens
ttacaattccttagttttaaagactgtggatctgctaacttatgaaggatactactatattatttcttcttgatgtagccaaacttttacacaaatacaaagaaaaaaatcacaatgcttgataaattgacttaaattattttatttttgtctgcatgtctgtttctttgtagatattctttgcagcttatctgtaaagaagataaattttacaaagcaatggaaaaatatagtagcctggaaattcatatttctctctcaaaagccattttttgtcaaatgcctaatttaaaaattattttctttttcttttattgtcttttttaaaaagcttctaatttttttttttcttcctgaaagtacactgtcataaaggtttgcttccagtgttttacatgtattagttcattcgagtgagaaaaactaatttgttcagcccacacaaatacatttgtctggagttgaaaaacatttgaattgaaatgaccattttgatctttggcaacacacaaagtaacttttaataagtcacgtgacagtgccacagtaggtgtgttaggtttccttcaatagtcttgggaaaatatgattattttcttaggctgcttttgaatattcttagcttcagacagtttttctctctctttcctctcttcctctctctttccatacacacacatacattcatacatacttttaggggattgtaatttgagcctattgctccttgagtgaagatggaacatatctgtcacttgttttaaacaatcagattggttttctctagaattctacataagacattcccgatcttttttcatttttgtacttaagatgggtaccatcctatgaaatatgtttggtcccaaattgtagcttgaccataattatagagttttgacattgatgactaaataaatgtattctagtatttactaagaatcacatctgatcttgatcttacaattctcaaatgtagattccagtaatttcatattttttattttaattagctcatccatagaattccttaacactgatgcgttttcattgttagataaagcggttcccatagttggaaaaagattgaagatccrcatttacattctctttgttgacacttgatcccaaaatgtctgtgccttgaattcgcagctttagttttgagtggggacctgtaaagttgtgcacaatatgtctataaaatgtatgtatgaccctactgaaagtgaagtttctgcattcatccaattacgctgaacctaa

SEQ ID NO: 40100 - DNA, 1034 bp, Homo sapiens
aaataaaagcaaatttctgcctgaatgtctaactaactgttagaaaaaacagctctaaccaagctgttttcttatttcctgattcacaagtatgaagtcacatcaaatagtatcatttgttctagaggtaaagaatgatgtctctgtcctttttcagttctattttttaaactttacagtaatgttggttcaatttctgtaacagtggttcattgatgttctgttttgttcttttttgttttgttctaagccactgtgtttttgttttttgtttgttttaagccactgacttcatttttgttattgtggtaaaatacacataatataaaatttgccatctcaaatatttttaagcatatggtttagtggaattaatacattcctaatgttgtgtatccaacactgtcatccatcttcataacacttttcatcttgtagaactgaaactctcaatatattaaacaataactctccattttctctgaaaattattccaccattttctctgaaaataaatcaccattttctctgaaaataaaccaccaacgtggttaggtattagaaggttgatccttttgggaggtggttaggtcatgaggtcagagctstaaagaatcggattagtgcctgtataaaagaggttcaagattgttgtcttgctccttccacatgcgaggacatagcaagaagccttatgtctgaaccaggaaactggcccccctcagacactgaatctgctggtttcctgatcttgaacttccctgcctttagaactctgagaaataaatatttataagccactcaatttatggtattttttaatagtaactcaaacgtactaagatatctcctcccccagcctctggcaaccactattttatttttgtctctaaaagtttaacttctctaagtactctatgtgagtgaaatcataaagtatttgtctttttgttactagtttatgtcacctagcataatgtcctcaaagttcatccatgttgtagcatatgtcagaatttcattccccttaaaag

SEQ ID NO: 40101 - DNA, 1034 bp, Homo sapiens
aaataaaagcaaatttctgcctgaatgtctaactaactgttagaaaaaacagctctaaccaagctgttttcttatttcctgattcacaagtatgaagtcacatcaaatagtatcatttgttctagaggtaaagaatgatgtctctgtcctttttcagttctattttttaaactttacagtaatgttggttcaatttctgtaacagtggttcattgatgttctgttttgttcttttttgttttgttctaagccactgtgtttttgttttttgtttgttttaagccactgacttcatttttgttattgtggtaaaatacacataatataaaatttgccatctcaaatatttttaagcatatggtttagtggaattaatacattcctaatgttgtgtatccaacactgtcatccatcttcataacacttttcatcttgtagaactgaaactctcaatatattaaacaataactctccattttctctgaaaattattccaccattttctctgaaaataaatcaccattttctctgaaaataaaccaccaacgtggttaggtattagaaggttgatccttttgggaggtggttaggtcatgaggtcagagctgtaaagaatcggattagtgcctgtataaaagaggttcaagattgttgtcttgctccttccacatgcgaggacatagcaagaagccttatgtctgaaccaggaaactggcccccctcagacactgaatctgctggtttcctgatcttgaacttccctgcctttagaactctgagaaataaatatttataagccactcaatttatggtattttttaatagtaactcaaacgtactaagatatctcctcccccagcctctggcaaccactattttatttttgtctctaaaagtttaacttstctaagtactctatgtgagtgaaatcataaagtatttgtctttttgttactagtttatgtcacctagcataatgtcctcaaagttcatccatgttgtagcatatgtcagaatttcattccccttaaaag

SEQ ID NO: 40102 - DNA, 541 bp, Homo sapiens
tttccaatgaaaactatggggtttataactgtagcatcataaatgaagctggagctgggagatgcagctttcttgttacaggtaggattccagatattttctttttatacattttgttttattagaccaagagatcttagacctatgtcaatataagaatgaaaacatttgtaaatcaatggagcatagaacagcttgactcctcaagttagagtttctacaaatttatttttaagtcaaatttattttaatagttaaaagaatgsacaggcctacaaaattacatagaaggttatctgaattctagtagagttagtgaggaggaaattggttattatattagtcaattctcacagtgctataaagaactacctgagactgggtaatttatgaagaaaagaggtttaactgactcagttctacaagctaaacaggaagcatgactgggaagcctcaggaaacttacagtcatggcaaaaggcaaaggggaagcaaggacctacttcacatggtggcagcaaagagagagagagtgaagggg

SEQ ID NO: 40103 - DNA, 2752 bp, Homo sapiens
tgcattaaaagaaaatactcctcattttctttgtcataggtaaagttagttgtaatagttgaaatgttcatggtagtaaaaaaaagaaactggacattatgtgttatctaaaaagaagtcataaaaatgattaaaatgttccagacttaaaacttattaatagcataaattctaagtggtaatttctaactcatgagggaactctctaattatgaactgcctttcgccatttttgctttctgaaatgtaatattagctagtctaatctaggaaagcatatcagatgtctggatgaaactttgaaacaccaattagttcatttactaaaacatatcaggattagtattccttatgaatttctcatgactcgaaactttgaatctaacgtaagagagtcagggaatagaagtatacaaagatccatatatttttaatgcacaaagcaaatctttcaagataatgctgtttacttctgagactcaaccaaaaacattttaaattttattttttcaattattttactcttccacttaccatgaattttgtatagtcatcccaaagtacacttgatctacctatacaccgaaatgtacggaattgaactaaaatgcaatgacgtctatacctgtattagctcacaggaaatcttaaaagattattcctcttttctttcttcttttaaaattctatgtttatgatgtatgttagagtaaggggctaagagaatacmgttgtgttcacttaaatgtcagaaggggtgtgaaaatagtttcctgctaggaaaaagaacaaagtaagcaaaggtattttggaaactgtgatgagcctagcttgtagtatattatccatgttaaagataattaactataatactaaaaaatactttgcatttgcatatattttatttactcgtattttaatggtgaagtcatagcagttttatgaggtttaagtgagcttcatgagctttagtagaaacccagatgccatttttcatcttctatgatgggctattttttacaagttctaaaggttaaggtagcatattgatttattagaataagcccatttgtaaatttgaaattccaagtattatctatattacttatatattaatatgtagacataaatagttctattttaatagttctgtaatattatagcacaggatttaactggagcatgcatttcagtttatcaaagattcaaaatgtctcaatatttaactctggaaaaacatatacttcaatacttcaaaatatctgggcttattttttcatggcatgactgaatatcattctatgttataccccattatgtcccatcacatttcttgatctagaaaagaaaaccagtaaatctagagtgattaaatagatggaggatgaacaaaagagttaatgattcagtgaaagaaaatttctgaaaataatttttaaatgagaaaaaagtgaatacagagagggtaaaaggatggcttaagttgaaaataaatcatatatattttaggaagctagctagtgccctctgaaaaagataagtctatgttctaatccctggaacctgtggatattaacttatatggcaacatatgtaattaagttaaggattttgagagaaggaacttatcttgaattatctgggtgggcctcaaatgcaatagcatgtattcttataagagagaggcagggggagttttgagagagaagaggaggcaatgtgagtgtgcagtaatgcaaccacaatctgaagaacccctggagccacaagaagctggaagagccaaggaatatattctcccctggagtctctacagaagtaggaagtagggtcctgccaagaccttggtttcagactcctggccttcagacttgtgagaagatagtttttgtttgtttgtttgtttaagccacccagtttgtggctgtttgtcgtggcagtcttagataacaaatacactttacaactcactatttcaaagaaccctgctgttaaaaattatacgagatgaatagaacagttttgtcaactgtcctcagttttatcacactaagcaagctagaccctggagacatgggtgcacgtgtcttacaactcagcaaagttgtgagaaggggttgcttttgccacctaaagggctaactggaataagcttacaactgcaagaagcagtcaatgaggaaaatcaacctgcgaggtttcaggtcacctacatcagtagactgtgtaggtttaagctacacattggcttaaaccaaccccaagggatgcttcaacattgaaatgttatgcccattacacaatatagcagagaaaagatgtttccagcagcttgattatataggaaaccagatgacagaatctactggtagattcggttgacagcaccagagattaatgaagatgcacttttattctttttttgaacgtgaagatacaggcaatctgcagcaaaatgcagcatttatttataaagttttaaattatctatgtctttcaaattgttctaattgatattcctaaatatttagcaatcaagatgttagttctaagctattctaattatgttcccactaactacactttcttcatatttctttactttaacagacttgtttctgacattatgtttttactgaaatgtttatgggcatcgggagactaatatttcttgacaagtcaggcaagacaataatgtgaaaaaaagcatagtttttatatttagcttttttgttttgtctagttgcttaaa

SEQ ID NO: 40104 - DNA, 2752 bp, Homo sapiens
tgcattaaaagaaaatactcctcattttctttgtcataggtaaagttagttgtaatagttgaaatgttcatggtagtaaaaaaaagaaactggacattatgtgttatctaaaaagaagtcataaaaatgattaaaatgttccagacttaaaacttattaatagcataaattctaagtggtaatttctaactcatgagggaactctctaattatgaactgcctttcgccatttttgctttctgaaatgtaatattagctagtctaatctaggaaagcatatcagatgtctggatgaaactttgaaacaccaattagttcatttactaaaacatatcaggattagtattccttatgaatttctcatgactcgaaactttgaatctaacgtaagagagtcagggaatagaagtatacaaagatccatatatttttaatgcacaaagcaaatctttcaagataatgctgtttacttctgagactcaaccaaaaacattttaaattttattttttcaattattttactcttccacttaccatgaattttgtatagtcatcccaaagtacacttgatctacctatacaccgaaatgtacggaattgaactaaaatgcaatgacgtctatacctgtattagctcacaggaaatcttaaaagattattcctcttttctttcttcttttaaaattctatgtttatgatgtatgttagagtaaggggctaagagaataccgttgtgttcacttaaatgtcagaaggggtgtgaaaatagtttcctgctaggaaaaagaacaaagtaagcaaaggtattttggaaactgtgatgagcctagcttgtagtatattatccatgttaaagataattaactataatactaaaaaatactttgcatttgcatatattttatttactcgtattttaatggtgaagtcatagcagttttatgaggtttaagtgagcttcatgagctttagtagaaacccagatgccatttttcatcttctatgatgggctattttttacaagttctaaaggttaaggtagcatattgatttattagaataagcccatttgtaaatttgaaattccaagtattatctatattacttatatattaatatgtagacataaatasttctattttaatagttctgtaatattatagcacaggatttaactggagcatgcatttcagtttatcaaagattcaaaatgtctcaatatttaactctggaaaaacatatacttcaatacttcaaaatatctgggcttattttttcatggcatgactgaatatcattctatgttataccccattatgtcccatcacatttcttgatctagaaaagaaaaccagtaaatctagagtgattaaatagatggaggatgaacaaaagagttaatgattcagtgaaagaaaatttctgaaaataatttttaaatgagaaaaaagtgaatacagagagggtaaaaggatggcttaagttgaaaataaatcatatatattttaggaagctagctagtgccctctgaaaaagataagtctatgttctaatccctggaacctgtggatattaacttatatggcaacatatgtaattaagttaaggattttgagagaaggaacttatcttgaattatctgggtgggcctcaaatgcaatagcatgtattcttataagagagaggcagggggagttttgagagagaagaggaggcaatgtgagtgtgcagtaatgcaaccacaatctgaagaacccctggagccacaagaagctggaagagccaaggaatatattctcccctggagtctctacagaagtaggaagtagggtcctgccaagaccttggtttcagactcctggccttcagacttgtgagaagatagtttttgtttgtttgtttgtttaagccacccagtttgtggctgtttgtcgtggcagtcttagataacaaatacactttacaactcactatttcaaagaaccctgctgttaaaaattatacgagatgaatagaacagttttgtcaactgtcctcagttttatcacactaagcaagctagaccctggagacatgggtgcacgtgtcttacaactcagcaaagttgtgagaaggggttgcttttgccacctaaagggctaactggaataagcttacaactgcaagaagcagtcaatgaggaaaatcaacctgcgaggtttcaggtcacctacatcagtagactgtgtaggtttaagctacacattggcttaaaccaaccccaagggatgcttcaacattgaaatgttatgcccattacacaatatagcagagaaaagatgtttccagcagcttgattatataggaaaccagatgacagaatctactggtagattcggttgacagcaccagagattaatgaagatgcacttttattctttttttgaacgtgaagatacaggcaatctgcagcaaaatgcagcatttatttataaagttttaaattatctatgtctttcaaattgttctaattgatattcctaaatatttagcaatcaagatgttagttctaagctattctaattatgttcccactaactacactttcttcatatttctttactttaacagacttgtttctgacattatgtttttactgaaatgtttatgggcatcgggagactaatatttcttgacaagtcaggcaagacaataatgtgaaaaaaagcatagtttttatatttagcttttttgttttgtctagttgcttaaa

SEQ ID NO: 40105 - DNA, 2086 bp, Homo sapiens
tgcatttaactcctctttaatgctgtttgcatattgcaaaatgtacatttcagagacaggaacaaactggtaagttaattttgttttctaaattgttggttggaaagaaagaggcacgcggctcttagtgtaggtgagtttattagatgaatctgaaatatatttttataacttcaatgtaccattacttattaacttaaaaaattaagatcattcccaagccctttagctttttaaataataaatattattttcactagagagtcacaccttgctgattatttygtgatgctcataagggaaatgcctacaatattaagaatggaatctaattttacagtcttttcaatgattctcttcgactggcagattttcttaggtcattgtttcccaaactttattctctgggatgctagtcctcagagatgttcccccttggtagatgcaatcagcctctccagtaatgtgacaatttgcatgttagcatgttcaaagctctgaaaagtttgggagaaatacgaactttttttcatatagtcaattttcaaactttatttgttacactttggttggttgtttgtttctttgtttgtggtggagttttgctcttgttgtccaggctggagtgcagtggcctgatcttggctcactgcaacctccggttcccgggttcaagagtttctcctgcctaagcctcccaagtagctgggattacaggcgcctgccaccacgcctagctaattttttgtatttttagtagagatggggtttcactgtgttggacagactggttttgaaatcctgacctcaggttctctgcccgtctcagcctcccaaagtgcaggcatgagccactacacctggcctacactttgttttaatgtaacctcattaaccattttctgaaacaggttttagcaaatactatttcagacaatgtaaatgtgcgtagatgtcagttttttttttccttcttccatcttcagattatcaactgattatcagttgagtaattatccatatttgctcagaaatgattattatctgaagcatataaacaagcccttttggatgaaatcctcctttacaaagagagttgtctgatagccgatgtcccatacacatagctaactagtcagtggatgtgctagaatgaggtttcttgtgttgtgtacagaattctcttcctcacatatattcccatgttgatgctgtttgttcatcaagtgttattctgttcccacaacaaaatcactgaatccttgaggacatcaaatctgttctttttcctattctatttccccagatgcatctcagaacacaagactgcaacacaaaatcaaaattaacaggaacttaccatactgaatggaaacaattggcatttgtaaagttaatgctttgaaatgtcaattataattaaattcaataaagagtattaagtaccaactttaacaatgcaccatattcaggatttgggggcaatgaagaagagtaaggtgtacccactccaaccccaggtgttcacagccctattgaggagaaagataggttcctagttatagtaggacagattatacatactatcgtttactatcttttaagttgctttgctgatgtaacctatttccaactgcttatttaattggcattcagtgggtcaggaaaatacttcatctttcacacatagatatttttattctcttcagcaaagaataaataggaaattgatttttatttatctgattgcactattaatggtttctatatccagatctcaacaaggttttgtcagtcctttaggttgtccagaatcctacaacctgattataaaacataatcgatttagagagtcttttcagcaatttatcaacctgaaatggtgatcagtggtcactctgtatcttacattcttctgaaatagatacttaacagaagctaaaaagctgacacctcatatttattatctccaaagagatgcttttcacattaaagtataagactgttgtctttttttgttctgtcaataaattttagtttattattgaattactatgtattgcatacttcatggaacatttgacca

SEQ ID NO: 40106 - DNA, 2086 bp, Homo sapiens
tgcatttaactcctctttaatgctgtttgcatattgcaaaatgtacatttcagagacaggaacaaactggtaagttaattttgttttctaaattgttggttggaaagaaagaggcacgcggctcttagtgtaggtgagtttattagatgaatctgaaatatatttttataacttcaatgtaccattacttattaacttaaaaaattaagatcattcccaagccctttagctttttaaataataaatattattttcactagagagtcacaccttgctgattatttcgtgatgctcataagggaaatgcctacaatattaagaatggaatctaattttacagtcttttcaatgattctcttcgactggcagattttcttaggtcattgtttcccaaactttattctctgggatgctagtcctcagagatgttcccccttggtagatgcaatcagcctctccagtaatgtgacaatttgcatgttagcatgttcaaagctctgaaaagtttgggagaaatacgaactttttttcatatagtcaattttcaaactttatttgttacactttggttggttgtttgtttctttgtttgtggtggagttttgctcttgttgtccaggctggagtgcagtggcctgatcttggctcactgcaacctccggttcccgggttcaagagtttctcctgcctaagcctcccaagtagctgggattacaggcgcctgccaccacgcctagctaattttttgtatttttagtagagatggggtttcactgtgttggacagactggttttgaaatcctgacctcaggttctctgcccgtctcagcctcccaaagtgcaggcatgagccactacacctggcctacactttgttttaatgtaacctcattaaccattttctgaaacaggttttagcaaatactatttcagacaatgtaaatgtgcgtagatgtcagttttttttttccttcttccatcttcagattatcractgattatcagttgagtaattatccatatttgctcagaaatgattattatctgaagcatataaacaagcccttttggatgaaatcctcctttacaaagagagttgtctgatagccgatgtcccatacacatagctaactagtcagtggatgtgctagaatgaggtttcttgtgttgtgtacagaattctcttcctcacatatattcccatgttgatgctgtttgttcatcaagtgttattctgttcccacaacaaaatcactgaatccttgaggacatcaaatctgttctttttcctattctatttccccagatgcatctcagaacacaagactgcaacacaaaatcaaaattaacaggaacttaccatactgaatggaaacaattggcatttgtaaagttaatgctttgaaatgtcaattataattaaattcaataaagagtattaagtaccaactttaacaatgcaccatattcaggatttgggggcaatgaagaagagtaaggtgtacccactccaaccccaggtgttcacagccctattgaggagaaagataggttcctagttatagtaggacagattatacatactatcgtttactatcttttaagttgctttgctgatgtaacctatttccaactgcttatttaattggcattcagtgggtcaggaaaatacttcatctttcacacatagatatttttattctcttcagcaaagaataaataggaaattgatttttatttatctgattgcactattaatggtttctatatccagatctcaacaaggttttgtcagtcctttaggttgtccagaatcctacaacctgattataaaacataatcgatttagagagtcttttcagcaatttatcaacctgaaatggtgatcagtggtcactctgtatcttacattcttctgaaatagatacttaacagaagctaaaaagctgacacctcatatttattatctccaaagagatgcttttcacattaaagtataagactgttgtctttttttgttctgtcaataaattttagtttattattgaattactatgtattgcatacttcatggaacatttgacca

SEQ ID NO: 40107 - DNA, 517 bp, Homo sapiens
cgtttctcacacaatgggcagcacgagcccctggggctgctgcggggcccagcccagctgggtgtagtgctggacttgcaggttcaggagctgctcttctatgagccagcctccggcacagtgctctgtgcccatcatgtgtccttcccggggcccctcttcccagtctttgctgtggccgatcagaccatttctatcgtccgctgacctctggccacaggaagccaggtccaccgcccaccaccctttcaggccatgtttctactcagtgtgcttttcccaaatgatgtgtgtggtgtttctaagagaaacagggcccataaccagtgggcagctttaggagggatggggatctgtttcagatctaggcataacctgtaaatcacaggtgtccaaacttttggcttccctgggccacatttgaagaagaattttcttgggccacataaaatacmctaacgatagctgatgagctaaaaaaaaaaaaaaagtctgtgtataatttttgtgatatctg

SEQ ID NO: 40108 - DNA, 670 bp, Homo sapiens
agaggtccaagtaaaattgtaatgtagcttgtattattagatttagtgtctcaatctcagtacaagagtttcttctgaattcaatagcacaggtactctagcacctgaggacaagccagaccaatgattttctagcaggctaaattcagagtgtcctgcctttagatgatgttagtgactatgcaaggcagcttcaaagatgaccctcgaaatcagcaaagaaatattggacttaatctgcactatagaccaaataaatctaatagatatttacagaacattctatccaagaactgtagagtacacattcttttcctcagcacttggatcattctcaaggatagaccatatgttaggtaacaaaacaagtcttaaaacattcamaaaacttgaaataatatcaaacatcttctctgaccacaatggtataaaactagaaattaaaaacaaaaggaattttggaagctatataaatacatggaaattaaacaataggctcctgaataaccaatggaccaataaagaaattaagaaggaaattgaaaagtgtattgaaataaatgataattgaaacacaatataacaaaacctgtgggatacagcaaaagcagtactaagagggaagtttatagatgtgtctacatcaaaaaaagtggaaaaacttcaaaca

SEQ ID NO: 40109 - DNA, 961 bp, Homo sapiens
gcttctgctgaaagtctaccctgaattgacagtagagataaaaatctagagtaacctggccagactgaaacattcccttaatggcccttgaaacgagttttggggaaaaacaaaagtccaaactgtcatacatagaaaggttggttgggtcgtttttgtctttttttaagtaagaagaagggacagtgaaaatgaggtttcaagattgtttgcctctgtttccacaattctcttttcagatggattatttattttcccttctgtaaagagagactacttcttgatgcctcagtgtatatacacagccatatttatgactttttcatatggtgactgataaytacccactctcagtccatgttcagttttttgagtggtagtgtcaagaattagtcacagacacaatggctgctgattcagattgtgtgtcttctctatgttataaattataatcccatttatcctgtacatcacttgacaccagagcaaggcaagatatttgggaggacccaagtgagtctttcagaataaaagatttgccttaataatagaaatactactagtggtgatgatgtttttgatggtgttgatgatgataatgacacagtgatgatgatgatgatacccttagttctccagccctaatataatgtaggctagcattttcacctttagagaaggaactccatagcaatgtttctcaattcttttcatggtacatacaaaataagattattttcacactgtagtaaaaggaaaagacttcttattgtcagagttgaatagtccaagactctggctaccctagtgccacccccactgccccccgacccctgagtgctagtggtcaatatttcagcacacctgtaactgttgcacacagattcaaaaagccctctaatctagacagcagatgacaaaaagcttccttctgattcagactcacatagtagttttccca

SEQ ID NO: 40110 - DNA, 893 bp, Homo sapiens
tgaggtaggcaccatctgttatggacaatggaacctcagcctactcaaaatgattaaagattctttttatgttttcttagcaaaaattacatcagcaaattacatcctgtctgtctggactgcatatagttgcttggattgggaaactgcacttttcttgtctgactcatggtatttaaacttcctactatcagccataaaaggccatggactggtagggttagatcacgatttaactcttaggtcagtctcttactattaggccttgagcaagttgctgattttctttgagattcagttttctttttgctaaatgggaaaaataataattcttatctcacagtgctgttatggaattaaaaggagataacagctttgtccctgaaacatatttgtacttaataaataatggcttactccctacttacttttctttgcatcagaaccttgatggccatgtcactgtacaaatattttacgcacaagagtgaacatgttgtcatttttagccatgggtatattaactcatagtagggacccaactagtacttgttcttttcttactcatcttgttgtaattgatcatattttctaataaaaaggggaaatttggaacataaggcaggagaggtrtcagtcttatccactatgacatttcccttcatgtttaactttatcatatagcccccattatcaaccccatgatataacatttggaaaattataggcactcagtatatatttgttgaataattgagtagctgactgaataaataaatgaataagtgatttacaggtaagccgtgatgagaataggagctgactggagcataagcagtgactagtagtggcatggttgtgctcagaggaagggcatcaaatcaatgggtcct

SEQ ID NO: 40111 - DNA, 893 bp, Homo sapiens
tgaggtaggcaccatctgttatggacaatggaacctcagcctactcaaaatgattaaagattctttttatgttttcttagcaaaaattacatcagcaaattacatcctgtctgtctggactgcatatagttgcttggattgggaaactgcacttttcttgtctgactcatggtatttaaacttcctactatcagccataaaaggccatggactggtagggttagatcacgatttaactcttaggtcagtctcttactattaggccttgagcaagttgctgattttctttgagattcagttttctttttgctaaatgggaaaaataataattcttatctcacagtgctgttatggaattaaaaggagataacagctttgtccctgaaacatatttgtacttaataaataatggcttactccctacttacttttctttgcatcagaaccttgatggccatgtcactgtacaaatattttacgcacaagagtgaacatgttgtcatttttagccatgggtatattaactcatagtagggacccaactagtacttgttcttttcttactcatcttgttgtaattgatcatattttctaataaaaaggggaaatttggaacataaggcaggagaggtgtcagtcttatccactatgacatttcccttcatgtttaactttatcatatagcccccattatcaaccccatgatataacatttggaaarttataggcactcagtatatatttgttgaataattgagtagctgactgaataaataaatgaataagtgatttacaggtaagccgtgatgagaataggagctgactggagcataagcagtgactagtagtggcatggttgtgctcagaggaagggcatcaaatcaatgggtcct

SEQ ID NO: 40112 - DNA, 590 bp, Homo sapiens
ttggccgcactgtaggccgccttctctcctagcatcattctgatgtaaataaggaagtaacactatgtgtattggaatcaatgagaaaattgagttgttcagagagaacacaggtcacaggacaggaacctcatcaaaatcagtaaatccagactgactcaggaaagataaaccttctcagtctagaaaattaaacttcggcatagaggaggaacttatacggtgacccccatgatggcagatgaccccgtgacagcaaggaggatgccctctacattcctgcctcaccggcagcgcgtgacagagtgcttggaacctgtgacggcaaggatgccctctacattcctgcgtcaccggcagcgtgtgacggagtgctcagaacccgtgacggcaaggaggatgtcctctacattcctgcctcactggcagcacacagcasagtgctcggaaccccgtgacagcaaggaggatgtcctctacattcctgcctcaccagcagcgcatggcagagtgctcggaacccatgacagcaaggaggatatcctctacattcctgcctcaccggcagcacatggcagagtgctcggcac

SEQ ID NO: 40113 - DNA, 707 bp, Homo sapiens
gatggagatgaggttctcctcccaggagcacctgctcagctatcatgcattggccacgtgaggcaccagctcagatccggtcctccggggacgggagatcccatgcctgcggtcgtggccccaatccgtctggctcctgtcattctgtgggatcctaggcaagtttgtgaactttcctaggctcagcctcctgcctctggacagaagcagcagtagctaacactgcagccctggcctaagcatttgatrcgtcactcattcctcagcacaaaaagcaccaagccaggactattacttctgctgttttcttgacaaggaaatgcaggtgcagaagtgatccatgagtgcgagcggcccggtgtcacccttgtgcggtgtctgaacattctcccgtgactgccttttcatttgcaatgggggcccctctcccaggcccctccacaccctctcctgagagcagaggctgtcattctcctggtacctgcagtggtgtccagagcctcaatctctgttacaagaacaaaatctggcttgttttgaaaacaggaagaagcatttttggaatcccattatgaaaattaagaaaacacggaaactgctaaaatttcagatccaagaatgaatcttggagcaaggaaaagctatcaaggtcgcccgaaaggggcatctgttgggatcctggagaagcaggcaggaggtgaccttgc

SEQ ID NO: 40114 - DNA, 707 bp, Homo sapiens
gatggagatgaggttctcctcccaggagcacctgctcagctatcatgcattggccacgtgaggcaccagctcagatccggtcctccggggacgggagatcccatgcctgcggtcgtggccccaatccgtctggctcctgtcattctgtgggatcctaggcaagtttgtgaactttcctaggctcagcctcctgcctctggacagaagcagcagtagctaacactgcagccctggcctaagcatttgatgcgtcactcattcctcagcacaaaaagcaccaagccaggactattacttctgctgttttcttgacaaggaaatrcaggtgcagaagtgatccatgagtgcgagcggcccggtgtcacccttgtgcggtgtctgaacattctcccgtgactgccttttcatttgcaatgggggcccctctcccaggcccctccacaccctctcctgagagcagaggctgtcattctcctggtacctgcagtggtgtccagagcctcaatctctgttacaagaacaaaatctggcttgttttgaaaacaggaagaagcatttttggaatcccattatgaaaattaagaaaacacggaaactgctaaaatttcagatccaagaatgaatcttggagcaaggaaaagctatcaaggtcgcccgaaaggggcatctgttgggatcctggagaagcaggcaggaggtgaccttgc

SEQ ID NO: 40115 - DNA, 637 bp, Homo sapiens
ggaaaatgcactgaactccctttttgcatcatgaaattcctgtattcaaaatactgtccgccaaagtaattcttacctttgaacagaatccttacctctaagaacatactctatgattaactgctttttctatttcaaaaacccttactttgctctttggagatggaaatctcaaaatcactccttctagcagatctcagaggccaagacccatcagctcatcctttaattgggtctttggctataagatgaaagtctgtagaataccagtggctttaagaagttttataatttgtcacgcattcttcttaagtgttttctaagtggtgcccaactgagaaaggggaattgtaaaagcaacgttctacttcaataggaaacgcagaactgggccctgattcacagggacagacctggtctctggcgagctctgggcctgtggagcgacctggctcactggagaatgggaccctcaggcccccaaggccacaccctacacgtctgtacrggatggcactcggcgggtggcccttttctaatgtgtaccctgctgtggggctggctctcagcaaagcagcgctcaccgaaacgaaagtaaaacagaggccggttccctgcggtgctggccacccgctcc

SEQ ID NO: 40116 - DNA, 866 bp, Homo sapiens
attaaggaggcaatgcgcatttgttgagtcctgccagctaattatagataaaacaagctttctgagagctgtgaatgtggattttctatggtgttacttatctgcatgccggcatttctcaccaacgctgctctgcaccgcacagcactgctgactcggagaacaacttctgctttccttgaggaattctcaaccaccagttttcatgcaaggcactgactatgaaaacttcagtcctattattttgttatcctttttcagactttgaaaatgggctgctcaatgagaacagtatggctgaaccccacgatggtcacacagctgaggttcaccacacgcgatgctgactgactccttgtcagcattgcagccctgacccctcaatggctacacagctgaggtttcccacatgtggtgctgactggctsctcgttggcagcgcagccctgacagcagcatttgcactgtcaccttctccctgtgtggacggctgggctccccctctgtggaccgctgggctgcatcagtctgttttcacgctgctataaagaactgcccaagactctctaatttataaaggaaagcagtttgattgactcacagttacacatggctggggagacctcaggaaacttatgatcatggcagaaggcgaaggggaagcaaaggcctatcttacatggcggcaggtgagagggaggtgtgcgagggggaggacaggacctactgaaatagtaccatataatatctgacagagcagccaagggctggtggctgcaggtcgcaggaagggaacacagttaccaaaaaaacagatctcgtgagatctcccaatcgcgaggacagcataggggaatccaccccca

SEQ ID NO: 40117 - DNA, 645 bp, Homo sapiens
tcccgcctgtgaggttggcagcacctttcttggatcatgttctttgtctgggatggagggagggaagaattctccgttgcatggctcgcgtcttctgctttagaattcagccagctacaaatcctaactccctccccacctctcttttctcctgaaaacagaacatgaaaggctcccggagcagcgctgactcctccaggaaacactgaggcagacgtgtcggttccattccatttccatttctgcagcttagcttgtgtcctgccctccgcccgaggcaaaacgtatcctgaggacttcttccggagagggtggggtggagcagcgggggagccttggccgaagagaaccatgcttggcaccgtctgtgtcccctcggccgctggacaccagaaagccacgtgggtccctggcgccctgcctttagccgtggggcccccacctccacyctctgggtttcctaggaatgtccagcctcggagaccttcacaaagccttgggagggtgatgagtgctggtcctgacaggaggccgctggggacactgtgctgttttgtttcgtttctgtgatctcccggcacgtttggagctgggaagaccacactggtggcagaatcctaaaattaaaggaggcaggctcctagt

SEQ ID NO: 40118 - DNA, 645 bp, Homo sapiens
tcccgcctgtgaggttggcagcacctttcttggatcatgttctttgtctgggatggagggagggaagaattctccgttgcatggctcgcgtcttctgctttagaattcagccagctacaaatcctaactccctccccacctctcttttctcctgaaaacagaacatgaaaggctcccggagcagcgctgactcctccaggaaacactgaggcagacgtgtcggttccattccatttccatttctgcagcttagcttgtgtcctgccctccgcccgaggcaaaacgtatcctgaggacttcttccggagagggtggggtggagcagcgggggagccttggccgaagagaaccatgcttggcaccgtctgtgtcccctcggccgctggacaccagaaagccacgtgggtccctggcgccctgcctttagccgtggggcccccacctccactctctgggtttcctaggaatgtccagcctcggagaccttcacaaagccttgggagggtgatgagtgctggtcctgacargaggccgctggggacactgtgctgttttgtttcgtttctgtgatctcccggcacgtttggagctgggaagaccacactggtggcagaatcctaaaattaaaggaggcaggctcctagt

SEQ ID NO: 40119 - DNA, 595 bp, Homo sapiens
tttcgatttgacatggaaggcctgttgctttgctcttgagaatagtttctcgtgtccccctcgcaggcctcattctttgaacatcractctgaagtttgatacagataggggcttgatagctgtggtcccctctcccctctgactacctaaaatcaatacctaaatacagaagccttggtctaacacgggacttttagtttgcgaagggcctagatagggagagaggtaacatgaatctggacagggagggagatactatagaaaggagaacactgcctactttgcaagccagtgacctgccttttgaggggacattggacgggggccgggggcgggggttgggtttgagctacagtcatgaacttttggcgtctactgattcctccaactctccaccccacaaaataacggggaccaatatttttaactttgcctatttgtttttgggtgagtttcccccctccttattctgtcctgagaccacgggcaaagctcttcattttgagagagaagaaaaactgtttggaaccacaccaatgatatttttctttgtaatacttgaaatttatttttttattattttgatagcagatg

SEQ ID NO: 40120 - DNA, 1233 bp, Homo sapiens
  misc_feature (1)...(1233): n = A,T,C or G
aatagaatatagtaaatgataagtgctgttaagaaagatatgaatcaacatcaatagaagatcccaagagaaagtgattnnnnnnnnnnnnnnnnnnnnnnnnnnnnnnnnnnnnnnnnnnnnnnnnnnnnnnnnnnnnnnnnnnnnnnnnnnnnnnnnnnnnnnnnnnnnnnnnnnnnttaatataaatttcaggatgtggtattaagaagatttttcacatatagaaaaaaatgtggcatgrataaattttaaaaatgacttgtacactaaagaattttatattaattctgtagaatataattttcaaaactattttctggaacatcagtacctgttgagatgtaaatggatattccattagaaataaagattctttagaagaataaaatttgtgaaagaatgagtatcctataaatcaagagatccatagggttagtactcatgaagtagagactgttattacaattatgaatattactactacgactactaccaacaccaccattgctatttctaaatagaaactaaagccattggaatgtaaggatgagacgttatgggcttaagagtgagcaagtagcctgaatggcgctctgccttgtaaatgtaatcagctatgtttttgaatgagaacagaagagacagggtgactttgctaaaacagaggccagattttgtcacttttctaattattactttgcactggtttcttgtctcacttacagaaaaagccatgattctcattctggtcttttaaggccttctgtctagtctctactatctctccatcattatcgcctgtctctctctctaaaatactgctttagccacactactctattactaccaaactttagtataactacacaacccattatgacttttttataactttcaatccccttaacttgttaaatttttatttatcaaacttatcaccctctcatatccaaatatttttccctctgtcactaatagtcaaatgactcctctattataagattgctggaacaaattaatttatgtatttccagtgcctataacagtgccaggcatttaatagttactcaaataggtacagcaagaactcaatgaagagaaaattaaaggtgtggaatcatttaaaagtgttttgctatagcaagtgtaaaaggaaataggactttaacttaggtgagaatagagaagacattaaagagtaatatttaaacaaaatcattgttttaggca

SEQ ID NO: 40121 - DNA, 1233 bp, Homo sapiens
  misc_feature (1)...(1233): n = A,T,C or G
aatagaatatagtaaatgataagtgctgttaagaaagatatgaatcaacatcaatagaagatcccaagagaaagtgattnnnnnnnnnnnnnnnnnnnnnnnnnnnnnnnnnnnnnnnnnnnnnnnnnnnnnnnnnnnnnnnnnnnnnnnnnnnnnnnnnnnnnnnnnnnnnnnnnnnnttaatataaatttcaggatgtggtattaagaagatttttcacatatagaaaaaaatgtggcatggataaattttaaaaatgacttgtacactaaagaattttatattaattctgtagaatataattttcaaaactattttctggaacatcagtacctgttgagatgtaaatggatattccattagaaataaagattctttagaagaataaaatttgtgaaagaatgagtatcctataaatcaagagatccatagggttagtactcatgaagtagagactgttrttacaattatgaatattactactacgactactaccaacaccaccattgctatttctaaatagaaactaaagccattggaatgtaaggatgagacgttatgggcttaagagtgagcaagtagcctgaatggcgctctgccttgtaaatgtaatcagctatgtttttgaatgagaacagaagagacagggtgactttgctaaaacagaggccagattttgtcacttttctaattattactttgcactggtttcttgtctcacttacagaaaaagccatgattctcattctggtcttttaaggccttctgtctagtctctactatctctccatcattatcgcctgtctctctctctaaaatactgctttagccacactactctattactaccaaactttagtataactacacaacccattatgacttttttataactttcaatccccttaacttgttaaatttttatttatcaaacttatcaccctctcatatccaaatatttttccctctgtcactaatagtcaaatgactcctctattataagattgctggaacaaattaatttatgtatttccagtgcctataacagtgccaggcatttaatagttactcaaataggtacagcaagaactcaatgaagagaaaattaaaggtgtggaatcatttaaaagtgttttgctatagcaagtgtaaaaggaaataggactttaacttaggtgagaatagagaagacattaaagagtaatatttaaacaaaatcattgttttaggca

SEQ ID NO: 40122 - DNA, 1233 bp, Homo sapiens
  misc_feature (1)...(1233): n = A,T,C or G
aatagaatatagtaaatgataagtgctgttaagaaagatatgaatcaacatcaatagaagatcccaagagaaagtgattnnnnnnnnnnnnnnnnnnnnnnnnnnnnnnnnnnnnnnnnnnnnnnnnnnnnnnnnnnnnnnnnnnnnnnnnnnnnnnnnnnnnnnnnnnnnnnnnnnnnttaatataaatttcaggatgtggtattaagaagatttttcacatatagaaaaaaatgtggcatggataaattttaaaaatgacttgtacactaaagaattttatattaattctgtagaatataattttcaaaactattttctggaacatcagtacctgttgagatgtaaatggatattccattagaaataaagattctttagaagaataaaatttgtgaaagaatgagtatcctataaatcaagagatccatagggttagtactcatgaagtagagactgttattacaattatgaatattactactacgactactaccaacaccaccattgctatttctaaatagaaactaaagccattggaatgtaaggatgagacgttatgggcttaagagtgagcaagtagcctgaatggcgctctgccttgtaaatgtaatcagctatgtttttgaatgagaacagaagagacagggtgactttgctaaaacagaggccagattttgtcrcttttctaattattactttgcactggtttcttgtctcacttacagaaaaagccatgattctcattctggtcttttaaggccttctgtctagtctctactatctctccatcattatcgcctgtctctctctctaaaatactgctttagccacactactctattactaccaaactttagtataactacacaacccattatgacttttttataactttcaatccccttaacttgttaaatttttatttatcaaacttatcaccctctcatatccaaatatttttccctctgtcactaatagtcaaatgactcctctattataagattgctggaacaaattaatttatgtatttccagtgcctataacagtgccaggcatttaatagttactcaaataggtacagcaagaactcaatgaagagaaaattaaaggtgtggaatcatttaaaagtgttttgctatagcaagtgtaaaaggaaataggactttaacttaggtgagaatagagaagacattaaagagtaatatttaaacaaaatcattgttttaggca

SEQ ID NO: 40123 - DNA, 1233 bp, Homo sapiens
  misc_feature (1)...(1233): n = A,T,C or G
aatagaatatagtaaatgataagtgctgttaagaaagatatgaatcaacatcaatagaagatcccaagagaaagtgattnnnnnnnnnnnnnnnnnnnnnnnnnnnnnnnnnnnnnnnnnnnnnnnnnnnnnnnnnnnnnnnnnnnnnnnnnnnnnnnnnnnnnnnnnnnnnnnnnnnnttaatataaatttcaggatgtggtattaagaagatttttcacatatagaaaaaaatgtggcatggataaattttaaaaatgacttgtacactaaagaattttatattaattctgtagaatataattttcaaaactattttctggaacatcagtacctgttgagatgtaaatggatattccattagaaataaagattctttagaagaataaaatttgtgaaagaatgagtatcctataaatcaagagatccatagggttagtactcatgaagtagagactgttattacaattatgaatattactactacgactactaccaacaccaccattgctatttctaaatagaaactaaagccattggaatgtaaggatgagacgttatgggcttaagagtgagcaagtagcctgaatggcgctctgccttgtaaatgtaatcagctatgtttttgaatgagaacagaagagacagggtgactttgctaaaacagaggccagattttgtcacttttctaattattactttgcactggtttcttgtctcacttacagaaaaagccatgattctcattctggtcttttaaggccttctgtctagtctctactatctctccatcattatcgcctgtctctctctctaaaatactgctttagccacactactctattactaccaaactttagtataactacacaacccattatgacttttttataactttcaatccccttaacttgttaaatttttatttatcaaacttatcaccctctcatatccaaatatttttccctctgtcactaatagtcaaatgactcctctattataagaytgctggaacaaattaatttatgtatttccagtgcctataacagtgccaggcatttaatagttactcaaataggtacagcaagaactcaatgaagagaaaattaaaggtgtggaatcatttaaaagtgttttgctatagcaagtgtaaaaggaaataggactttaacttaggtgagaatagagaagacattaaagagtaatatttaaacaaaatcattgttttaggca

SEQ ID NO: 40124 - DNA, 574 bp, Homo sapiens
aaactgtattatcccttaatgtttatccttggttatatgagcttgaaaacaccggattaaaaatgtcgcataagaaacctgcaaaagaaagaactcrggaaacaatatcgcattaattagtgatccaagggaaaagaagctaagagtttagaaactgtctcttgatgctttttctaaatgtggacaaaatactcttccatcagaatgactttagaaagagcgtgataagaaaatcacacaaattgacaggaaagttatatccgtgtccttagtacttcctaatcttcagtgcttccttgaagtagacaaagatgggtaagtgcatgcaaaaagtttgcatgttatttcatcaggctaacttggattcactcctgtgatatataatcaactatatgtaaggtcttctttctacctaagcttcactctcttccttttgagcctacaaagcttctcagtttcttcaactaagtctttacgaaatttttcaattcaattgtctacttatttgaacccagctagcaaaccctaagctagagcaattcaactgactgatgtctttgtgcttatacctagg

SEQ ID NO: 40125 - DNA, 785 bp, Homo sapiens
tgctgctgtgtctccatctgttagagcacagcatatttcaaaggtaagggtggcacattcaaatgctgaatttggacaagaatcttaagaaacattattttatggacaattacaaaatggcatttggtcatttcaagtaacatctcagtagggttccacttcgggggcattgtcattttaaacatcggttgaatacaatttatttattccaaaaatrccagatgattaattaaattatacatttaaatggctattaaaccaggcaagaatattatatttttaaggatagccaaatagcacaaatagatgaaaacattaaatatcactactgtgcagcataaggtgaactaaatagggtctcctgcttacaattttgcccctgccaaccccctgcctccatcactactattgccttacacattatcaaatttaacaatttgagagctgtctctttggttctacgggtatatctctagtataactgttaaaatataaatgtagcagataggtgatgtattctcttactatttatcatccagggagttattaggaaaagcagcaacctcagagctacttagagttttgggaagagagagatatgataaaaatgctgagtgtttagaggacaaacactgtttctatatgaattgtactggagaactgattgtaattgttataacccttcaggagcaggctcacaaaatggtgaagcttgttgagtactggaaccaaactcaaatctagataccaaggtttgaatctgggctacagccattactagtcat

SEQ ID NO: 40126 - DNA, 802 bp, Homo sapiens
ctcactctgttgcccacgctggaatgcagtggagtgatctcagttcactgcaacctcctcctccctggttcaagcaattctcctgcctcagcctcctgagtagctgggattacaggtgcccacgaccatgccccgctaattttttgtatttgtagtagagacggaggtttcaccatgttggccaggttggtctcaaactcctgaattcaggtcatcctcctgcctcagcctcccaaagtgctgggattataggcatgagccactgtgcctggccatcacaaaggtcttcatcctcattgtcttcacattgagtaggctgagaaggaagaggagggttgctcttgccatctcaggggtggcacaggtagaagaaaatccatgcataagtggacccatgcagttcaaactcatgttgctcaagggtcaactatagttatatataacctactaaatattgccattgatagccaagcccctttaattggaaaaagaaccttttttgctttaatgggggtgtcttacatttgtgtgtcattttcacatattaatatattgtattttgtaaatttatttttgagacagggttttactgtcactcaggctagagtgcagtggtgcagtcatagctcactgcagccttaaattcctggggccaagctaccctgtcgtctcagccacttgagtagctgggactacgggtgcacacrccacaatgcccggccaatgttttaatttttttttagtagagataggggtctccctgtgttgcccaggctggtcttgaactcctggccttcacgga

SEQ ID NO: 40127 - DNA, 1267 bp, Homo sapiens
tttagagacagggtcttgttctgtcaacccaggctggagtacgatggcatgatcacagctcactgcagcctcmaactcccgggctcaggtgatcctcccacctcagccccccaagtagctgggactacagggaaacaccaccatgcccagctttttttttttaaagaggtctccctaagtcacctgggctggtcttgaactcctagcctctactggtcctcccacctcggcctcccaaagagctgggatcacatcttcttcatcagagaagttaatgatgctgtcggtgtggggtctgcctggcacagccagtctctgcccatggcaaatgaagcacacctgccttccctcactggcgtggagcgctctcattcctctcctggccatgagtggttgatgacaaacagatcctgtgattccgcaagagtgcctcatctatccatgtgctcagaatgttggtgagaggtgtgattctcctacaccgtcacccagttttcaagaagacatatgtccactgattgtccttcaggatgtcaagataaggagtaaatgagaatgtctttgaaagtattttcattactcaatactttaaaaggaaaaaaaaatcttttgtctagggaagctcatgtttagaataaagtaaacatttcccaaagtttccaactgataagaactgcctttgggagtttgtgaaagacgtggattttcagatctcttctgtggagattccattgctctatgcaaaactcagaaatctgactttttgtaagcatcccagataattcttacgtgcagaaaagtctggaaaaataccaaagtgggtcaatctaccaggagaggaacaaatgcttttttaaaaaaaaattagtaaactttatattttagagaagtttcaagagtataaagtacagagaattcccatagacccctgccctctgtcccacagcttcccccatgatccgtttcccacactggagtgcacgtgtgttacagccgatgcacataatcatcacccaaagtccacagcttacattagggcttgttttcagtgtacattctatggatgttggcaaatgtgtaatgacatgtatccatcattacagcatcaccagagtcgcttcactgccccccaagtccccagcactccacccgttcatccttccctccctgcatgccttggcaaccacttgcctttgtgctgtggtcatagtcttgcctttgcaagaatggcatataattgcactgatgcagtatgtagccttttctg

SEQ ID NO: 40128 - DNA, 638 bp, Homo sapiens
tctcaaaaaaaaaaaaaaaaaaaaaaaagaattggagccatacagaccaggttccaatcccttccctgctgctaaccccagggagtgttagctgccctgtgatgattgtcaatagcaattgtaataatgacaacaagccatcccctgcagragatcagagtgtcaggatcttgtcacctcccagtgctggactctctaccccttgagagggaaaggcggtgcggatgggagcccccatccaaccaggctaatctctggggttgggctggccggagaggctgaatggaggcccaggagagggtggctgctcccctgtgggagtgggacatgtgctaatcccatgctgtctcccactgctccctccccaatggcagaaatccggagagctggttgctgtgaaggtcttcaacactaccagctacctgcggccccgcgaggtgcaagtgagggagtttgaggtcctgcggaagctgaaccaccagaacattgtcaagctctttgcggtggaggagacggtaggtccggtgcttggtcagagaatggtcttgtccttgacccttatggtctggggagaatcaggccacatgataacagagatttggtcccatgctcatcagcaggtcagagacagcaggcaa

SEQ ID NO: 40129 - DNA, 638 bp, Homo sapiens
tctcaaaaaaaaaaaaaaaaaaaaaaaagaattggagccatacagaccaggttccaatcccttccctgctgctaaccccagggagtgttagctgccctgtgatgattgtcaatagcaattgtaataatgacaacaagccatcccctgcagaagatcagagtgtcaggatcttgtcacctcccagtgctggactctctaccccttgagagggaaaggcggtgcggatgggagcccccatccaaccaggctaatctctggggttgggctggccggagaggctgaatggaggcccaggagagggtggctgctcccctgtgggagtgggacatgtgctaatcccatgctgtctcccactgctccctccccaatggcagaaatccggagagctggttgctgtgaaggtcttcaacactaccagctacctgcggccccgcgaggtgcargtgagggagtttgaggtcctgcggaagctgaaccaccagaacattgtcaagctctttgcggtggaggagacggtaggtccggtgcttggtcagagaatggtcttgtccttgacccttatggtctggggagaatcaggccacatgataacagagatttggtcccatgctcatcagcaggtcagagacagcaggcaa

SEQ ID NO: 40130 - DNA, 638 bp, Homo sapiens
tctcaaaaaaaaaaaaaaaaaaaaaaaagaattggagccatacagaccaggttccaatcccttccctgctgctaaccccagggagtgttagctgccctgtgatgattgtcaatagcaattgtaataatgacaacaagccatcccctgcagaagatcagagtgtcaggatcttgtcacctcccagtgctggactctctaccccttgagagggaaaggcggtgcggatgggagcccccatccaaccaggctaatctctggggttgggctggccggagaggctgaatggaggcccaggagagggtggctgctcccctgtgggagtgggacatgtgctaatcccatgctgtctcccactgctccctccccaatggcagaaatccggagagctggttgctgtgaaggtcttcaacactaccagctacctgcggccccgcgaggtgcaagtgagggagtttgaggtcctgcggaagctgaaccaccagaacatygtcaagctctttgcggtggaggagacggtaggtccggtgcttggtcagagaatggtcttgtccttgacccttatggtctggggagaatcaggccacatgataacagagatttggtcccatgctcatcagcaggtcagagacagcaggcaa

SEQ ID NO: 40131 - DNA, 502 bp, Homo sapiens
attcaaagaagtgaaataatattttatctgataggaaggaggtataattattgggagacacttgggagaagaggatgagatgctgakaatgtttttattccttactctggatggtagttacatgatggattcactttgtgatcattaattgagctatacatgtgtatttttgagacttttatgagtgtgtttgtatatatgagaaatgcaaataaaaatctaattgcattgtggaattaaggaagaaagtttagtctacaaattgatcaaggggaaacttctaaaaccatagccaattgataacacaaaagggacttttttatatatattgataaaaaattaagtcagttttaattgcagttttactactataagatgaataaaaattattatttcctgatatattgctgttaatatctttttagaagctaaccatgtttaaattctataatttagctcatgagttatgcaaatttattggatacaatttcttatgaatata

SEQ ID NO: 40132 - DNA, 554 bp, Homo sapiens
  misc_feature (1)...(554): n = A,T,C or G
tttagcagtatcatttaatgcctgaactcaaggagcaaaaaggtaatggtttagttaggggtgtgtgtgtgtgtgtgtgttgtgtgtgtgttgtgtgtgtgtgtgtgtgtgtgtgcgcgcgcgcgcgtgcgcgtgcgcatatatgaatgtcaaggtggtggtaagggtaaataaggagaaaagcaggggagaaaagtagtttatntgaagggcattttcctttctttctttctttctttyttttttttttttttttttttggtacaggtggggttcttgccatgttgcccagtctggtctcaaactcctggcctcaagtgatcctcttgccttgggctcctaatatgctggttattacagacctgagccactgaacctgactgggatctctttctctgtgttctccttaagaatatcatttaaattggtcgggcgcggtggctcacgcctgtaatcccagcactttgggaggccgaggtgggtggatcacgaggtcaggagattgagaccgtcctggctaacatggtgaaaccccatctctactaaaaataaaa

SEQ ID NO: 40133 - DNA, 580 bp, Homo sapiens
agtctcactctgtcgcccagtctggagtgcagtggcacgatctcagctcactgcaagctctgcctccsgggttcactccattctcctgcctcagcctccagagtagctgggactacaggtgcctgcgaccatacctggctaattttttctgtatttttagtagagacggggtttcaccgtgttagccaggatgtctcgatcgggtgacctcgtgatccgcctgcctcaaagttactggctgtgtgatcttggtcatattactcaatctccctgtgccttactttcttcaagaataaagtgaggataacaatagtctctatctcatagggtgtgatgtgaattaaatgagttaatatatgtaaatgcatcagtgcttagagcagtgcctggcacatagtaagttctgagtaaatactgttattaataaaagtgatggaaatgcctccagtaaaatgcacacaggcacacacatgcatacaacctcgtgaaattgatccctaactcttgcttagtgattcttgcagggaagagtccaggctctagcttagcatttactcctgggcattgtctggctctcgtc

SEQ ID NO: 40134 - DNA, 1266 bp, Homo sapiens
tacgtatgtttattgcggcattattcacaatagcaaagacttggaaccaacccaaatgtccaacagtgatagactggattaagaaaatgtggcacatatacaccatggaatactatgcagccataaaaaggatgagttcatgtcctttgtagggacacggatgaaattggaaatcatcatacttagtaaactatcgcaagaacaaaaaaccaaacaccgcatattcttactcataggtgggaattgaacaaggagaacacatggatacaggaaggggaacatcacactctggggcctgttgtggggtrgggggaggggggagggatagcattgggagatatacctaatgctagatgaggagtcagtgggtgcagcgcaccagcatggcacatgtatacatatgtatctaacctgcacattgtgcacatgtaccctaaaacttaaagtataataataaaaaataaaaaaaaaaataagccaggaatgtggaaagttgtaaatccacattagtggcaatcaggactgatagtgatgtcaacatgttaaccatcttgttaaacatattctgagagatggctagctgcctcatccctaaatgtccccccacagaggactgacatcacaatgtgattgagctctataaattattcatgttacttttatcttgttttaattctttcccaatttacactttgattaaattttaaaaagaaactacatggcatctgagaaagaaaataatcatcaatgaaaaaaggataatttcttacttctctatttcctaatgctgtgtcttcattaacacactgctgtggtctgaatgtttgtgtttccccaaaattcatatgttaaaatcctaacccccaaagtgatacaggaagtgggacttttgggaggtaattgggtcatgatggtggaactctcttgaatgggatcagtatccttataaaggaggatccagagaaccttgccctttcaactgcatgaaaacacagcaagaaggcacaatgttataagccagaaagcaggcccttactagacaccaaatctgctggtgctttgaccttagatttccaggctccagaactgtgagaaataaatttctatcctttgtaaggtacccagttataatattttgttatagcaacctgaacggcctaagacatacaccttctcaaattacagttgtctttaatatttgcatatgtgccattttagttctttattctaaattttagcattttttaatttttaattaaaaaatgc

SEQ ID NO: 40135 - DNA, 1266 bp, Homo sapiens
tacgtatgtttattgcggcattattcacaatagcaaagacttggaaccaacccaaatgtccaacagtgatagactggattaagaaaatgtggcacatatacaccatggaatactatgcagccataaaaaggatgagttcatgtcctttgtagggacacggatgaaattggaaatcatcatacttagtaaactatcgcaagaacaaaaaaccaaacaccgcatattcttactcataggtgggaattgaacaaggagaacacatggatacaggaaggggaacatcacactctggggcctgttgtggggtagggrgaggggggagggatagcattgggagatatacctaatgctagatgaggagtcagtgggtgcagcgcaccagcatggcacatgtatacatatgtatctaacctgcacattgtgcacatgtaccctaaaacttaaagtataataataaaaaataaaaaaaaaaataagccaggaatgtggaaagttgtaaatccacattagtggcaatcaggactgatagtgatgtcaacatgttaaccatcttgttaaacatattctgagagatggctagctgcctcatccctaaatgtccccccacagaggactgacatcacaatgtgattgagctctataaattattcatgttacttttatcttgttttaattctttcccaatttacactttgattaaattttaaaaagaaactacatggcatctgagaaagaaaataatcatcaatgaaaaaaggataatttcttacttctctatttcctaatgctgtgtcttcattaacacactgctgtggtctgaatgtttgtgtttccccaaaattcatatgttaaaatcctaacccccaaagtgatacaggaagtgggacttttgggaggtaattgggtcatgatggtggaactctcttgaatgggatcagtatccttataaaggaggatccagagaaccttgccctttcaactgcatgaaaacacagcaagaaggcacaatgttataagccagaaagcaggcccttactagacaccaaatctgctggtgctttgaccttagatttccaggctccagaactgtgagaaataaatttctatcctttgtaaggtacccagttataatattttgttatagcaacctgaacggcctaagacatacaccttctcaaattacagttgtctttaatatttgcatatgtgccattttagttctttattctaaattttagcattttttaatttttaattaaaaaatgc

SEQ ID NO: 40136 - DNA, 571 bp, Homo sapiens
tttttggtagagacacagtcttgctwtattgcccaagttggccttgaacttctgacctcaagctatcctccagctttggccttccaaagtgctctagttttatagtcatgagccaccacaccaagccccttgacattttaagtcacgtaaggaatagtgtgcacacctttaccacatctcttcccacatgccttcaggcacccactaacttgttaccctaagtctctcttctatacctgcctttaatctaatgttctctcagtgttgctgatgttggcttaagaactggggaatgaagagatgatttactgactgtgcttcatcaatcagggcctatacttaatcctttagcaataaattttcatgtcagccaaatttaccactaaaggattcacctgatatattctctttttctttacccctataaattcttaaaactaagctaagcaggaattagcttagcttagcaggtgtagtagggactcacacctatacctcctctacttaccttttttttttttttggccacaggccaaaaagcatgtctccccagagcttcccttaaatactt

SEQ ID NO: 40137 - DNA, 543 bp, Homo sapiens
acccctgttcctggtcctgctcctgggaatatgctcacaaggaactctgtacctcctccaggctgaaaactctgagccccttattccagcccagacttctccttacagacccaggacaggggcagggttggtggtattaaggccagttctgccactgcattgctgaaggctggttaagagctctctttagaaaaccagagtgcttagcactttctgggtcacctttgggcaatggcagccattccaagacaacagaacaaaatctgactcacaccctattacatagaattctaattgtgagatgtgtgagaaaggaaaagaacagggtgctatgagaggaaatgcccatgctcaggatcacacttctggatctcaaatcccagctctgccccttattaactgtgtgaycttgggcaggttacttcgcctctctgtgcctcagcttccttatttgtaaaatggtgatgataacagtacatacctcataggacgaaatgagaaaatgtaaacaaaactcttaacatagcgcctgtcacattaata

SEQ ID NO: 40138 - DNA, 652 bp, Homo sapiens
  misc_feature (1)...(652): n = A,T,C or G
aaaatatatgtgtttcagattcttaattttaatacactcttttcatcatgatgcacttagatctctagaattcatttctcctaactaaaattttgtgtcatatgaccaacatctcctcaatccgccttcctttgcctctaccattttactctctgcttctattaagtcaccttttttacactccactgtaagtgagaaaatgtaacatttgtctttctatgcctggtattattgtcactgaacataatgtgcctccaggttcatccagttgtcacagaaaaaaaaaaaaaaaacaggatttccttttttttttaaggctaatggtattccattgtttayatatgttacattttctttatccattaatccattgatgggcacttaagtngattccatatcttggctattgtgaatagtactgcaatgaacacgggagtgcagatatctcttcaccatactgatttcatatcccttggatacatacccagtagaggggttgctgaatcatacagtagttctatttttaactactttaggaacctccatactgttttccataatagttgtaccaatttacattcccacaaacaaattacaatttttattcacaatactttgatataaaattttgttgcttatttattgtttgctt

SEQ ID NO: 40139 - DNA, 602 bp, Homo sapiens
tggttccaytgattttgtgaggaaagaactgctgcaataggggagtgaagacagatccctggggttaggcaaaggtcagaggtttggacatgggcacagagtccagagcctttgaagagacacacagagttcaaagctgctcagcatctggattggcctccaaggacaaagatgatgaaatgtcagtaccgttgatgaaatgtgagtaccattggtcaaagtgcaaactgagattaagagtgggaagttcaagtgggcttgggtctggtgtgggggacccattcatgggaagactagagtttaaggataagaaatttgaatatctggagagaccaaggtactgggctctcttccatgagctgagaaggagtgctctcctcatggcaaattctagctcttggctgagcagctttgaactcttgcgttttttgccattaaaagcaatggcaaaaacctcaattacttttgcaccaacctaatacttcctctcttctgctctaaattccaagagggctgccctgtacactgcatttcctaagcttctttgccaactggcttctgtctatgttttatccatggggaacccagtggggaagttggag

SEQ ID NO: 40140 - DNA, 566 bp, Homo sapiens
acttgaatcgcagaattcttatattgatagaagcagaaggaaaccagaagtgctccaattaaaggcctccatttttcagatcagcagactatgagccatgcataggatcacacacaggtgtggtagagcagggaccatgactcttggtcctgtgttatttccgtttctgcgtgccaatgcctactctatggctgctggagagggaggaggttggggaaggtggaaacacctggagtggaaaagagaagtgctgggaacagaggacactagtgccttcagcacatcccatcttcccattgccactcagctgacctatcagcaaaggtgggagtgaaagttacagggattctgggccaggtgcagtggctcatggctgtaatcccagcactttgagaggccgaggygggcagatcacctgaggtcaggagtttgagaccagcctggccaacatggtgaaatcccgtctctactaaaaatacaaaaattagccgggcatggtggcacccgcctgtaaatccggctacttaggaggctaaggcaggggaattgcttgaatccaggaggtg

SEQ ID NO: 40141 - DNA, 590 bp, Homo sapiens
ccacccayagcctcccagtagtcattacctggttgcaggtaaaactctcttgatatctcccaacaaaaagatgtttgttgggatcagagggtagagacctgcttagacatttgaaaacaaggagaaaacccacaaacagagggctaacatcaatgtgggtaatatctaaattttgtttactgtatatcaatgtggagaataaatgaggagtagagtagttcttttaaaagaatgaaaattaggcctattctagagacaaatagattccgctgatattgacaattgcctaaatcattagtcactgtgaaatcttcaagattttgcagcttttttgatattgacttgatactgcctgtttttatctggacctctccagatcgcctgagtttcgactgtgaagatttactcatatactgcttttcttctagattcttgtctgggaatatttaggatcaacatccaggaattcagcatttcctatgggattttgatattttccttttttcatcttaattgtagacgaaagttggtaaaatgaaaaccagcttcacatttatgaaccttgagtgaaaaaggaaaaatgccttgag

SEQ ID NO: 40142 - DNA, 511 bp, Homo sapiens
aaactccatctcaaaaaataaaaataaaaaaagataaataatggtccacctatataggacacttaaacatgaatgcasgttgcaggactggaagtcactctgggtgagccagtgaatgagtgaatgtgaaggcctcggacattcctgtacatgactgtagatttcataaacacagcacacttaggctacgctaagggtatttttaaaaatttctctttcttcagcaatacattaaccttagcatcacacaagcacgcgagtaatgcattgcactttgacattatgacagctatgatcactaggggataggaattttcagctctgttataatcttaggggaccaccctagcatatctatctattaccaaaatgtcattatgcagcatgattgcatataatttaaaaataaatgatgcttaaaaattttataaatatgaaacatcttcagaacagctgaattttttaaaagattaactttagattatcttatgatattttacttttttgaaaa

SEQ ID NO: 40143 - DNA, 511 bp, Homo sapiens
aaactccatctcaaaaaataaaaataaaaaaagataaataatggtccacctatataggacacttaaacatgaatgcacgttgcaggactggaagtcactctgggtgagccagtgaatgagtgaatgtgaaggcctcggacattcctgtacatgactgtagatttcataaacacagcacacttaggctacgctaagggtatttttaaaaatttctctttcttcagcaatacattaaccttagcatcacacaagcacgcgagtaatgcattgcactttgacattatgacagctatgatcactaggggataggaattttcagctctgttataatcttakgggaccaccctagcatatctatctattaccaaaatgtcattatgcagcatgattgcatataatttaaaaataaatgatgcttaaaaattttataaatatgaaacatcttcagaacagctgaattttttaaaagattaactttagattatcttatgatattttacttttttgaaaa

SEQ ID NO: 40144 - DNA, 502 bp, Homo sapiens
aatgtaagatcatgaggcctctctttatcttttatttctttcctttctacttcatttatttttccaacatgctttcttaggtcaacctgatgggtgaaagaccaccaaatcatatctttggaacttagatgttatagatctagctgcccagagaaaggatgatctttcacagtccccttccctattcctaaggaggatttatcttgggctagtggcccattcttggattaaccacccatggtcatagagcagaaagaattgagaaagtcaccctaataaacagcctgggaagtccaaggacagagggagtaggcaaacaaccaattagatatccgttaaatggctggtaattcacaaagtactgttttgttttktttttcttttgagacagagtttcgctctgtcgccgaggctggagtgcaatggtgtgatcttggctcactgcaacctctgcctcccaggttcaagtgactctcctgccttggcctcatgagtagctggg

SEQ ID NO: 40145 - DNA, 432 bp, Homo sapiens
ttattttcttttaattattttttctcatgtaagtaacgcatcattatattatctgagtttaaaaaaataaaacagtctccataagtctaaacacctccactgataatccctttctaggaggtaaactctttatttattttattttattttattttattttttgagatggagtctcgctcagtcacccaggctggagtgcagtggcgcaatctcggctcactgcaacctccgcctcccgggttcacgccattctcctgcctcagcctcccgagtagctgggactacaggcgcctgccaccacgccctgctaattttttgtatttttagtagagacggggtttcactgtgttagccaggacggtcttgatatcctgacctcgtgatcygccctcctcggcctcccaaagtgctgggattacaggcgtgagccac

SEQ ID NO: 40146 - DNA, 523 bp, Homo sapiens
ctggcgaccttgtgaccgttggcagtgggtcagatgtggcactcagaattaggggaaggattggtgatgccagaacatctggtgaagccggcacttcaaggcactcctcaagcctggaaagcctcaccaataggtatgactcatggtttcgtgaaaagctgctgatctcattagtttcagaaatgattgcatggctgggcagggactctcgggtagatgcagcgctgactgggtgcccccgggaagaatacctcgcatttctcctgaggtggtgaaataggcggaaactggttcccatccaaatcctggaaaccaccatgggtgaggtcatgtccacacatgtcaaggccttgatgagatagttatctgcatagtccagaaaaatcacttttccaccaaacattctaaatgattgatggagaaacaaattttccaattacgctaactttcattgttattactaaagaattaagtgctacaccacacacacacacacacacacacacacacacacasacacaca

SEQ ID NO: 40147 - DNA, 523 bp, Homo sapiens
ctggcgaccttgtgaccgttggcagtgggtcagatgtggcactcagaattaggggaaggattggtgatgccagaacatctggtgaagccggcacttcaaggcactcctcaagcctggaaagcctcaccaataggtatgactcatggtttcgtgaaaagctgctgatctcattagtttcagaaatgattgcatggctgggcagggactctcgggtagatgcagcgctgactgggtgcccccgggaagaatacctcgcatttctcctgaggtggtgaaataggcggaaactggttcccatccaaatcctggaaaccaccatgggtgaggtcatgtccacacatgtcaaggccttgatgagatagttatctgcatagtccagaaaaatcacttttccaccaaacattctaaatgattgatggagaaacaaattttccaattacgctaactttcattgttattactaaagaattaagtgctacaccacacacacacacacacacacacacacacacacacwcacaca

SEQ ID NO: 40148 - DNA, 1250 bp, Homo sapiens
ctattaaatacaattgttctaccccctaccttgacaaatacacactgaaaacaacagagaagggcgggttacaatttggaattctctagcatcttgcaacatggaggctcaggaagaaccatcccctaccatgctccaggaattctccctcctctcttcctacccctggcttcatcctgcaccaagaatgtctcrcatgcacacatgtgtaaatatcctagcccacacatccaagctgcatcatacctctgaaaaactgatgccccttggctacctctcccagagatgcaggagattcatcctcaggagaatagacccagagaagaggtctctgtaggcccttgaagcatgttcaaggctatttgagcagggaactattgggtctggaagcatggccttgaaggaaggatatgagctcctggtgagtcctttcctttggtttcatggacccttcaccttacagggagagtcatagccagagaaaggccagagtggagccttcaggaggggtgcagtcagcagccagtagggatcatacttgagcagatagtctgctagaagttgcttcatcttccaaatggtccctaaagttatgtccctaatagcacaaacagtgctattcactctacttaaggacgttgaggtcttctattttccgtaggataaaatctaacatattttaaaattccctcacaatcttattcaaactactctctgtagtcttatctgccataatccagaatatcctctaccttttactggtcaaactgaattacttgtgaaaattttatgtaatcatccataaaatttctaattatgaaatccagaggtctttctgaatacatcaaaagccaaaaaatgagtttttgacccagaaattccatttttagaaatttatcctaaggaaatagttaaggatgtgagtaaagattttgctaacaggatgttcaatacagtgttgcttaaaatacttttattgacatgaagggaaaaaagagcctttgctctggtagtttcttttttctagaatattattactgcctggagaatgttatctctacatgaagaaaacatgacataactttcacttgaccaaataagagtactgttaatgacttccacctcagtgtttccacagtacttttttcaaatttccattttcttacccatcatgggagtaactggctgtatatatgtctttttctttttttctagggtgggcgcttctctgggcagaggcctcttatgca

SEQ ID NO: 40149 - DNA, 1250 bp, Homo sapiens
ctattaaatacaattgttctaccccctaccttgacaaatacacactgaaaacaacagagaagggcgggttacaatttggaattctctagcatcttgcaacatggaggctcaggaagaaccatcccctaccatgctccaggaattctccctcctctcttcctacccctggcttcatcctgcaccaagaatgtctcgcaygcacacatgtgtaaatatcctagcccacacatccaagctgcatcatacctctgaaaaactgatgccccttggctacctctcccagagatgcaggagattcatcctcaggagaatagacccagagaagaggtctctgtaggcccttgaagcatgttcaaggctatttgagcagggaactattgggtctggaagcatggccttgaaggaaggatatgagctcctggtgagtcctttcctttggtttcatggacccttcaccttacagggagagtcatagccagagaaaggccagagtggagccttcaggaggggtgcagtcagcagccagtagggatcatacttgagcagatagtctgctagaagttgcttcatcttccaaatggtccctaaagttatgtccctaatagcacaaacagtgctattcactctacttaaggacgttgaggtcttctattttccgtaggataaaatctaacatattttaaaattccctcacaatcttattcaaactactctctgtagtcttatctgccataatccagaatatcctctaccttttactggtcaaactgaattacttgtgaaaattttatgtaatcatccataaaatttctaattatgaaatccagaggtctttctgaatacatcaaaagccaaaaaatgagtttttgacccagaaattccatttttagaaatttatcctaaggaaatagttaaggatgtgagtaaagattttgctaacaggatgttcaatacagtgttgcttaaaatacttttattgacatgaagggaaaaaagagcctttgctctggtagtttcttttttctagaatattattactgcctggagaatgttatctctacatgaagaaaacatgacataactttcacttgaccaaataagagtactgttaatgacttccacctcagtgtttccacagtacttttttcaaatttccattttcttacccatcatgggagtaactggctgtatatatgtctttttctttttttctagggtgggcgcttctctgggcagaggcctcttatgca

SEQ ID NO: 40150 - DNA, 1250 bp, Homo sapiens
ctattaaatacaattgttctaccccctaccttgacaaatacacactgaaaacaacagagaagggcgggttacaatttggaattctctagcatcttgcaacatggaggctcaggaagaaccatcccctaccatgctccaggaattctccctcctctcttcctacccctggcttcatcctgcaccaagaatgtctcgcatgcacacatgtgtaaatatcctagcccacacatccaagctgcatcatacctctgaaaaactgatgccccttggctacctctcccagagatgcaggagattcatcctcaggagaatagacccagagaagaggtctctgtaggcccttgaagcatgttcaaggctatttgagcagggaactattgggtctggaagcatggccttgaaggaaggatatgagctcctggtgagtcctttcctttggtttcatggacccttcaccttacagggagagtcayagccagagaaaggccagagtggagccttcaggaggggtgcagtcagcagccagtagggatcatacttgagcagatagtctgctagaagttgcttcatcttccaaatggtccctaaagttatgtccctaatagcacaaacagtgctattcactctacttaaggacgttgaggtcttctattttccgtaggataaaatctaacatattttaaaattccctcacaatcttattcaaactactctctgtagtcttatctgccataatccagaatatcctctaccttttactggtcaaactgaattacttgtgaaaattttatgtaatcatccataaaatttctaattatgaaatccagaggtctttctgaatacatcaaaagccaaaaaatgagtttttgacccagaaattccatttttagaaatttatcctaaggaaatagttaaggatgtgagtaaagattttgctaacaggatgttcaatacagtgttgcttaaaatacttttattgacatgaagggaaaaaagagcctttgctctggtagtttcttttttctagaatattattactgcctggagaatgttatctctacatgaagaaaacatgacataactttcacttgaccaaataagagtactgttaatgacttccacctcagtgtttccacagtacttttttcaaatttccattttcttacccatcatgggagtaactggctgtatatatgtctttttctttttttctagggtgggcgcttctctgggcagaggcctcttatgca

SEQ ID NO: 40151 - DNA, 1336 bp, Homo sapiens
catcccatataaagccatataaagccttaattccaggctcataaatcaaatagtcaatacaaaaagcacttatgagttacctcctgtggatcttttgctaaaacacaatgcaatttagtagttagaggtcctaaactagtagaaaagtatttcaaggrgatttgtttgaatatttcccgtgggagaaggaaagaagtaggattgggtagagggaagaagtgaaatgcaaaacagtcacaagtcctcatgcaatcctcatagatgccctgagtctttagatagcccctcagaatcctaacaccttggggcaagggaactgggtctttatttcccatccaccagtgatcagatgcaggttggccctgggagtgagccatgatcttgggcaaagcagctttcataagcttagggcagtttccagagaatgatgcagttgagagctgtcagctgctgtcaatactcctaaaagcagtggggaaaaggagtgtgcttcaattctggatgcagattagacatcaggatttatgggctgttgaatctggctgttgaatctggcactgagtggcataccacagcatccactacaatatttaaaaattattgttaggtaaaggacatcatatcccaacaatttctcaagtgactggtacttttaatttcaaatgtataattggaaaatgttaacaaactggatatatcactcatagttattagtttagaggtgtcatgttaagtactcattgttatatagctactaaatttctgtatgaattatattttatatatcctctttcatttatccagtgtgatttgcttaaaagaactctgaaactcttttatctctgagttaaaagacctgggtccttaccaaaatctgccacttaccatagaacaagtcattttacttcctcatctgtaaattagtgatgatgatattttggctgactcttccacagggttgttgtgcacagtaacaaacaaaatgcttgtaaaggccttttgtacactgctgctaaagaagagctcagagaagctgtagctgtgggagtcctgctctggctaaacagcctcagttagcatgaggagcccctgaaatttgagagtagtgcagagtgaagtgtggatgatacaaacagagggaatgaggcaggagattccaaaaaagaaggggtgaggaagaaaggtggaattttccttgggtaccaaagactaccatttcctacttcaccactctaactcaggccagctctactaaagcaaattgaaaacagaacaaaacacaaaatagacagacaaatcagctgactgaattacatgttaactaaaccattatgca

SEQ ID NO: 40152 - DNA, 1336 bp, Homo sapiens
catcccatataaagccatataaagccttaattccaggctcataaatcaaatagtcaatacaaaaagcacttatgagttacctcctgtggatcttttgctaaaacacaatgcaatttagtagttagaggtcctaaactagtagaaaagtatttcaaggggatttgtttgaatatttcccgtgggagaaggaaagaagtaggattgggtagagggaagaagtgaaatgcaaaacagtcacaagtcctcatgcaatcctcatagatgccctgagtctttagatagcccctcagaatcctaacaccttggggcaagggaactgggtctttatttcccatccaccagtgatcagatgcaggttggccctgggagtgagccatsatcttgggcaaagcagctttcataagcttagggcagtttccagagaatgatgcagttgagagctgtcagctgctgtcaatactcctaaaagcagtggggaaaaggagtgtgcttcaattctggatgcagattagacatcaggatttatgggctgttgaatctggctgttgaatctggcactgagtggcataccacagcatccactacaatatttaaaaattattgttaggtaaaggacatcatatcccaacaatttctcaagtgactggtacttttaatttcaaatgtataattggaaaatgttaacaaactggatatatcactcatagttattagtttagaggtgtcatgttaagtactcattgttatatagctactaaatttctgtatgaattatattttatatatcctctttcatttatccagtgtgatttgcttaaaagaactctgaaactcttttatctctgagttaaaagacctgggtccttaccaaaatctgccacttaccatagaacaagtcattttacttcctcatctgtaaattagtgatgatgatattttggctgactcttccacagggttgttgtgcacagtaacaaacaaaatgcttgtaaaggccttttgtacactgctgctaaagaagagctcagagaagctgtagctgtgggagtcctgctctggctaaacagcctcagttagcatgaggagcccctgaaatttgagagtagtgcagagtgaagtgtggatgatacaaacagagggaatgaggcaggagattccaaaaaagaaggggtgaggaagaaaggtggaattttccttgggtaccaaagactaccatttcctacttcaccactctaactcaggccagctctactaaagcaaattgaaaacagaacaaaacacaaaatagacagacaaatcagctgactgaattacatgttaactaaaccattatgca

SEQ ID NO: 40153 - DNA, 552 bp, Homo sapiens
attttcttggctaaaaaatactaataataagtccaaaatcttagcatgagcttaatgtgatcatcaaagccttatattatctggacctgcctacctctccagcctcacctatctctctcctcacatcctgagcctgccagttacactgaattttctttctccatgaacatatcatgttcactttgggccttcacccattctgttccctctgtctggaacattcttagctggtctcttctcttagccaattgctacccatcatttagatctcaacctaagcatccctatccaatcatgccaatctaggctatgtttctctttgtgttatggtcccatagcaccctgaattactctgtcacaacatttctcacacatctatttacttaacatttaccctcaaggtaaatcttcctgtgaatgtgggaaggtgcactgaaatgtcttttgcagttgttgcttcggtcagaagtcaaaaagggattgaacttcattttggctgctcccactttggtctagatttttttwaagcttcaaaattttttaatttggcaa

SEQ ID NO: 40154 - DNA, 571 bp, Homo sapiens
aaaagtactaatttggagaactaacaaatgtccatgaagtcttcacaatttattttcttctgtcatggcttcagcaggtccctccattcggggtctctgacttcccgcaacacatgtgcctgtgtgtgtgcatgctcctgtgtgcgtgtgcatgtgtgtatggctaaaattaagtcatgctgtcagccactcatgatctcayttgaaatagtgtttggaaatgggaatggttttgtcctgcatgctgatgtgtccagaatttcatttaataataaaaggaaaatgtgtggttactgaaaaatgtgtattgatacagaatttcgtaagagccatgttagacaaagcaactctctttttcaaccactgctcatcagtttctgtagagtaaaaaaatctgtacatattttggaatctggagaatcctatataaatcatttgttacttaaatctgtgaaaaacatgtttctttggaggaaaatgtatgcatttataagcattctgtggaatcagttttaattgtattcatgtaattgtctctaagtgatcatcatcttcatagcaataagaaatt

SEQ ID NO: 40155 - DNA, 787 bp, Homo sapiens
aaagtagccaatcgcagggaggactgaaaaaagggcactctgataggacaaaaatagaacatgcgaggggacaaataagggaataaaagctggccacccccagccagcagcagcaacacactcaggtccccttccacactgtggaagctttgttctttcgctcttcacaataaactttactaccactcactctttgggtccgtgccatctttaagagctgtaacactcaccgcraaggtccatggttccattcttaaagtcagtgagaccactaacccactggcaggaacgaactccagacacaagatgatggaagccaaccctctctgtgcttggtccctctggctttctgtttctcctacatgttactcctccctcaatgagtgctttcctatgaccatggttctcaacactggctatgcaaaagaaccttctagggatgttttatgaatacccatgcatgtgccctaagcctatacatattgaaaagtcttttctcaatagcaaagacttggaaccaacccaaatgcccatcaatgatagaatggataaagaaaatgtggcactatggaatactatgcagccataaaaaaggaggagttcgtgtcctttgcagggacatggatgaagctggaaactatcattctcagcaaagtaatacaggaacagaaaaccaaacaccacatgtccccacccaaaggtgggagttgaacaatgagaacacatggacacagggaggggaacatcacacaccagagcctgttagggggtgggggtctaggggatg

SEQ ID NO: 40156 - DNA, 1282 bp, Homo sapiens
tgcatccacccatccatccatccatccatccttttattccttcaacaaacattttgtgagcacttattaagtacctgtaaaacatgttatcagaatacagtgtgtaagttccttaagaaaagattgtttagaatgccatgagagtatgaaaaagggttactcttatccaatttggggagggatattcagagaaggcttcttggaagaagtataatctgagccagatcttgaasaatcagttgagttaggaaggcaaaggggatagagaagggaaaaataatacccctagtgtctctcccttgctgcatcaccatatcctttcccatttctatttttctccatgttccttgaatgcgcattgggctgtctcctgcctcagagtctttgcacttgttttcccctctgcttataatggtttcgcagatatctgcatggcaaactctttcatttccttcaggacttgcatgtcaccttttgagaaatggcttgtccgactatcctatttgtagttgcaatgactcccttccctgacagaaattcccatctcctgcttttgcctagcaaatatcatcttctatcatactatatatttatttatttcatttactcccctatttttgattactgctgtcttcactacctacatgagtgctggcacatagaaatttcagtagttattgatcatatgaatgaatgaaagattgggagataggaatgcaaaggcaaggatgtgagaaattttaaggaaatgtaaaactaatttggtctgattccttctgagatcccttattgcaccaccacagagcattgtgtcaccttcttccttagactcttgctgagtgctgactctactaaggggaaagaagcatgttttgttgatggtggtaatgactaactttccttctcccttctagataatgttgctttgtgccttcaccactaccaaacgatcacttctagatttctcagaaagggcttttctctttggccaagacacaaggctcttctgcagagctatggacttcctggttcccgtttatcatcacattatagacattgggattggaggagaggaaagttggaatttttggttaatggcttcagcttccttagtgtgtaggaggttaggtcatctgttaagagggaggagggaggatgaaatttggaacctttactgacgggattaggacaggcagttgataagagaaaacagaggtgttgaacagaataaagtgtttgagaaacggataatatgtccataagatggttgtatttttttttt

SEQ ID NO: 40157 - DNA, 1282 bp, Homo sapiens
tgcatccacccatccatccatccatccatccttttattccttcaacaaacattttgtgagcacttattaagtacctgtaaaacatgttatcagaatacagtgtgtaagttccttaagaaaagattgtttagaatgccatgagagtatgaaaaagggttactcttatccaatttggggagggatattcagagaaggcttcttggaagaagtataatctgagccagatcttgaacaatcagttgagttaggmaggcaaaggggatagagaagggaaaaataatacccctagtgtctctcccttgctgcatcaccatatcctttcccatttctatttttctccatgttccttgaatgcgcattgggctgtctcctgcctcagagtctttgcacttgttttcccctctgcttataatggtttcgcagatatctgcatggcaaactctttcatttccttcaggacttgcatgtcaccttttgagaaatggcttgtccgactatcctatttgtagttgcaatgactcccttccctgacagaaattcccatctcctgcttttgcctagcaaatatcatcttctatcatactatatatttatttatttcatttactcccctatttttgattactgctgtcttcactacctacatgagtgctggcacatagaaatttcagtagttattgatcatatgaatgaatgaaagattgggagataggaatgcaaaggcaaggatgtgagaaattttaaggaaatgtaaaactaatttggtctgattccttctgagatcccttattgcaccaccacagagcattgtgtcaccttcttccttagactcttgctgagtgctgactctactaaggggaaagaagcatgttttgttgatggtggtaatgactaactttccttctcccttctagataatgttgctttgtgccttcaccactaccaaacgatcacttctagatttctcagaaagggcttttctctttggccaagacacaaggctcttctgcagagctatggacttcctggttcccgtttatcatcacattatagacattgggattggaggagaggaaagttggaatttttggttaatggcttcagcttccttagtgtgtaggaggttaggtcatctgttaagagggaggagggaggatgaaatttggaacctttactgacgggattaggacaggcagttgataagagaaaacagaggtgttgaacagaataaagtgtttgagaaacggataatatgtccataagatggttgtatttttttttt

SEQ ID NO: 40158 - DNA, 1282 bp, Homo sapiens
tgcatccacccatccatccatccatccatccttttattccttcaacaaacattttgtgagcacttattaagtacctgtaaaacatgttatcagaatacagtgtgtaagttccttaagaaaagattgtttagaatgccatgagagtatgaaaaagggttactcttatccaatttggggagggatattcagagaaggcttcttggaagaagtataatctgagccagatcttgaacaatcagttgagttaggaaggcaaaggggatagagaagggaaaaataatacccctagtgtctctcccttgctgcatcaccatatcctttcccatttctatttttctccatgttccttgaatgcdcattgggctgtctcctgcctcagagtctttgcacttgttttcccctctgcttataatggtttcgcagatatctgcatggcaaactctttcatttccttcaggacttgcatgtcaccttttgagaaatggcttgtccgactatcctatttgtagttgcaatgactcccttccctgacagaaattcccatctcctgcttttgcctagcaaatatcatcttctatcatactatatatttatttatttcatttactcccctatttttgattactgctgtcttcactacctacatgagtgctggcacatagaaatttcagtagttattgatcatatgaatgaatgaaagattgggagataggaatgcaaaggcaaggatgtgagaaattttaaggaaatgtaaaactaatttggtctgattccttctgagatcccttattgcaccaccacagagcattgtgtcaccttcttccttagactcttgctgagtgctgactctactaaggggaaagaagcatgttttgttgatggtggtaatgactaactttccttctcccttctagataatgttgctttgtgccttcaccactaccaaacgatcacttctagatttctcagaaagggcttttctctttggccaagacacaaggctcttctgcagagctatggacttcctggttcccgtttatcatcacattatagacattgggattggaggagaggaaagttggaatttttggttaatggcttcagcttccttagtgtgtaggaggttaggtcatctgttaagagggaggagggaggatgaaatttggaacctttactgacgggattaggacaggcagttgataagagaaaacagaggtgttgaacagaataaagtgtttgagaaacggataatatgtccataagatggttgtatttttttttt

SEQ ID NO: 40159 - DNA, 1282 bp, Homo sapiens
tgcatccacccatccatccatccatccatccttttattccttcaacaaacattttgtgagcacttattaagtacctgtaaaacatgttatcagaatacagtgtgtaagttccttaagaaaagattgtttagaatgccatgagagtatgaaaaagggttactcttatccaatttggggagggatattcagagaaggcttcttggaagaagtataatctgagccagatcttgaacaatcagttgagttaggaaggcaaaggggatagagaagggaaaaataatacccctagtgtctctcccttgctgcatcaccatatcctttcccatttctatttttctccatgttccttgaatgcgcattgggctgtctcctgcctcagagtctttgcacttgttttcccctctgcttataatggtttcgcagatatctgcatggcamactctttcatttccttcaggacttgcatgtcaccttttgagaaatggcttgtccgactatcctatttgtagttgcaatgactcccttccctgacagaaattcccatctcctgcttttgcctagcaaatatcatcttctatcatactatatatttatttatttcatttactcccctatttttgattactgctgtcttcactacctacatgagtgctggcacatagaaatttcagtagttattgatcatatgaatgaatgaaagattgggagataggaatgcaaaggcaaggatgtgagaaattttaaggaaatgtaaaactaatttggtctgattccttctgagatcccttattgcaccaccacagagcattgtgtcaccttcttccttagactcttgctgagtgctgactctactaaggggaaagaagcatgttttgttgatggtggtaatgactaactttccttctcccttctagataatgttgctttgtgccttcaccactaccaaacgatcacttctagatttctcagaaagggcttttctctttggccaagacacaaggctcttctgcagagctatggacttcctggttcccgtttatcatcacattatagacattgggattggaggagaggaaagttggaatttttggttaatggcttcagcttccttagtgtgtaggaggttaggtcatctgttaagagggaggagggaggatgaaatttggaacctttactgacgggattaggacaggcagttgataagagaaaacagaggtgttgaacagaataaagtgtttgagaaacggataatatgtccataagatggttgtatttttttttt

SEQ ID NO: 40160 - DNA, 1282 bp, Homo sapiens
tgcatccacccatccatccatccatccatccttttattccttcaacaaacattttgtgagcacttattaagtacctgtaaaacatgttatcagaatacagtgtgtaagttccttaagaaaagattgtttagaatgccatgagagtatgaaaaagggttactcttatccaatttggggagggatattcagagaaggcttcttggaagaagtataatctgagccagatcttgaacaatcagttgagttaggaaggcaaaggggatagagaagggaaaaataatacccctagtgtctctcccttgctgcatcaccatatcctttcccatttctatttttctccatgttccttgaatgcgcattgggctgtctcctgcctcagagtctttgcacttgttttcccctctgcttataatggtttcgcagatatctgcatggcaaactctttcatttccttcaggacttgcatgtcaccttttgagaaatggcttgtccgactatcctatttgtagttgcaatgactcccttccctgacagaaattcccatctcctgcttttgcctagcaaatatcatcttctatcatactatatatttatttatttcatttactcccctatttttgattactgctgtcttcactacctacatgagtgctggcacatagaaatttcagtagttattgatcatatgaatgaatgaaagattgggagataggaatgcaaaggcaaggatgtgagaaattttaaggaaatgtaaaactaatttggtctgattccttctgagatcccttattgcaccaccacagagcattgtgtcaccttcttccttagactcttgctgagtgctgactctactaaggggaaagaagcatgttttgttgatggtggtaatgactaactttccttctcccttctagataatgttgctttgtgccttcaccactaccaaacgatcacttctagatttctcagaaagggcttttctctttggccaagacacaaggctcttctgcagagctatggacttcctggttcccgtttatcatcacattatagacattgggattggaggagaggaaagttggaatttttggttaatggcttcagcttccttagtgtgtaggaggttaggtcatctgttaagagggaggagggaggatgaaatttggaacctttactgacgggattaggacagrcagttgataagagaaaacagaggtgttgaacagaataaagtgtttgagaaacggataatatgtccataagatggttgtatttttttttt

SEQ ID NO: 40161 - DNA, 1373 bp, Homo sapiens
agtctttgttctgaaatatctctgtatattctgtgttattgaggaacttctgagtacaaagcattttagaaaaaattgatacaatcttttcatcccatctaaccaagtttattcctttattataaattaatttatttaaatacaagttacatatatttaaggtaaaaacgatgttttgacatatatatctacagtcagatgattattagagttaaactaattaatatacttatctcaagcatatatggtcaacttatttttgacaaggttgctaagcatacacaatgaggaagggtagtcttttgaataagcagtgttgagtaaactggatatccacatgttgagtaaactggatattgacatgcaaaagaatgaaattggacttttgtcctacatcagatacaataaactcaaaatggattaaagtcttaaatgcaggacctaaaaccatgaaastactggaaaaaacaagagaaaagcttgacattggccttgacaatgagtcttttgatatgaaatcaaaagctcaggcagcaaaagcaaaaataagcaaatgggactacatcaaactacaaagcttctgcacagcaaaggaaaaaatcaacaaaatgaaaaggcaacctatagattggaagaaaatatttgcaaactatgtatctgttaaggggctaatatccaaaatatttaaggaattcaaacaactcaacagcaacaaaataaacaatctgacacaatcttgataagcaattcagtgatcaaactctaagtttaaatttgattattccataaagtcagaagtatctttcctgctcttagaaaattgccaaagattccgttttctcacccacagtagcctccctttaatcacgtgtccttacaatttagggtatacttgaatggtacattttttttgcctccacatatggttgcagtatgatttcatgggttttctaaatcttcagtagtcttttattgaagtagcaggctgtggttaacataaatagacaaagaactcccctgtgatttttttatctgatattcttttttctttgatgtctagactttacccttaaagatgatcagacttttatcctataaggaaataaatggaacgtctgatttatttaaacagcttttatggggattgaaatagggaggtattgaaatagcagactgatttttaaaatcctcttaccatccattctatgcatgtgactgtagtgaattttatatcttaattgacccaactcagcaagtactcaggctggccagaattttttatttatttaaatgtttgtaatttcaaatcacagatgaagagcacagagaagacttaggtcacacgtaaaaaatggaaaacaaaattattaatc

SEQ ID NO: 40162 - DNA, 1373 bp, Homo sapiens
agtctttgttctgaaatatctctgtatattctgtgttattgaggaacttctgagtacaaagcattttagaaaaaattgatacaatcttttcatcccatctaaccaagtttattcctttattataaattaatttatttaaatacaagttacatatatttaaggtaaaaacgatgttttgacatatatatctacagtcagatgattattagagttaaactaattaatatacttatctcaagcatatatggtcaacttatttttgacaaggttgctaagcatacacaatgaggaagggtagtcttttgaataagcagtgttgagtaaactggatatccacatgttgagtaaactggatattgacatgcaaaagaatgaaattggacttttgtcctacatcagatacaataaactcaaaatggattaaagtcttaaatgcaggacctaaaaccatgaaactactggaaaaaacaagagaaaagcttgacattggccttgacaatgagtcttttgatatgaaatcaaaagctcaggcagcaaaagcaaaaataagcaaatgggactacatcaaactacaaagcttctgcacagcaaaggaaaaaatcaacaaaatgaaaaggcaacctatagattggaagaaaatatttgcaaactatgtatctgttaaggggctaatatccaaaatatttaaggaattcaaacaactcaacagcaacaaaataaacaatctgacacaatcttgataagcaattcagtgatcaaactctaagtttaaatttgattattccataaagtcagaagtatctttcctgctcttagaaaattgccaaagattccgttttctcacccacagtagcctccctttaatcacgtgtccttacaatttagggtatacttgaatggtacattttttttgcctccacatatggttgcagtatgatttcatgggttttctaaatcttcagtagtcttttattgaagtagcaggctgtggttaacataaatagacaaagaactcccctgtgatttttttatctgatattcttttttctttgatgtctagactttacccttaaagatgatcagacttttatcctataaggaaataaatggaacgtctgatttatttaaacagcttttatggggattgaaatagggaggtattgaaatagcagactgatttttaaaatcctcttaccatccattctatgcatgtgactgtagtgaattttatatcttaattgacccaactcagcaagtactcaggctggccagaattttttatttatttaaatgtttgtaatttcaaatcacagatgaagagcacagagaagacttaggtcacacgtaaaaaayggaaaacaaaattattaatc

SEQ ID NO: 40163 - DNA, 1293 bp, Homo sapiens
acatgttagataatagaagtatgcaaaatggatgtgctatggaaacacagagaaggaagttggacatcatcaaatggagggcactgaagtctgatagaatagtgtgagcagaggccatagcatatgtagcctgcttgagggctagcaagtattctcatggtttcgtaggctgagaaatgaatcaaaattaagagctcaagaatgggaagaatggtgtaaaatagaaatcataagtagtaaattgtagaatttttaccgtgattataaaacaacaaaatgtatacaattgttcttagaagacaagatacataatgtaagaagaaatagaataatcactgggatcagaaaattcaattagaggtttgtgagacrggcaaaagggaggtcgccatatttcacagatggaaatcatatagattttgatttagaaatgtgggtttaagtgtatttattataatttttattatgtaaagatgacagtaggatatgtagaatgtatgactaataaatcactagaaaagaagaaaaacctaataaaagtcaatgcagcaaaatatatgattatacataagggaaaagacaaaaagtaaaaaaatagaaagcatataataaaatgatagtagtcacatctgacatattcaaaatgtccctattataagacaagtatccctaggctgggctctaaacacaaaattcaaatattactatttacatacaataagtatacctaaaactaagtgactagacagttccaaataaggaatgagcttggccattttataaaagtgtgtgtaatatacgaagagagaagatacactttccatgagtaatgaaaattgacaagtcattaagagaactatcgatagtctataaaaatatcttggatcctcagagaggttatcgaaaggagtatgctcctctcaaaaaagaagaaaaaccgagagaaaatctaaagcattgggagaatttcttgtaaataaagtgtcttgtacttttttggagaacagagctatgcagcatcactaacatatgagagatgataaaatatactattataattaaatatattactgcttaggatgtggcaaaattaaaggtatttgtaaatccgatattccaaaagagttctcaagcgaagtagacacagcatgcatatagtttaaaacaaaactgaattgccttattcaattgagaatgttaggttttatttatgttcctaatgaattctgtattatctttaaactttctattaaaatgctaagtatctaatatatccatataaaacatcacata

SEQ ID NO: 40164 - DNA, 1293 bp, Homo sapiens
acatgttagataatagaagtatgcaaaatggatgtgctatggaaacacagagaaggaagttggacatcatcaaatggagggcactgaagtctgatagaatagtgtgagcagaggccatagcatatgtagcctgcttgagggctagcaagtattctcatggtttcgtaggctgagaaatgaatcaaaattaagagctcaagaatgggaagaatggtgtaaaatagaaatcataagtagtaaattgtagaatttttaccgtgattataaaacaacaaaatgtatacaattgttcttagaagacaagatacataatgtaagaagaaatagaataatcactgggatcagaaaattcaattagaggtttgtgagacgggcaaaagggaggtcgccatatttcacagatggaaatcatatagattttgatttagaaatgtgggtttaagtgtatttattataatttttattatgtaaagatgacagtaggatatgtagaatgtatgactaataaatcactagaaaagaagaaaaacctaataaaagtcaatgcagcaaaatatatgattatacataagggaaaagacaaraagtaaaaaaatagaaagcatataataaaatgatagtagtcacatctgacatattcaaaatgtccctattataagacaagtatccctaggctgggctctaaacacaaaattcaaatattactatttacatacaataagtatacctaaaactaagtgactagacagttccaaataaggaatgagcttggccattttataaaagtgtgtgtaatatacgaagagagaagatacactttccatgagtaatgaaaattgacaagtcattaagagaactatcgatagtctataaaaatatcttggatcctcagagaggttatcgaaaggagtatgctcctctcaaaaaagaagaaaaaccgagagaaaatctaaagcattgggagaatttcttgtaaataaagtgtcttgtacttttttggagaacagagctatgcagcatcactaacatatgagagatgataaaatatactattataattaaatatattactgcttaggatgtggcaaaattaaaggtatttgtaaatccgatattccaaaagagttctcaagcgaagtagacacagcatgcatatagtttaaaacaaaactgaattgccttattcaattgagaatgttaggttttatttatgttcctaatgaattctgtattatctttaaactttctattaaaatgctaagtatctaatatatccatataaaacatcacata

SEQ ID NO: 40165 - DNA, 493 bp, Homo sapiens
actgtatttagttgatgtttctttcattttctttaatctgtaatggttcctcagcctttgtcattcacgacattgacacatttgaagaatataagctagttgttgtgtacattgtgtttgaatttgggtttgactgctttttcttcatgattagatttagattttgcattcttggctagtatagtacattagcaatattttgtccttctcaatatatcaatagtatataacttaaaggacctggcataaatagattatcattatatcttaccttactgttatttttttttattgtgagcaatttctcagcatttttgggaaaaagtagagaatgaattgatttaataaataaagcattttataaartattttatgtgtgaatatatttatctgacagttttatggtaaaacctgaaacagatgaggttgccaaaactgatcattccaagaagcaattaataagtaggattctcagagtcaatgaagatgcttc

SEQ ID NO: 40166 - DNA, 1086 bp, Homo sapiens
  misc_feature (1)...(1086): n = A,T,C or G
ggtactccaataaccctttccaaatgttcragggaagggtgaaggctttgtgtggatcacattaaaatggggaccagtggaacgtgtnaaagtcttcggtgatctggcttctctgagcgtcggcctcttcagcattcaccttcgatcccacctcagctgtagtccgggcttcgaggacttgcaaatgtcttcctctctctgagcctgtttcttcatctgtaaaatgggcttcctcggccgggcactgtggctcacgcctgtaatcccagcactttgggaggccgaggcgggcagatctcctgaggtcaggggttcgacaccagcctggccaacatggcaaaaccctgtctctactaaaaatacaaaaattagctgggtgtggtggtacatgcctgtaatcccagctactcgggaggctgaggcaggagaatcgcttgaacccgggaggtggaggttgcagtgagccgtgatcctgccactgcactccagcctgggcgacacagtgagactctgtctcaaaaaaaaaaaaaaaaggcttcctcgtagtaccttctcagggccattaggggcatcctgggagagtaaggtgtgcagagttcccagtcgcgtcaggccctgcaaagctaatagccggtgttggtgatagatgacctctctctctggcttcccgatgtggaaggaatcgtcctctgaggagtgcgtgtcctcctgggggtggggcgggaggggtggttaaactgcctacaggagccagtttgtgaattgggtttagaacaacacatatttaagttcacaattctaaagatcacactctcgactcatttttgtgctaagccctgtggttacatgcaccatgtcccctgataccaacaagaggggtatgagaaccatcccttgttatggatgaggaaactgaggctcagacaggtgagggcgtttgcttgaggctgtacaggcagtgaatggcagagatctgtcctgggattgggagtgcaaagccattccggcgtcagccacgtagggatctggagggttttgtgctgggcactgggactgcagggtggacaagtccagttggaacagcca

SEQ ID NO: 40167 - DNA, 1086 bp, Homo sapiens
  misc_feature (1)...(1086): n = A,T,C or G
ggtactccaataaccctttccaaatgttcaagggragggtgaaggctttgtgtggatcacattaaaatggggaccagtggaacgtgtnaaagtcttcggtgatctggcttctctgagcgtcggcctcttcagcattcaccttcgatcccacctcagctgtagtccgggcttcgaggacttgcaaatgtcttcctctctctgagcctgtttcttcatctgtaaaatgggcttcctcggccgggcactgtggctcacgcctgtaatcccagcactttgggaggccgaggcgggcagatctcctgaggtcaggggttcgacaccagcctggccaacatggcaaaaccctgtctctactaaaaatacaaaaattagctgggtgtggtggtacatgcctgtaatcccagctactcgggaggctgaggcaggagaatcgcttgaacccgggaggtggaggttgcagtgagccgtgatcctgccactgcactccagcctgggcgacacagtgagactctgtctcaaaaaaaaaaaaaaaaggcttcctcgtagtaccttctcagggccattaggggcatcctgggagagtaaggtgtgcagagttcccagtcgcgtcaggccctgcaaagctaatagccggtgttggtgatagatgacctctctctctggcttcccgatgtggaaggaatcgtcctctgaggagtgcgtgtcctcctgggggtggggcgggaggggtggttaaactgcctacaggagccagtttgtgaattgggtttagaacaacacatatttaagttcacaattctaaagatcacactctcgactcatttttgtgctaagccctgtggttacatgcaccatgtcccctgataccaacaagaggggtatgagaaccatcccttgttatggatgaggaaactgaggctcagacaggtgagggcgtttgcttgaggctgtacaggcagtgaatggcagagatctgtcctgggattgggagtgcaaagccattccggcgtcagccacgtagggatctggagggttttgtgctgggcactgggactgcagggtggacaagtccagttggaacagcca

SEQ ID NO: 40168 - DNA, 647 bp, Homo sapiens
gcatcaaaagtgacggataatttggtttctctgaagtacaatttctgtcgaaaaggcacggaatcacacttagttctttctcttcgattaaggagtcacttcagttgtggcaagggaggctttactgttttgaattttgctttctcttttttgagtatcattatgtgcacatggattatattattcaatgtgtttcaattgagcacagttattattctcttttgggctcaagttgtcccaaatttagtcagtgggagctccttcaagctggttcctatgtccttttgatatgtccctatttgtctttgagaacttctttgttttatggaataacccatcatcccaggctcaccttataaattgcctgccccagacctggaattagccacttctccaaggaaccctcgtggggaatggtatttagaaaccaagatctaggtactggtggtgatcattgwtattgaaactttgggccatcattgcttctggatcaattgctctatctatctatctatctatctatctatctatctatctatctacctacctacctgcctatatacctacctatcaatttatcatctatctctatctggagaacttatactgatatttccaattcaaatttcacattgtagatcttttac

SEQ ID NO: 40169 - DNA, 647 bp, Homo sapiens
gcatcaaaagtgacggataatttggtttctctgaagtacaatttctgtcgaaaaggcacggaatcacacttagttctttctcttcgattaaggagtcacttcagttgtggcaagggaggctttactgttttgaattttgctttctcttttttgagtatcattatgtgcacatggattatattattcaatgtgtttcaattgagcacagttattattctcttttgggctcaagttgtcccaaatttagtcagtgggagctccttcaagctggttcctatgtccttttgatatgtccctatttgtctttgagaacttctttgttttatggaataacccatcatcccaggctcaccttataaattgcctgccccagacctggaattagccacttctccaaggaaccctcgtggggaatggtatttagaaaccaagatctaggtactggtggtgatcattgttattgaaactttgggccatcattgcttctggatcaattgctctatctatctatctatctatctatctatctatctatctatctacctacctacctgcctatmtacctacctatcaatttatcatctatctctatctggagaacttatactgatatttccaattcaaatttcacattgtagatcttttac

SEQ ID NO: 40170 - DNA, 597 bp, Homo sapiens
aattatttcagtaattcaggggaggtgatggtggctttgaccaggattgtagctgcagagatagtgtgaagttgtcaaactctgartatattttgaaggtagagccgaaagcatttacttacagattagatgtaggatgcaagaggaaaatgggacttgaattagcaacattataactagagtcaaactgtctagtagtgagttggacaataaatgggtcagaggaagagattactgagggccaaatcaggaaggtttcacagtcttcaaggaaaaatctgagtgtgtttatgtgtgtgtaagagtgtgtgtgtgtgtgtgtgtgtgtgagacagaatacagagatacagggatatagagagcaattcatcttattgaagatgatcctgttgacaatttacttctataattggccaaagacaatattttctgttttgattgactgaattgaggagttctttgctttgtcaaactgctcctggagctgacacttcaacacaaactagggcacacctacttggtgacttctgaagtagcaatgattgttatagtgtctcaagctgtgcttaatggggagacgtggctggggtatctgca

SEQ ID NO: 40171 - DNA, 517 bp, Homo sapiens
gatgattttactcttctatgctcagctctcaatgacttaccattacacttttaaaaatccaaactctctgcccaggcctgcaaggtcttaagtgatctggctctgacactctctctgacctcatcttctggacatcacatactggctttatagcagtcattatgctgcctcctaggtaaagctgagaaagttaagactcccaaagcccccctcccttgattgccccctcagtgtgctggcctctctgcttcttgtgctgcatttttcctgcccctcaggggcaaagctttcctgtctcggaccacttgccctgaaaaatgagtttgagttgtatcatgyatacgttagggggttctactcccaacattactattaatcttaattctttaaaaaagacattttagagacaatgcttttaatccccaaagttattctaatggtgggaataaaaggtttccagcagtaccatggtgatgaatgtcaatggttgtgacattttgaccactctcaaattcat

SEQ ID NO: 40172 - DNA, 837 bp, Homo sapiens
atttggtgatctatcacagtgatgatcaccattgccatgagtattccttcaacaagggctgacacagagaacaattatacttattgggcatatttatcaatcttgtctggcaataatgcctagatgatttcactctatggcacagttacacatgctttctgatctcagtatttaccataataaatctgctcctataattgaggcataccaccctcaaaaacctatttgtaaacaaaatagaacctggccagaaataatgaacaacttgtttagtaagattgcattgcagaacaggcagagatgctacgcaatgattcctatgggatcattgattggtcccctaaggggatgtttagcttaaattgcacctctcagtctgcatgccatggccacactagttcagatggtctgaacaaagtggtcagatggcagaaatgataagaagtatggcaaaagttcctattgtctggaaccatggcagtatagtgtcacctcaacctcaaatgatatggctcattgtaggagctaaacataaggatttgtggaaactattaatagctcttaataagatcaaaatttgggaaagaataaaaaaagcatctagaaagacactctacaaacttgtctttggatattacaaaattaaaagaacaaatatttaaagcatcccaggtacacctgaccttaatgacagaaactggagtgcttgaaggagctgcagacagattagcagctagtaacccattaaaatggataaaaacacttggaagctctgtgatttcaatgatgattgtgcttttaatcrgtattgtttgtctttgtatagtgtgcagatgt

SEQ ID NO: 40173 - DNA, 640 bp, Homo sapiens
gaaattttacaaagacttaagttactactaaaagcttatgaattaaactatgttagtttcataggcatgcagtaaaatcatgccagcaaagaatatttaaataaaagaaaaaatgctcctattgtaagtttaagtgaaaaaaagtcaaattcagactattggaaatattatatgcaatgtcaaatgtgttttgcactacattggacaagctgttgaaaatggcgtagaaaatttatccttaaacaattaacatatggaattatagaaataataatggttaaagtttttccttcttcatatatgagtttttaaaatgtttatcaccataatttctgcaaatattatattaatgtttaatattttaataaaatttctaagtagtaccaaaagtaaaaaatcttgccttagggataggacatctataaaataatcttgatgtttattagagtatgctacacaacttagtgtatgctactatatcagtggttatatttcatatattaacaaagagaatttaaaaagtagaattaaaattaacacacayatattcactctttcaaattcaatccttaatctgtgaaatacaggtaataaattaatttgagaaaaatagataatgcacccagaatcagagcctcca

SEQ ID NO: 40174 - DNA, 556 bp, Homo sapiens
aggttttgttgtgttaaaaaaaaacataaaaaacccaactaaacattctcataccatatgctctctcaatcttgatccttagaatttacccaaagaagttaaaaagctgtgtgcacaaaaaatccaacaggatattaatagaagctttatcatcattgccaaaacttgcaagcaaccaagagtcctttagtaggtgaataaaaaacaaactgtgggatatccaaacaatggaacattgttcagcactaaaaataaatgagctatcaaaccatgaaaagacatggcatcaaccttaactgcatgcgattgattgaaagaagccaatcttaaaagattacttattgcatcatttcaactatgtgacattctggaaaaggcaaaactagagagaaaataaaaagactggccaggtgtggtgactaacacctgtaatcccagcactttgggaggccaaggcgggaaggtcacctgaggtcaggagttcaagaccagtctggccaacatagtgaaacccgatctctacaaaaatacaaaaaattagccgggcatgwtggca

SEQ ID NO: 40175 - DNA, 880 bp, Homo sapiens
cagcagcttccttcaaccaccatctgttgaatacctaccaagttcagggtgctggaagctgcagacgctgaaatgaataggagattaagacatgattgtaagtgaaatgatggtaaattgtggctggattgtatcctttcagctaactgtccccactgcagagccctgaggcacagtcaccactcaaagaccctgcagggaggaacaaacacagcacaggctgtggttctaaattcccatgccttctcttagcctgcagaattggctgctcctttgcacagaagtgaccacggatgaggaaagggttcacagaagcatctctagggtacacaattcacattatattctgtatgaatggtgcccccgacactaaaactggtggccttctatgaacctctcttcatacacgattttcctaggacctactctggttcctgttcgacttttttaaaggatagagtagggagaactcctgggcatatctcagcaaattagcagcacaaaagatgtgattaaaatagaaatttcctttaagcttgtagcaacccaaaaagagaaagtggaaatcaaagttccatgcttgctttctcccaaggaaaacttcagcttctagcattatggctctgagctcsgcctgcaggtgattctgggccacctatgctatcagcagtctggatcctcaaggagctcacagccaagtgaaggagacacagcaataaattattgctgttcaacgatagcttctataggagagggatgtacagatgctagtggtagctccaagaaggtactagtcagagtttcgcagatgtcttctacaagagctctgttttcagtaagatgataggaaattagacctgagagctattgtctacatgca

SEQ ID NO: 40176 - DNA, 611 bp, Homo sapiens
ctccttctctgatagagctagtctcttcttccttctttctctaactataaattgtacagggaacttcaaagtacctgtaacacctttttacctgtatgtgtttatccatttcatcctactagatgctgaggggagactcctatcttatttggctttataccaatgtatagatcagtgcctgggacatggtatttgtcaatatctattgagaaagtaaatgcatctgaaattgtaagtatgaagagaagggtagttggatagcactggaaatacgggaaaatttggtaagttagatactatcgataggaggccaattgactaaaacaccctgtttcagtgacatgtacatctcccaagaaggatgctgcaagytatagtagcctggattgaattgggtttaaatcatactctaacatcatgctcgtacatgacatgagaggcacaacatgctatcagcttacataagcattctggtctctccaatagtgttttctttgacatttctgtttgcttagacactgtctgtcacaagccaatccagcggtaaccatcctaatccaaggtggataacaatagcatcaacctcgcatttgtatgacacttgaacttca

SEQ ID NO: 40177 - DNA, 611 bp, Homo sapiens
ctccttctctgatagagctagtctcttcttccttctttctctaactataaattgtacagggaacttcaaagtacctgtaacacctttttacctgtatgtgtttatccatttcatcctactagatgctgaggggagactcctatcttatttggctttataccaatgtatagatcagtgcctgggacatggtatttgtcaatatctattgagaaagtaaatgcatctgaaattgtaagtatgaagagaagggtagttggatagcactggaaatacgggaaaatttggtaagttagatactatcgataggaggccaattgactaaaacaccctgtttcagtgacatgtacatctcccaagaaggatgctgcaagttatagtagcctggattgaattgggtttaaatcatactctaacatcatgctcgtacatgacatgagaggcacaacatgctatcagcttacatawgcattctggtctctccaatagtgttttctttgacatttctgtttgcttagacactgtctgtcacaagccaatccagcggtaaccatcctaatccaaggtggataacaatagcatcaacctcgcatttgtatgacacttgaacttca

SEQ ID NO: 40178 - DNA, 733 bp, Homo sapiens
tctggctgtttattcttagtactttgctgaaatagatcttagcatgagtaaaactatttctgagtcccatgaatcctttagtgaatgtctaaacatggggactcttgacacatcctcttgaacagaatttccatttttatttttaaaggaatagtaaaacagcttttattatgggcagctaataggtcccaatgctcaaactgaaacagacttcaattcctcaaacctcgaatgttatgggaggttatatgaggaggttacagataatgaagtaacacttaaaatatatgtcgaggtacctggcacatagtaggcattcaaataacattacttgtatttttttccttattccctccagtcccagccccattagaatgcaatgtttttttaagctggtgggcatcatgacatatttatgttgcctgttttcctacttccgttttcttcgctagaaagcatacaatatatttaaaaattagatcattaaccagttttgttcttttggcatctggtgtttgaagccgtttcagttttcrttccaatttttttttttttttcataatgttctttccagtcgaatctcacttgctctttctaaaaggaaaactatgaaacatagagagagagagatcatttcatggtttcaaagccagcagggtcaagcgagagaactcataattgaagtactaaaatgtgttcttttttcttctttataagcaaaagggaagagaag

SEQ ID NO: 40179 - DNA, 1000 bp, Homo sapiens
tgtttattctatatcacatttagtagaaaattacaatgtgttttaagctacaaaggatcatagcattatatcataaatccaagtctctctctagtattctaaactgtttcttaactagaatatttcaattaaaataattatttaaattatgctatgtatgttggtgttcctatcatacagagaatgacaagctctgttatctaagaactcaacactcacagacagaacaaagttggccacgtgttgattcttactgataataggcgtgtgtgtactagagttctctgtgctattctttctactttggtatgtacttgaaattattcacaataagattaaaaattaaacagctcaaaagaaaattaaaattatttatcagtagcagattctgttgaggtgcctttagcgatatgaagcacctgtcccagctgctgttctcagctgcacccctcttcgagtgttgtccttacctgactctgggagccacctcatctgtctctgcctgggaggcgcaccccactccactctcaggggtgttcagaactaatgactaagtgaaggggagagagtccttacaacagctctctcacttctgggtgggaaaatctctggagcaattcataytctggagcctcctgtgtgatcaggttgaggccaaacttctcttgagccctcttctttggctgatttcatcctctactctgtcttgcattcttcacaatcctagatgtttctactgagatcactccctcagtaaatcatttgcaaaataatttctgtcttctgctctattttcaggaactcagccttaagcgattttattttggaattaatgagagttaatctgttgattaggagactagacaaggtataggaatcagaaggcctggtttccagactgacactgtgttttcttatctgatcaatcaattctgagaacatcaagttcctttgaaaaatgagaaaaataacatttccctatattttatgatactgtaag

SEQ ID NO: 40180 - DNA, 1000 bp, Homo sapiens
tgtttattctatatcacatttagtagaaaattacaatgtgttttaagctacaaaggatcatagcattatatcataaatccaagtctctctctagtattctaaactgtttcttaactagaatatttcaattaaaataattatttaaattatgctatgtatgttggtgttcctatcatacagagaatgacaagctctgttatctaagaactcaacactcacagacagaacaaagttggccacgtgttgattcttactgataataggcgtgtgtgtactagagttctctgtgctattctttctactttggtatgtacttgaaattattcacaataagattaaaaattaaacagctcaaaagaaaattaaaattatttatcagtagcagattctgttgaggtgcctttagcgatatgaagcacctgtcccagctgctgttctcagctgcacccctcttcgagtgttgtccttacctgactctgggagccacctcatctgtctctgcctgggaggcgcaccccactccactctcaggggtgttcagaactaatgactaagtgaaggggagagagtccttacaacagctctctcacttctgggtgggaaaatctctggagcaattcatattctggagcctcctgtgtgatcaggytgaggccaaacttctcttgagccctcttctttggctgatttcatcctctactctgtcttgcattcttcacaatcctagatgtttctactgagatcactccctcagtaaatcatttgcaaaataatttctgtcttctgctctattttcaggaactcagccttaagcgattttattttggaattaatgagagttaatctgttgattaggagactagacaaggtataggaatcagaaggcctggtttccagactgacactgtgttttcttatctgatcaatcaattctgagaacatcaagttcctttgaaaaatgagaaaaataacatttccctatattttatgatactgtaag

SEQ ID NO: 40181 - DNA, 532 bp, Homo sapiens
aattcttgcatcaatgcctgacttcaagaagacccataagtagctcctaactttgtaaactgcatttcaatcatttctaaataatttgtctcttaagcatgtaagggataggcccttgtttttatattccaaaacttgctaaaagaaccatctgctctttccaaactcttacaagcaccagtaaaattctatttgatacctaacttaaaaataggtgatttattaaacttaggatttggcttctggaacttatctccatgtactttaaatgaataactctaccagacctaggaaatgtgaatttgttgtgaagtagtcaagaagttgacataaaagaactggagccagtaattttgtgggcattgcttaaaagctgggtgatgtttgtaaagttacataaagtctatgcttcttggtttctttatctgtaaaatgggcataataatttatacttcattttgctgtcaagaggattaaattagwtgacacatctttatgcttacagacacataataaacactaaaatattgtc

SEQ ID NO: 40182 - DNA, 574 bp, Homo sapiens
agaaaaacagggaaaggggaaggccaatagttattgaagacagctggtgctcaaatctgccaggacctcctgtggaatcaaatagaatatgcttcggaattttagctgatggggacgagagatgcattcatcattagtttttgtctcccttggtcaaggctgccccatgggttattcactcttcccacttccaggctgggcaggaatgaatgccaggtcgcttcccacatccctcccaggtagtaacttcagagaagcccgagtcccaaggtgagaagctaagtcaagatggttgtggaaggaataactggaggaaaatgaaactcagcgactatgagactggagaccagagctgtttaatatgcttacctgcatgctacatatgttcttgtgtgtgcatcaaacccatttaaatagttaacctattttaatattattattaaaaaataagaggaaacagttgcatataccttcctttcttcccagatrgaatattaatacataacagatagtgtagtgtctgtaacacggcctcaagaacttccattatctggcccttgtgacttttcagacc

SEQ ID NO: 40183 - DNA, 668 bp, Homo sapiens
atcccagcactctgggaggccaaggtggggggatcacttgactccaggagttcaagaccagcctgggcaacatagtgagaccgtgtcttaaaatatatatatatatatatatatatatatatatatatatatatatatatatatatatatatawataaaataaatggtcatgagggacactttttgctgtactggtgcttggtcatgacaaagacaaggtcatacaggcatgagttcaaacaaactcctggccgggtgcggtggctcatgcctataatcccggcactttgggaagccgaggccggcagatcacctgaggtcaggagttcgaaaccagcctggccagcatggtgaatcccatttctactaaaaatacaaaaattagccaggcatggtggcaggtgcttgtaatcccagttactcaggaggctgagacaggagaattgcttgaacccgggaggcagaggttatagtgcattgagatggcgccactgcactccagcctgagcaaaaagagcgagactccatctcaaaagaaacaacaacaacaaacaaacagaaactcccaagctccatgactgattttatggcaaagaggaagagaataaaacccagaggcagagccattccccggcagctgaggttctggccctaaaacaatgcctttt

SEQ ID NO: 40184 - DNA, 668 bp, Homo sapiens
atcccagcactctgggaggccaaggtggggggatcacttgactccaggagttcaagaccagcctgggcaacatagtgagaccgtgtcttaaaatatatatatatatatatatatatatatatatatatatatatatatatatatatatatatatataaaataaatggtcatgagggacactttttgctgtactggtgcttggtcatgacaaagacaaggtcatacaggcatgagttcaaacaaactcctggccgggtgcggtggctcatgcctataatcccggcactttgggaagccgaggccggcagatcacctgaggtcaggagttcgaaaccagcctggccagcatggtgaatcccatttctactaaaaatacaaaaattagccaggcatggtggcaggtgcttgtaatcccagttactcaggaggctgagacaggagaattgcttgaacccgggaggcagaggttatagtgcmttgagatggcgccactgcactccagcctgagcaaaaagagcgagactccatctcaaaagaaacaacaacaacaaacaaacagaaactcccaagctccatgactgattttatggcaaagaggaagagaataaaacccagaggcagagccattccccggcagctgaggttctggccctaaaacaatgcctttt

SEQ ID NO: 40185 - DNA, 1247 bp, Homo sapiens
gcatacataaaataagagcaaaactgatcatcaataactgattcaaatgtttggatagattcaacccgttaagaatttctcacattattgcatgtaaattatacyccaataaaactgatttcttttttctttttttttttttttttgagagggagtctcgctctgtcacccaggctggagtgcagtggtgcaatattggctcgccgcaacctccacctcccaggttcaagcgattctcctgcctcagtctcccgagtagctgggactacaggctacaggcatgtgcctggctaatttttgatttttagtagagatggggtttcaccatattggccaggctggtctcgaactcctgaccttgtgatctgcccacctcagcctcccaaagtgctgggattacaggtgtgagccaccgcgcccagccaatttttctttaaggagcccaacaaagaaagaaaaacaacttcacattattttactggtaacaagccaaatattttcaagagcgaatttatacttgccttatcaaccataaatcacaggacggtaagaatcacacctcccttcgtatttcacgttgttcccacaaacctgattatgaaagaatctgaggtacttaccttattcattctctcatcaaactaaggcaggagggcatgccagtgggttcactacaacaggattaggtttctctactcaagcttccctaaactatgactatgataacatccaaaccgaacacctcacatgtgaccttttgagtttcactgagaaagcttagagcagaggtcacaaaatgagtcaacacaggaagaaatatggaacaattgagatgttttctgattttggagggaaaggaatgaaaagtaacccaggcttggctgaaagttgtttccatcattcattcatcaacagctcaacttgctcttaaataacatgtcatctttgaatgcacataaaaccaaggtccaggctaagcaggtgaaaacaaaatggaaacttttgtttggtcaggaaactacaggaatctgctgagaacactcctgttgcactctatagcttatctctgggagagagaaaagagcggcctctaccttggctgctgtcctcctccgtgctactgaaatcgtcctcatagtaagtattggagtcggtggaggcgctggcatcgctgctcatggagcccttcctctgccgctgcaggacacatgcctaggaaaatgacaattacaaaaccggagccatcc

SEQ ID NO: 40186 - DNA, 1247 bp, Homo sapiens
gcatacataaaataagagcaaaactgatcatcaataactgattcaaatgtttggatagattcaacccgttaagaatttctcacattattgcatgtaaattatactccaataaaactgatttcttttttctttttttttttttttttgagagggagtctcgctctgtcacccaggctggagtgcagtggtgcaatattggctcgccgcaacctccacctcccaggttcaagcgattctcctgcctcagtctcccgagtagctgggactacaggctacaggcatgtgcctggctaatttttgatttttagtagagatggggtttcaccatattggccaggctggtctcgaactcctgaccttgtgatctgcccacctcagcctcccaaagtgctgggattacaggtgtgagccaccgcgcccagccaatttttctttaaggagcccaacaaagaaagaaaaacaacttcacattattttactggtaacaagccaaatattttcaagagcgaatttatacttgccttatcaaccataaatcacaggacggtaagaatcacacctcccttcgtatttcacrttgttcccacaaacctgattatgaaagaatctgaggtacttaccttattcattctctcatcaaactaaggcaggagggcatgccagtgggttcactacaacaggattaggtttctctactcaagcttccctaaactatgactatgataacatccaaaccgaacacctcacatgtgaccttttgagtttcactgagaaagcttagagcagaggtcacaaaatgagtcaacacaggaagaaatatggaacaattgagatgttttctgattttggagggaaaggaatgaaaagtaacccaggcttggctgaaagttgtttccatcattcattcatcaacagctcaacttgctcttaaataacatgtcatctttgaatgcacataaaaccaaggtccaggctaagcaggtgaaaacaaaatggaaacttttgtttggtcaggaaactacaggaatctgctgagaacactcctgttgcactctatagcttatctctgggagagagaaaagagcggcctctaccttggctgctgtcctcctccgtgctactgaaatcgtcctcatagtaagtattggagtcggtggaggcgctggcatcgctgctcatggagcccttcctctgccgctgcaggacacatgcctaggaaaatgacaattacaaaaccggagccatcc

SEQ ID NO: 40187 - DNA, 802 bp, Homo sapiens
tgcagctataaaaaatgatgagttcatgtcctttgtagggacatggatgaaactggaaaccataattctcagcaaactatcacaaggacagaaaaccaaacactgcatattctcactcataggtgggaattgaacaatgagaacacatggagacaggaaggggaacatcacacaccagagcctgttgtggggtggggggagggatagcattaggagatatacctaatgttaaatgacgagttgctgggtgcagcacaacaacatggcacatgtatacatatgtaactaacctgcatgttgtgcacttgtaccctaaaacttaaagtataataaaaaaaaaagttacccgagtcttctgaacttcagttttctcaattaaaaaagaataaaaataatattgtggttatttaaagaatttaagtgatgtctaatatggagcccacaatattgagcatattaaaataattgttgataccactatttattattaagktttatctgaattttagacttatctctgcatttttgcctcaccaggcctcagtttgctcatatatcaaatgccaggttgatttagagatataatcatggttctagccagcactgacattccttgaatcaatgacatttttctattattaaaactcgataggacggaggtcattttttgttttttgttttttgtttttgcaaaaaactgtgacttcagtttttctgtgttctgcgaaggcagcgttggggtgctgcttccctgagttcacagggaacccttatttcatctcttagaatatctctaattaag

SEQ ID NO: 40188 - DNA, 802 bp, Homo sapiens
tgcagctataaaaaatgatgagttcatgtcctttgtagggacatggatgaaactggaaaccataattctcagcaaactatcacaaggacagaaaaccaaacactgcatattctcactcataggtgggaattgaacaatgagaacacatggagacaggaaggggaacatcacacaccagagcctgttgtggggtggggggagggatagcattaggagatatacctaatgttaaatgacgagttgctgggtgcagcacaacaacatggcacatgtatacatatgtaactaacctgcatgttgtgcacttgtaccctaaaacttaaagtataataaaaaaaaaagttacccgagtcttctgaacttcagttttctcaattaaaaaagaataaaaataatattgtggttatttaaagaatttaagtgatgtctaatatggagcccacaatattgagcatattaaaataattgttgataccactatttattattaaggtttatctgaattttagacttatctctgcatttttgcctcaccaggcctcagtttgctcatatatcaaatgccaggttgatttagagatataatcatggttctagccagcactgacattccttgaatcaatgacatttttctattattaaaactcgataggacggaggtcattttttgttttttgttttttgtttttgcaaaaaactgtgacttcagyttttctgtgttctgcgaaggcagcgttggggtgctgcttccctgagttcacagggaacccttatttcatctcttagaatatctctaattaag

SEQ ID NO: 40189 - DNA, 536 bp, Homo sapiens
ttttgaattattatcttaatgctatgtgataataattatttttaggtaaactggctgacctctttttgtaaagtaagacttttcaaacaattatcatggtgagaatatttcctgtatcgttaatgaaataaaaatggaagccaatataattttattctgccaaaagtagtaacaagtaacagtatatttaagtttatattgctttaaagatactcttyatcctagcagaccatatgagctattttaaccacctttagtaagtaatatggtttaaaaatttaaaagcttattgggactaataaaaacataaagtgacaaccttcaatccattctatgtacctgcagttcagtcagacttatttttggttgttgtatttttcattagacacttgataaattgtgttttattatttatattcaactcgctttagaaagaaatttaaagtcattgatagaaaaagtatgttcctttaagaatacctcagtaaacaaaacaaaccttagaaaatgtcaattaaaaggagatgaagaggaaa

SEQ ID NO: 40190 - DNA, 650 bp, Homo sapiens
tttgttcctatcatcaaaggcctacttatgaatcaaactttaattttgttctcctttcattagytgtaagtgccacttagcacatccagaagcactccagccctacttctcccagtgtcttttctcccatgccattttgctttttatatgacaccccaggcaaggacaagtgtcgtgacttgaactcttactaccacatttgccctttactcgtcctgaccatcacaagctctgagctgggagcctccctgcttctgctttagatattgctggtcttgctaccaccaccggcagttagccaagggagatgttaagtaatttctcttggcagtaccacttgcagtattttctaactgcccccttggggctttgcccaccttcactttagtcctactgtatggagaactttgaaggatttctcccctaagtatggattagatgataggaagaagagtaaaggagtaagggtctaactaaaggtattgagttcaacacttgctaggaacaagtcagttctgttgtgttcttgctggaatctgaccactccaccagggggcgttctctctcatcaagaaaaccattgtttcccacttctcatcttgtctaaactccgtatgcttgtagatactccttcatctgtctttgctgtg

SEQ ID NO: 40191 - DNA, 548 bp, Homo sapiens
tgttttatgacttgaatatttatacccaaaaataaaaaaaacttccacatctctatagtatagtaacatctctatagttacaaaaggaactctatttagattcttaattcatctggaatttatatgtgatatgaaatagaaaataaaatctaaatttacattcttaaaattgcacagccaagccaggtgcagtggctcacgcctgtaatcccagcactttgggaggccgaggcgagcggatcacragatcaggagatcgagaccatcctggctaacacagtgaaaccctgtctctacgaaaaatacaaaaaaattagccaggtgtggtggcgggtgcctgtagtcccagctactccggaggccgaggcaggagaatggcatgaacctgggaggcggagcttgtagtgagtagagatcgcgccacttcactccagcctgagtgacatagcgagactccatctcaaaaaaaaaaaaaaattgcatagtcaagtattcagcacattgatctgaaatgtcacaaccttttttatgtactaattcccaaagga

SEQ ID NO: 40192 - DNA, 548 bp, Homo sapiens
tgttttatgacttgaatatttatacccaaaaataaaaaaaacttccacatctctatagtatagtaacatctctatagttacaaaaggaactctatttagattcttaattcatctggaatttatatgtgatatgaaatagaaaataaaatctaaatttacattcttaaaattgcacagccaagccaggtgcagtggctcacgcctgtaatcccagcactttgggaggccgaggcgagcggatcacgagatcaggagatcgagaccatcctggctaacacagtgaaaccctgtctctacgaaaaatacaaaaaaattagccaggtgtggtggcgggtgcctrtagtcccagctactccggaggccgaggcaggagaatggcatgaacctgggaggcggagcttgtagtgagtagagatcgcgccacttcactccagcctgagtgacatagcgagactccatctcaaaaaaaaaaaaaaattgcatagtcaagtattcagcacattgatctgaaatgtcacaaccttttttatgtactaattcccaaagga

SEQ ID NO: 40193 - DNA, 727 bp, Homo sapiens
gccaaccctagagccagccttgattcttcctccccacagccagcatgcccggtgccccacaggaggagagcccaaggccaggtgggggatggggagatgaggctatgcggccagtcttgggaaacatgggaagacaagcagttcctgagtgtgccagcacctaatcccggtgggcagggtggcagaggaaatgagaagaagactctttatgtccagacctgctccacatgctacttatccctgctcacagcacagcctttctgcctcaacctgcccacaccagctacaggggcctcaggagcagagctgagcctactccctgccatggctaggccagtgattccaggttcccacctcctgacccaccctggcggggcytcagatgtaatgattcaggcccccgaggtagggaaaaattactcccaagggagcctgagaggaagtcaggatctgtgagcaatgggggccctctcatccaagccctccctataccattggcagtcactccccacccatttctcccaggttactgtgtcattacaaacacatccacgcacgtgctcacacacacacacacacacacaactatcaggtttcaagtccaccagcatttcctgagcagtgcctctgtgctgacctctgagcggggccatccctgttgacacaaagagcagctccaacaagccctgcccacaaggaacaccaaacactgatacctgtatgtggg

SEQ ID NO: 40194 - DNA, 593 bp, Homo sapiens
atgatgagcattttttcatgtgtctgtcgtctgcataaatgtcttcttttgagaagtggctgttcatatccttcgcccactttgtgatggggttgtttttttcttgtaaatttgtttgagttctttgtagattctggatattagccctttaaatgttagacctaaaaccataaaaaccctagaagaaaacctaggcaataccattcaggacataggcatgggcaaggacttcatgtgtaaaacaccaaaagcaatggcaacaaaagccaaaattgacaaatgggatctaattcaactaaagagcttctgcacagcaaaagaagctaccatcagagtgaacaggcaacttacagaatgggaggccttgttcttaaccattgccttatctttccagccaccttggaggaagatgttatcattagctctacattgtggatgagaaatctgagctggkcacagtggttcatgcctgtaatcccagcactttgtgaggccaaggtaggtggatcgtttgagcccaagagttcaagaccagtctgggcaacatggtgaaacccgatcactacaaaaaaacataaaaaattaaccatgca

SEQ ID NO: 40195 - DNA, 2062 bp, Homo sapiens
gatcctttccagtgtccctccagggctgcagctcccaaagaaaaaacctgggaaggcgaggaggagccggggaagcagaaagagaggctcttccttcccattcacaggttccatcgtcagctgccayggcctgaccccacactgccaccagacgtggcgccctggaagctggagggctgcttgtggagtggtgtgtggcttttatacgccctgcccccagcctggcccagcccagccctgtgaagaggggtctctagggcttgacaatgtcaattcaggctggctgagcctgtccctggccaaccacccccctgtctcctgaccttgaagggcagccctcagaggccccaggatgacatcggagagggcatgggatgtgtttggttggttgagggccactcagcaaagggctctgggctcaacttggccttggagctcgtctaccctctcaacaggcctttcctcaagcacagctcccccctttcccctccatacatacacacttactaagcaggagttctgatttgccctcagccagggctggaacttccccacacacatgcatcagccattcccataacatggttacccagaccttgtctgtgccgggcactgggcaagggacagggtcagagagtggggcgggcaggcccacagcctgggtacctgccttcctggagctcccatgtcagtgggggaggcaatggcagcccctgacagagaacgcccatcccaggcaggtgggtagccaggtcagttcccagaggacagggagggaggggcagccaggcttccggggtggatgggacctgatgactctatatggacaggcccccaaggaaatgatcctggcccccaacacccaaggctcctgggtcagggccaggcaactgtcactctggcttctactttgtttctaccacggaggaactgtgtgacctggctgagagtcttgccctctctggctctcagtgtccccataagtacaatcagagagtctgttctcagaatctccaaggatcctgtgtttcagcgtgttcaattccatgttaaatctatggtgagaaacccaacccagtttgctatttcctccctgccctttaagtggaatcaagagcgaattagagctgggtgcaataatcccagctactttggagactgaggagggagggttgtttgagctcagaagttcgagtctcgagagagagtgagtgagtataacaattactcagaagtagtagcctggaaatataagtaccccaaaacttttttttcaatttttaaaaagacaaaatgccagagactttgggagatccctcagagacccattccttggtttggagctcccaggcaatgcgagttgattataaaggtgctaccagggttgctgggctgtgtcctgcacctggggtacagagtgggaaggtaagaggcccttggagtgatagggggatgtagggagctactgtgtaggtgataacacttaacgatctggagaccaaaaaataaataaataaataaaaataaaaggatgaaaggacagacggacaactcaatgacaaggaaaaaatacaggttgaggtttagacatatagtgggacaggaagacaggagggtgaacaagcagacaccaaaggcagagacgaagaaggtgctggaggaatgggtgtaaagggacatactgtttactgaacgcctaccacgtgttagtaaccaaagtggtgttctttttgagcggaggatgtagacagaggtgggtggggacgaagccggatagactgctgggataagaggatggggcacccatagggcggggcaagagctgcctaagaattagaagaaagaaggcgtgcggggtggaaagcctcaaaagggggcactgccggccaggggtgaggttttagacaaatggacataggactcaacgatgaaaaccgggctggaaccaaacaaggaggcagagggagcagggagcttcgaagagccggtgcgggaagctctccgcgaagcgcagctcagccctgacctccccgcctggggctgcctggctctcagttcacct

SEQ ID NO: 40196 - DNA, 2062 bp, Homo sapiens
gatcctttccagtgtccctccagggctgcagctcccaaagaaaaaacctgggaaggcgaggaggagccggggaagcagaaagagaggctcttccttcccattcacaggttccatcgtcagctgccacggcctgaccccacactgccaccagacgtggcgccctggaagctggagggctgcttgtggagtggtgtgtggcttttatacgccctgcccccagcctggcccagcccagccctgtgaagaggggtctctagggcttgacaatgtcaattcaggctggctgagcctgtccctggccaaccacccccctgtctcctgaccttgaagggcagccctcaraggccccaggatgacatcggagagggcatgggatgtgtttggttggttgagggccactcagcaaagggctctgggctcaacttggccttggagctcgtctaccctctcaacaggcctttcctcaagcacagctcccccctttcccctccatacatacacacttactaagcaggagttctgatttgccctcagccagggctggaacttccccacacacatgcatcagccattcccataacatggttacccagaccttgtctgtgccgggcactgggcaagggacagggtcagagagtggggcgggcaggcccacagcctgggtacctgccttcctggagctcccatgtcagtgggggaggcaatggcagcccctgacagagaacgcccatcccaggcaggtgggtagccaggtcagttcccagaggacagggagggaggggcagccaggcttccggggtggatgggacctgatgactctatatggacaggcccccaaggaaatgatcctggcccccaacacccaaggctcctgggtcagggccaggcaactgtcactctggcttctactttgtttctaccacggaggaactgtgtgacctggctgagagtcttgccctctctggctctcagtgtccccataagtacaatcagagagtctgttctcagaatctccaaggatcctgtgtttcagcgtgttcaattccatgttaaatctatggtgagaaacccaacccagtttgctatttcctccctgccctttaagtggaatcaagagcgaattagagctgggtgcaataatcccagctactttggagactgaggagggagggttgtttgagctcagaagttcgagtctcgagagagagtgagtgagtataacaattactcagaagtagtagcctggaaatataagtaccccaaaacttttttttcaatttttaaaaagacaaaatgccagagactttgggagatccctcagagacccattccttggtttggagctcccaggcaatgcgagttgattataaaggtgctaccagggttgctgggctgtgtcctgcacctggggtacagagtgggaaggtaagaggcccttggagtgatagggggatgtagggagctactgtgtaggtgataacacttaacgatctggagaccaaaaaataaataaataaataaaaataaaaggatgaaaggacagacggacaactcaatgacaaggaaaaaatacaggttgaggtttagacatatagtgggacaggaagacaggagggtgaacaagcagacaccaaaggcagagacgaagaaggtgctggaggaatgggtgtaaagggacatactgtttactgaacgcctaccacgtgttagtaaccaaagtggtgttctttttgagcggaggatgtagacagaggtgggtggggacgaagccggatagactgctgggataagaggatggggcacccatagggcggggcaagagctgcctaagaattagaagaaagaaggcgtgcggggtggaaagcctcaaaagggggcactgccggccaggggtgaggttttagacaaatggacataggactcaacgatgaaaaccgggctggaaccaaacaaggaggcagagggagcagggagcttcgaagagccggtgcgggaagctctccgcgaagcgcagctcagccctgacctccccgcctggggctgcctggctctcagttcacct

SEQ ID NO: 40197 - DNA, 2062 bp, Homo sapiens
gatcctttccagtgtccctccagggctgcagctcccaaagaaaaaacctgggaaggcgaggaggagccggggaagcagaaagagaggctcttccttcccattcacaggttccatcgtcagctgccacggcctgaccccacactgccaccagacgtggcgccctggaagctggagggctgcttgtggagtggtgtgtggcttttatacgccctgcccccagcctggcccagcccagccctgtgaagaggggtctctagggcttgacaatgtcaattcaggctggctgagcctgtccctggccaaccacccccctgtctcctgaccttgaagggcagccctcagaggccccaggatgacatcggaragggcatgggatgtgtttggttggttgagggccactcagcaaagggctctgggctcaacttggccttggagctcgtctaccctctcaacaggcctttcctcaagcacagctcccccctttcccctccatacatacacacttactaagcaggagttctgatttgccctcagccagggctggaacttccccacacacatgcatcagccattcccataacatggttacccagaccttgtctgtgccgggcactgggcaagggacagggtcagagagtggggcgggcaggcccacagcctgggtacctgccttcctggagctcccatgtcagtgggggaggcaatggcagcccctgacagagaacgcccatcccaggcaggtgggtagccaggtcagttcccagaggacagggagggaggggcagccaggcttccggggtggatgggacctgatgactctatatggacaggcccccaaggaaatgatcctggcccccaacacccaaggctcctgggtcagggccaggcaactgtcactctggcttctactttgtttctaccacggaggaactgtgtgacctggctgagagtcttgccctctctggctctcagtgtccccataagtacaatcagagagtctgttctcagaatctccaaggatcctgtgtttcagcgtgttcaattccatgttaaatctatggtgagaaacccaacccagtttgctatttcctccctgccctttaagtggaatcaagagcgaattagagctgggtgcaataatcccagctactttggagactgaggagggagggttgtttgagctcagaagttcgagtctcgagagagagtgagtgagtataacaattactcagaagtagtagcctggaaatataagtaccccaaaacttttttttcaatttttaaaaagacaaaatgccagagactttgggagatccctcagagacccattccttggtttggagctcccaggcaatgcgagttgattataaaggtgctaccagggttgctgggctgtgtcctgcacctggggtacagagtgggaaggtaagaggcccttggagtgatagggggatgtagggagctactgtgtaggtgataacacttaacgatctggagaccaaaaaataaataaataaataaaaataaaaggatgaaaggacagacggacaactcaatgacaaggaaaaaatacaggttgaggtttagacatatagtgggacaggaagacaggagggtgaacaagcagacaccaaaggcagagacgaagaaggtgctggaggaatgggtgtaaagggacatactgtttactgaacgcctaccacgtgttagtaaccaaagtggtgttctttttgagcggaggatgtagacagaggtgggtggggacgaagccggatagactgctgggataagaggatggggcacccatagggcggggcaagagctgcctaagaattagaagaaagaaggcgtgcggggtggaaagcctcaaaagggggcactgccggccaggggtgaggttttagacaaatggacataggactcaacgatgaaaaccgggctggaaccaaacaaggaggcagagggagcagggagcttcgaagagccggtgcgggaagctctccgcgaagcgcagctcagccctgacctccccgcctggggctgcctggctctcagttcacct

SEQ ID NO: 40198 - DNA, 2062 bp, Homo sapiens
gatcctttccagtgtccctccagggctgcagctcccaaagaaaaaacctgggaaggcgaggaggagccggggaagcagaaagagaggctcttccttcccattcacaggttccatcgtcagctgccacggcctgaccccacactgccaccagacgtggcgccctggaagctggagggctgcttgtggagtggtgtgtggcttttatacgccctgcccccagcctggcccagcccagccctgtgaagaggggtctctagggcttgacaatgtcaattcaggctggctgagcctgtccctggccaaccacccccctgtctcctgaccttgaagggcagccctcagaggccccaggatgacatcggagagggcatgggatgtgtttggttggttragggccactcagcaaagggctctgggctcaacttggccttggagctcgtctaccctctcaacaggcctttcctcaagcacagctcccccctttcccctccatacatacacacttactaagcaggagttctgatttgccctcagccagggctggaacttccccacacacatgcatcagccattcccataacatggttacccagaccttgtctgtgccgggcactgggcaagggacagggtcagagagtggggcgggcaggcccacagcctgggtacctgccttcctggagctcccatgtcagtgggggaggcaatggcagcccctgacagagaacgcccatcccaggcaggtgggtagccaggtcagttcccagaggacagggagggaggggcagccaggcttccggggtggatgggacctgatgactctatatggacaggcccccaaggaaatgatcctggcccccaacacccaaggctcctgggtcagggccaggcaactgtcactctggcttctactttgtttctaccacggaggaactgtgtgacctggctgagagtcttgccctctctggctctcagtgtccccataagtacaatcagagagtctgttctcagaatctccaaggatcctgtgtttcagcgtgttcaattccatgttaaatctatggtgagaaacccaacccagtttgctatttcctccctgccctttaagtggaatcaagagcgaattagagctgggtgcaataatcccagctactttggagactgaggagggagggttgtttgagctcagaagttcgagtctcgagagagagtgagtgagtataacaattactcagaagtagtagcctggaaatataagtaccccaaaacttttttttcaatttttaaaaagacaaaatgccagagactttgggagatccctcagagacccattccttggtttggagctcccaggcaatgcgagttgattataaaggtgctaccagggttgctgggctgtgtcctgcacctggggtacagagtgggaaggtaagaggcccttggagtgatagggggatgtagggagctactgtgtaggtgataacacttaacgatctggagaccaaaaaataaataaataaataaaaataaaaggatgaaaggacagacggacaactcaatgacaaggaaaaaatacaggttgaggtttagacatatagtgggacaggaagacaggagggtgaacaagcagacaccaaaggcagagacgaagaaggtgctggaggaatgggtgtaaagggacatactgtttactgaacgcctaccacgtgttagtaaccaaagtggtgttctttttgagcggaggatgtagacagaggtgggtggggacgaagccggatagactgctgggataagaggatggggcacccatagggcggggcaagagctgcctaagaattagaagaaagaaggcgtgcggggtggaaagcctcaaaagggggcactgccggccaggggtgaggttttagacaaatggacataggactcaacgatgaaaaccgggctggaaccaaacaaggaggcagagggagcagggagcttcgaagagccggtgcgggaagctctccgcgaagcgcagctcagccctgacctccccgcctggggctgcctggctctcagttcacct

SEQ ID NO: 40199 - DNA, 687 bp, Homo sapiens
aaaataaattgacaaaatagcttctctctgataccatctttcaaataactgaataagtaatgcacattttttaaatgagaattgctgatgtagtgacaatatactttctactaaaatgaactatttacttattctattcaaataacaacttgattcattgyaaagcattttgaggcttcttcagaatgaaagaatgtggcagctgtaagaattttctccatatacaaaggcatgaattttttccatatacaattgcataatttaggagaaaatcatctacctacacaggggctttgctttctttttggacattaagcccatagtacatataggcttgatttggaattagttggactatgaaatgatagtcaattctacaagttactttgttaattaatgaattgttacagtgaaacttgcttaatagatggatatcaaggcatcgactcatttacctatttaggtaacaagataaaaaactattttagtttctggggatgatcgctggaaattttagataaaaattatgacccaataggttttgagaaggctaagaagttacccacacttgaagttgagggccgtgccattccacacatgtatgatcttggacaaatcatttatcacatctgagcttcagttttcttattgaaatacataacaatactttattcaaaggggctttag

SEQ ID NO: 40200 - DNA, 689 bp, Homo sapiens
ttaagataaggaaacagggcacagagaggttatataacttgcctaagatcacatagctagttagtggctgggctggaatctgaagccaggctgttcagtcacaggtccacactctctcgcaggggttcctggacacttacataaggtgatacacacagcatgcagagtgatgcttggtgcatacttagtgttcaaaagacgttggctagtaagattgttgtggtcccaatgtgtacaagacactgagatgtgatttaacacacaacaggtatatgctgggaggccagcattttgggtatctaagtaaaaatcccaaaccagaaagcatgaagcagcctsccaggggccaagtggctcgtgagagttccaacccctggtgcaaaccatgatgatggggaaacagacacacacatgcagaaggctagctgacaattcctactgatcaaaaagaatccaagagagtgcatttgtgcatctctccgggctgggttctcctaggtggaggccagaaggccccaccctgccctagtgctgagggacctgggacggggtggaggggtgggggaagaagccctttgctttttctccatcagcacagcccaggcagggaagcagagcgcagccatccagggaccctcctttggggcttgaccatcaccagcgaggcagaagccgtctgcagccggcaa

SEQ ID NO: 40201 - DNA, 689 bp, Homo sapiens
ttaagataaggaaacagggcacagagaggttatataacttgcctaagatcacatagctagttagtggctgggctggaatctgaagccaggctgttcagtcacaggtccacactctctcgcaggggttcctggacacttacataaggtgatacacacagcatgcagagtgatgcttggtgcatacttagtgttcaaaagacgttggctagtaagattgttgtggtcccaatgtgtacaagacactgagatgtgatttaacacacaacaggtatatgctgggaggccagcattttgggtatctaagtaaaaatcccaaaccagaaagcatgaagcagcctcccaggggccaagtggctcgtgagagttycaacccctggtgcaaaccatgatgatggggaaacagacacacacatgcagaaggctagctgacaattcctactgatcaaaaagaatccaagagagtgcatttgtgcatctctccgggctgggttctcctaggtggaggccagaaggccccaccctgccctagtgctgagggacctgggacggggtggaggggtgggggaagaagccctttgctttttctccatcagcacagcccaggcagggaagcagagcgcagccatccagggaccctcctttggggcttgaccatcaccagcgaggcagaagccgtctgcagccggcaa

SEQ ID NO: 40202 - DNA, 689 bp, Homo sapiens
ttaagataaggaaacagggcacagagaggttatataacttgcctaagatcacatagctagttagtggctgggctggaatctgaagccaggctgttcagtcacaggtccacactctctcgcaggggttcctggacacttacataaggtgatacacacagcatgcagagtgatgcttggtgcatacttagtgttcaaaagacgttggctagtaagattgttgtggtcccaatgtgtacaagacactgagatgtgatttaacacacaacaggtatatgctgggaggccagcattttgggtatctaagtaaaaatcccaaaccagaaagcatgaagcagcctcccaggggccaagtggctcgtgagagttccaacccctggtgcaaaccatgatgatggggaaacagacacacacrtgcagaaggctagctgacaattcctactgatcaaaaagaatccaagagagtgcatttgtgcatctctccgggctgggttctcctaggtggaggccagaaggccccaccctgccctagtgctgagggacctgggacggggtggaggggtgggggaagaagccctttgctttttctccatcagcacagcccaggcagggaagcagagcgcagccatccagggaccctcctttggggcttgaccatcaccagcgaggcagaagccgtctgcagccggcaa

SEQ ID NO: 40203 - DNA, 704 bp, Homo sapiens
ctactggaggggwcaacgctataaaggacattatttaacaaatctaaacaagaacggtagattacagtattatcacaacattaaacttatataagttgataatgtactgcagtaatgtaagagaatatttgtatttttaggaaacagtatttagggatgaagggctaagatggatgtaacttaccctcaaagagttctgaaaacaaaaaattatacacacacctacacattcagagggagaaagagaaccaaaaaaaaaggaaagaatgtggacttgtgtcctttgttagtgatgtgcatggagggaggtgaaaattttctctctttcaagtggtctctgcctcttctacagcaggacaggggagagaggtgcatgcttcctgccctgtcctggcagggcggtacctggagctagggtcttagaaggacactgcacccacaggccctggcccaggtctccatgggaccactgaccctttttttttttttttttttggacatggagtctcgtcttgttgctcaggctggggtgcagcggtgcgatcccggatcactgcaacctccacctcccaggttcaagcaattctccctgcctcggcctcctgagtagctgggattacaggtgcgtgccaccacacccagctagtttttgtattttttagtagggacggggttttgccatgttggccaggctggtcttgaac

SEQ ID NO: 40204 - DNA, 669 bp, Homo sapiens
tagagccttgtccctcctgagaagaaacagcctgggccctccgtgcacagatgagtcccacccctggcccacggactccttgtctgtagtaggtggacctgggcctccgagtgcagggtgggagcaaggcccggttcctcatcctgctcctgtgcatccctggccatgtatcttgccctctctggcctccatttgctgccctgtaaagtgaggcacgaagtctcaatgttcttacagttctccacgcatgtgcctcacctggtggctggattcaggctgcccagaggctgcagcctggacagagtgggcccatagcagctgaaaaaggacagcagctgctcattaaaatggagctgcatgttttgggtgccccatactgggaaagaagtgaggacatctgggctcttctgcctggggcctttgcacccaggccaggccggcctcttctaggcctccaggttcatctctgtgtagctgagtgagctctgttggtcagtaccctcagagtctgggcagtcgcagagtcaggaactggctagggaggttcttcatgagtgtccctccctcactgtcatctccccaggagacaggagccccagagtgacgtcctgcctgcatcctccaaagctggagtggagcctgcrggtgacacgtgtgtgaacacttgtc

SEQ ID NO: 40205 - DNA, 1236 bp, Homo sapiens
tgaggactctcaatgtgttcttcagttttttcagacatttttggaactcacaggaaagcatgtagaataattcagcttgagcctcaccaggtcttcccaatggtgcaggctgtacatgctccaccctggtcaggtctgyagggtagtggctgctctgagaagggcaagtgcagcaggaggcccctggagtgggcggctaggactaggcggcaggtgctgatagcaggctgatccctaggctgacaggggccatgtgggagacgcggtgggaacaggtgacaactacacagtggggtgacaaaggtgaaggaggtagagggctgggtaggtatggggtacactgtgacccatgccttcccctgcgctccccaccccctccccactataagcactggttgcagggcccagcttgtcccaaaccatagctggtggcacctcccctttcctgggtgggaccttctgaaaatgagggtgcgggggcagggggtggtattcatgggcaaaggtgtaagaaggctgagctcaggcacggatgcaaccagccagcacgagccccccacacccatgctgggctcctcgaggtgcagacctccccacaccctacctacacaagttggccctaaaccctgacggaaggtcagtactcagcaaaaaataaagcaagtgaaatcaggccactggactcagcactttcttgggtctttaaaactttggtcacccttgatcatgggaaaccatacaccatattcaggcaccatgctggcaactctactcccaggatatgggcttcagaaccaagtcagatgggaacccatccccagcctctggatcctccttgctcaactggaagaaagagcagggcttagtctatgctttgcctggggggagaagatcttgcttatttcagagcttcgaagaccatggcctgccacatgtaatccacactctgagagccacaagcgtcattcgctctcaccatcgcctgtggggttgtcacccgagggccagcttcagagacagctgctctcctctgcaggtgcagcatccacctgacgtcactggaactggggaaagacacttttctggacagccagggacgagggcagtggccttccagcagagccacctgccgcagcctgacagattgatgtaaggaaggtggaaacagtctgttcctggccttgtcctaccaggggaggaggattgagaaatgtgtctggtgttggtgctacagga

SEQ ID NO: 40206 - DNA, 1236 bp, Homo sapiens
tgaggactctcaatgtgttcttcagttttttcagacatttttggaactcacaggaaagcatgtagaataattcagcttgagcctcaccaggtcttcccaatggtgcaggctgtacatgctccaccctggtcaggtctgcagggtagtggctgctctgagaagggcaagtgcagcaggaggcccctggagtgggcggctaggactaggcggcaggtgctgatagcaggctgatccctaggctgacaggggccatgtgggagacgcggtgggaacaggtgacaactacacagtggggtgacaaaggtgaaggaggyagagggctgggtaggtatggggtacactgtgacccatgccttcccctgcgctccccaccccctccccactataagcactggttgcagggcccagcttgtcccaaaccatagctggtggcacctcccctttcctgggtgggaccttctgaaaatgagggtgcgggggcagggggtggtattcatgggcaaaggtgtaagaaggctgagctcaggcacggatgcaaccagccagcacgagccccccacacccatgctgggctcctcgaggtgcagacctccccacaccctacctacacaagttggccctaaaccctgacggaaggtcagtactcagcaaaaaataaagcaagtgaaatcaggccactggactcagcactttcttgggtctttaaaactttggtcacccttgatcatgggaaaccatacaccatattcaggcaccatgctggcaactctactcccaggatatgggcttcagaaccaagtcagatgggaacccatccccagcctctggatcctccttgctcaactggaagaaagagcagggcttagtctatgctttgcctggggggagaagatcttgcttatttcagagcttcgaagaccatggcctgccacatgtaatccacactctgagagccacaagcgtcattcgctctcaccatcgcctgtggggttgtcacccgagggccagcttcagagacagctgctctcctctgcaggtgcagcatccacctgacgtcactggaactggggaaagacacttttctggacagccagggacgagggcagtggccttccagcagagccacctgccgcagcctgacagattgatgtaaggaaggtggaaacagtctgttcctggccttgtcctaccaggggaggaggattgagaaatgtgtctggtgttggtgctacagga

SEQ ID NO: 40207 - DNA, 1070 bp, Homo sapiens
ttttttttttgctttcgctcacatcagtattagtctgttctcacactgcgaataaaaacatacctgagactgggtaattataaaggaaagaggcttaattgactcacagttccacatggctgcagaagcctcacaatcatggcagaaggcaaggaggagcaagtcacatcttacatgatggcagggaagaaagaatgagagccaagcaaaagaggtttccccttataaaaccatcagaacttgtgaaacttattcactaccataagaactgtatggggggaaccacccccatgattcaattatctcccaccaggtccctcctacaacacatgggaattatgggagctacaattcaagatgagatttgggaggggacacagccaaaccatatcagatccaatttcacatatttttggacccaggaaaccccactaaggccaagattacatatgcttttccagagtctgcttttgaagtcttcaggaggctcctgtggagaaaggagctgctgtccaagccagagggcctgtgggtgggatgggcagcttcctccacattccctgttttccaggctcaggggggcagccactgggaaatgggatgcagtcaggtcacttgcaggccattcgcccagcagagaagccaccagggtgggaagtggctcactaggatgagtgctgggccaggtctggtcagtgtgaccaccttgtcctgagcttatgatgatgaagctgcagtcggtcaggggcacgcagaacagagtgcagcagtctgtgtggtctcaccccctgcagcggcatctagatgctctgcatgaaggacaggagtgtctccatatcccagggcttccacagcaggaaaagaactgacgaggagcagttccagggatgggagaagacagaaggacaagccttgctgtaaactcaggacaagcctcttggaaacagtttcagaaacaggctggaggtggatatgaggaggcragagtagaggggctgatggccccagtcaatcagtggatggcactcccaaggctcaggaaagctgcccagggtgtctaggcacccctt

SEQ ID NO: 40208 - DNA, 839 bp, Homo sapiens
gactactgaaaacagttaaagatttttttcccttatatactgtctcatttctcttttcaaaagtgactgtgccattttacttacccactggcactgtaggtgggttccagtttcaccagttcttcaccagcacttgctattatctgtctttgtgattatagccatcctagagggggtgaagttgtatctcattgtagcattgacttgcattccctgatagataatgatgttgaacatcttttcatgtgcttattggctatttgtacatattcttcatattgtttgcccatttcaaaaattggattacttagttgtatgcgttgtttatatattctggatataagtcccttatcaggtacataatttgcaratatcttctcccatgttataggaattcagttttcaaacaggtttagattaacaaatagcaagaccaactttgtaaactactgtctcattgcattgccttagaaaccttaataaaattgaaaatcagttgaattagtaattatctgtttgtttacttatgaggtcagtagagtagtagtatttaatactttccctgtctgctgcttaatgtgttttatctctgtggttatactgtctccatcaaaggtaaagttattttctgggctcatttggaatgagaatatccatgaaagtgggaaatatttaaaggcaagttgtcacctactgccatttcttagagttgttttgctgagtgattggaacacctcacctaagtgctgacttttctgcgtaaggttatgaacagtatcagagattgcttcgtgactggaaagtgggaagatgataaagatgcagccaaggtcttagca

SEQ ID NO: 40209 - DNA, 839 bp, Homo sapiens
gactactgaaaacagttaaagatttttttcccttatatactgtctcatttctcttttcaaaagtgactgtgccattttacttacccactggcactgtaggtgggttccagtttcaccagttcttcaccagcacttgctattatctgtctttgtgattatagccatcctagagggggtgaagttgtatctcattgtagcattgacttgcattccctgatagataatgatgttgaacatcttttcatgtgcttattggctatttgtacatattcttcatattgtttgcccatttcaaaaattggattacttagttgtatgcgttgtttatatattctggatataagtcccttatcaggtacataatttgcagatatcttctcccatkttataggaattcagttttcaaacaggtttagattaacaaatagcaagaccaactttgtaaactactgtctcattgcattgccttagaaaccttaataaaattgaaaatcagttgaattagtaattatctgtttgtttacttatgaggtcagtagagtagtagtatttaatactttccctgtctgctgcttaatgtgttttatctctgtggttatactgtctccatcaaaggtaaagttattttctgggctcatttggaatgagaatatccatgaaagtgggaaatatttaaaggcaagttgtcacctactgccatttcttagagttgttttgctgagtgattggaacacctcacctaagtgctgacttttctgcgtaaggttatgaacagtatcagagattgcttcgtgactggaaagtgggaagatgataaagatgcagccaaggtcttagca

SEQ ID NO: 40210 - DNA, 839 bp, Homo sapiens
gactactgaaaacagttaaagatttttttcccttatatactgtctcatttctcttttcaaaagtgactgtgccattttacttacccactggcactgtaggtgggttccagtttcaccagttcttcaccagcacttgctattatctgtctttgtgattatagccatcctagagggggtgaagttgtatctcattgtagcattgacttgcattccctgatagataatgatgttgaacatcttttcatgtgcttattggctatttgtacatattcttcatattgtttgcccatttcaaaaattggattacttagttgtatgcgttgtttatatattctggatataagtcccttatcaggtacataatttgcagatatcttctcccatgttataggaattcagttttcaaacaggtttagattaacaaatagcaagaccaactttgtaaactactgtctcattgcattgccttagaaaccttaataaaattgaaaatcagttgaattagtaattatctgtttgtttacttatgaggtcagtagagtagtagtatttaatactttccctgtctgctgcttaatgtgttttatctctgtggttatactgtctccatcaaaggtaaagttattttctgggctcatttggaatgagaatatccatgaaagtgggaaatatttaaaggcaagttgtcacctactgccatttcttagagttgttttgctgagtgattggaacacctcacctaartgctgacttttctgcgtaaggttatgaacagtatcagagattgcttcgtgactggaaagtgggaagatgataaagatgcagccaaggtcttagca

SEQ ID NO: 40211 - DNA, 606 bp, Homo sapiens
catctctgttaaagaggaacatgagcaaccggtggcaatcagcccaggtggggttgtgggtctggataacagtttggagcaaatcaattagggcttgtggcttttcggtagagggcggtgtattgttttcccagttgagaaggtcggcagaggtgaaggsctggtacccaaaaacacgcctctccactacgtgaccatcctcctctatcccagtataccgctgctctctcaggggcatttggatccccgttttgggtcgtaaaccagctgtcgagggaggggtggaatggcacaatgtgacttaccgcgattaatggtatcaattattaattgagactaataactatcaatattaataactgatcatataattcttaaaatcaatagcgataataatgataattcacattaaagagttatactcacgataacaataaatgattaatattaatgattaatgacacctgatattaataactgatattgatcttattcattagaaaacagtcatattagctcttaataattaatattaatattaataatctgaacactttatgagcaatgatttcttaatattaatatcaatattggtaatagatattc

SEQ ID NO: 40212 - DNA, 606 bp, Homo sapiens
catctctgttaaagaggaacatgagcaaccggtggcaatcagcccaggtggggttgtgggtctggataacagtttggagcaaatcaattagggcttgtggcttttcggtagagggcggtgtattgttttcccagttgagaaggtcggcagaggtgaaggcctggtacccaaaaacacgcctctccacyacgtgaccatcctcctctatcccagtataccgctgctctctcaggggcatttggatccccgttttgggtcgtaaaccagctgtcgagggaggggtggaatggcacaatgtgacttaccgcgattaatggtatcaattattaattgagactaataactatcaatattaataactgatcatataattcttaaaatcaatagcgataataatgataattcacattaaagagttatactcacgataacaataaatgattaatattaatgattaatgacacctgatattaataactgatattgatcttattcattagaaaacagtcatattagctcttaataattaatattaatattaataatctgaacactttatgagcaatgatttcttaatattaatatcaatattggtaatagatattc

SEQ ID NO: 40213 - DNA, 606 bp, Homo sapiens
catctctgttaaagaggaacatgagcaaccggtggcaatcagcccaggtggggttgtgggtctggataacagtttggagcaaatcaattagggcttgtggcttttcggtagagggcggtgtattgttttcccagttgagaaggtcggcagaggtgaaggcctggtacccaaaaacacgcctctccactacgtgaccatcctcctctatcccagtataccgctgctctctcaggggcatttggatccccgttttgggtcgtaaaccagctgtcgagggaggggtggaatggcacaatgtgacttaccgcgattaatggtatcaattattaattgagactaataactatcaatattaataactgatcatataattcttaaaatcaatagcgataataatgataattcacattaaagagttatactcaygataacaataaatgattaatattaatgattaatgacacctgatattaataactgatattgatcttattcattagaaaacagtcatattagctcttaataattaatattaatattaataatctgaacactttatgagcaatgatttcttaatattaatatcaatattggtaatagatattc

SEQ ID NO: 40214 - DNA, 606 bp, Homo sapiens
catctctgttaaagaggaacatgagcaaccggtggcaatcagcccaggtggggttgtgggtctggataacagtttggagcaaatcaattagggcttgtggcttttcggtagagggcggtgtattgttttcccagttgagaaggtcggcagaggtgaaggcctggtacccaaaaacacgcctctccactacgtgaccatcctcctctatcccagtataccgctgctctctcaggggcatttggatccccgttttgggtcgtaaaccagctgtcgagggaggggtggaatggcacaatgtgacttaccgcgattaatggtatcaattattaattgagactaataactatcaatattaataactgatcatataattcttaaaatcaatagcgataataatgataattcacattaaagagttatactcacgataacaataaatgattaatattaatgattaatgacacctgatattaataactgatattgatcttattcattagaaaacagtcatattagctcttaataattaatattaatattaataatctgaacactttatgagcaatgatttcttaatattaatatcaatattgrtaatagatattc

SEQ ID NO: 40215 - DNA, 750 bp, Homo sapiens
aagacccatgttagacttttaacttccagaactgtaagacagaaaatttgcatggttttaaatcaatgatttgtgatcatttgatgcagcatcagtggaaagcttacacatgccctacaagaccctagagacagtggacactgcccatctctgtggcttcattctgtgccactctctgtccaccccttccccttttttcttctggttttcctaatgcttgtgatcccccaggtccccagaagtgctgttacctctcctttgaatgtctctctttccctggctcactcttgtgtcaaaggcatgtgaacaagggcaactccatattgaatakgggctgcgtaaaaggaggctaagacctactgggctgcattcccagatagtaaggaattctaagccacaggatgagacaggaggtcagcacaagatacaggtcataaagaccttgctcataaaacaggttgcagtaaacaagccaagatccaccaataccaagatggcaatgggaatgacctctggttgtcctcattgctacactcccaccagtgccatgacagttcaaaaatacaagggaacggggggaagtaaccctacatggtctaaaaagggaaggcataaataatcctccccatgtttagcatatcatcaagaaataatcataaaaacaggcaaccagcagccctgttgctgctctgcctatgaggtagccattcctttattccttcactttcctaagaaatttctttcacttta

SEQ ID NO: 40216 - DNA, 604 bp, Homo sapiens
agggctcagcctgaatgcttctctaaacttttccacatgtagtaaggctaaagaccatgtgttttacaagatggcaacactcaatcctatgcttttcactgaaacagaatgctctgtcattgaagcatttctctggggacctaagattctctttacagaggcaatacccattaattctaatgcagcctcctgtcatctgggactcatgaacttccaccgcagtggtcccttcctataatcaaactgtagtagcttctgtctccatagaagatgttagacatgcccagaaacctggtatgcaatgtcacactctgccaaaagaacataaaacttagacaaatatggaagtcattaacactgaagagttctttgctattaaaaataggaaaattttattactttcctacatgagaagaatatataatacctttagggttatttggtcatttggaggctagcttcttttctctgtttgtagamctatttttggaagtcgaacattttttttttttcattttaagcaccctattgatacttggcatctctgcagtaatagaattttgaagagttcatcctgttcctacgctcggtcaattttggataa

SEQ ID NO: 40217 - DNA, 623 bp, Homo sapiens
tttaacctaatacagtggattaatgttttaccataacttactgcttctagattcagatgtattagggcttacttctgagccttaaaatataaacatacatagtaaaatctgaatatgctatggttctcatttatagatatttagctttttctcttaacaccaaactcaaataatttgaatgaatactagaaatgtaattgagaacagaatttagtagattcattttaatactatacagtgtagtattggtagaaaaaagtatagattttagagtcagataaacctgagttttaagttctaactgttatttattagtagtaatatcttggctaagccatttaatttttaagcctcagtttcctcatccgtaaactatagattataatatttcacttgtgtgagagttaaatgaaataatgacagtraaatatctagcatggtacttgacacatagtagacaataagttaatatcctattactgttattgttatgtcagcttagactaaaataatcaagtttttcatagcttcagatgtctcaatatgaaagagcactaaatgcaacaaagattaatattgtgggttttttgtgaaaactaaacaaaataatttgtaaatatgca

SEQ ID NO: 40218 - DNA, 652 bp, Homo sapiens
caaatgtcagaattggccctaaagaagctggcaaaccctttggccaacttcattaaaacagtttgttatcaacttagcaaaaataaaaatcatgatctttagtgggttctaactagccttcagattagtccattcaagaggggagaggaataaaatgccactttggagaagtcccttctgtaatgctgtgggtcttggttctgtccttgcaaagactgaaatcgaattctaactgctttgggaatccttggtgatattgtggtcaccacattcatctctgcaattcctacaaacctgagatttcatcattatgtagaactttgagcattatattggactctaattttaagtcacctgaatttgtagacacgaacattgctaatatagtagagaaaagcaacaaaaaagcagaagaaacccatctcagaaaaacattgtagtagtatttgagctaaagaaaaccataggctgaatagtagaataccagtactttttccatttcttccttattatagtctagtagtgggacctttggtgaatggatttaagaaattttagaaaaaggttgttaggtcrtgtttgacatccttctgggaaaaataaatttttaaaaataaaaaagaggtcattaggaatatagattatgaatgca

SEQ ID NO: 40219 - DNA, 943 bp, Homo sapiens
tgagtacattacaacaatagagggagaggatataattttccttgctaccagcattaatcttgttggcgcttacgattgggtgatgatacagtcctgttttggcgttcgcttcatgttagtcttgcagaaacaggaagatcacaatggcggccagcagttcttcgcagtcgtacagctgctgggagcaagcaaggaagctgaaaattttgcttaccaacttgagctaaagggtaatcggcgacgactgacttgggaagcgactcctctacctattcatgaggacatagcaaaagccattaagaatagagactgcttaatctttgacgccaacactgcgctgctttttgcagaaaatgacgatttaagcatcaatgtagttattagtaagcgttgaaatggcagtggaacattttctagccagtgtttaaaactgtttaatttcacagaaaataagccacccatctgcctgccaacctgaaactcttcacaagtataagctcaacaaatagagataaaaagaaagactgttgaatacaggaaacagttgtgtgtagtaacattagtatatataaagatgagcatattttgcattaagaaagcattataaaataattttgaattttgtgttgtagattgattgtattgttgaaaaataatgttttgttttgttttgtttttgggtctgtgagtgtgtgtgtatgtgtgtgtgtgttttggtttttttttttcttttttcttttttttttttttttttttttttttggagacggagtctagctgctggtgcgcccaggctggagtgcagtggcgcgatctcggctgcactgcaaactccgcctcctgggktcacaccattctcctgcctcagcctcccgagtagctgggactacaggcacccatgcacctgcaccatgttagccaggatggtctggatctcctgacc

SEQ ID NO: 40220 - DNA, 603 bp, Homo sapiens
tgtactcaccattcccagggaagtatttctcagcaggataatgacggtagttgagaactgtcacccaacattggaagtactgcacaaacagggtgtgtaagtggagcttacaaccacttatagatttcttttgggcactggcaatgccaagtgcaagataattaatgcagaataattaatgaagcctctrtatttcaataattagagaagctttacatggctatcatctgtctccattcatcaacttatcttagttttatcaatgtgctttagtcaagtatgttttactggtatcaaatgcaactgtaatcacctgcttggatgcactgcactatgaaggtggcttcctaagtctccatgtaaaaccttcgattttaaagttttagaatcgctgaaggatcttctaaccctacaaatttaaatagggtgttttattccttatatattagaaaagcatttttgaagagtatttgaatttgaaaagaaattctaaaaaatgtatgatatttgaataaaatagttttttataacaaacccttatatcttaaattcttatctaaatactatacatgagaaaagcctaccaaatcatgttttcatttg

SEQ ID NO: 40221 - DNA, 579 bp, Homo sapiens
tggctaacatggtgaaacccagtctctactaaaaatacaaaaaattagccrggtgtggtggtgggtacctgtagtcccagctactcgggaggctgaggcaggagaatggcgtgaacttgggaaggcagagcttgcagtgagccgagatcgcgccactgcactccagcctgggcaacagagccagactccatctcaaataataataataaatgaaacaacatagaagtttaccaactggtatatgtttattcgtattaatggaatatattgtatgacttaaattgaagttttgaaaattaagactatgtagatttattttctctgaaaatattacctgtgatacaggcacaaacttttcttccaatggaccctttaaaaacctccttataatgacaaagtactcaaaagtaaccagtcagaaaagtttgcaactatcagattgttaaagtactttgtataaaattagctagatttaaacaaaaaatatgaattatttttttaaaaaatcaaaagttaaacatgcccttaaccttactaaatttgttattcttcattgagatttcagttcctggacccctc

SEQ ID NO: 40222 - DNA, 849 bp, Homo sapiens
tgaaaatatctacatctaatatgtattaaataaataaataaaaagctgccaaattgaaaaaaatctagaaaggattttatgtcaacaagtgctaataamacttgtttttagttattgctatgctttatattaattcacagactatatcgcataattttttttttttgacatgaactctcactctgtcattgaggctggagggcagtggtgtgatcacagctcactgcagccttgacctcctgggctcaagccatcttcctccctcagcctcctaagtaactggactatagacacacacaaccatgcccagctaatttatgtatcttctgcggagacgggctctccctgtgttgcccagtctggtcttgaactcctgggctcaagcaaagttcccaccttggcctcccaaagtggtgggattagaggcatgagccaccatgcccagccctgcataattatttttaaccaagaactagaaatctgtttctcaaagtctgctccatggaccacctacaccaggatcaactgggggagggagagttgactaaaggccaaattcctgggcctcatcaaaccgatgcaatcagaatttctaagttctacctttgagatcctggaatgtgtactttaaggaaatgcccagatgattctcacatacagtaaagtgtgagaagcagggatggagcgcaataaatagaaatgatctgtgtcaagagaggaatggattgattgacacgtagtatacagtgcaaagacagtagccgtgaacgtcattgtatgatgatggccagtcacatagcaacatccttcactaatcaagtgcattagatgtttactgttgggttagaa

SEQ ID NO: 40223 - DNA, 614 bp, Homo sapiens
ggcctacatcagtggtttataaaaactattttaagtggtggtaatcccaacactttgggaggccaagatgggaggatctcttgaggccaggagtttgagaccagccttagcaataaaatgagatcctgcctctaccaaacagacaaaaaccaaaaacactcacacaaaacaataagcattcttttattaaagcccaatatgtaaaagatagtagcayggctaatcctccctctgacatgaggcattgcctctaaagccctaaggctcccgggagaacaacttgaaagacctgtatattagttttctattgtttctataacaaattaccaaaaacttagtggcctaaaaaaacacaaatttattatcttatagttctggaggtcaggagtccaaaatggatctcactgggctaaaattaagctgtcagcaggcctgaattcctttctaggggcttgaggagagaacttggtctttgccttttctagcttctggaggcctcctgcattccttggcttgtggccccttcctgcagcttcaaaaccagcagtggctcgtcgagtctttctcacatgacatcactctgatgctgactctcctgcctcccttttctgtgt

SEQ ID NO: 40224 - DNA, 1129 bp, Homo sapiens
tgcactcaaggcactgagtgatgctattgaccaagacagacccagcctctactcccatagagctcacattctggyggatataatattcatttccaaccaactaagaaagcaacaactgatgacaaaataaaacaaataaaaataaccttatcctctcaggattcccaacctgccacctggagagcaaggtccggtcctggtagcaaaagggcggagcaccttgcccatctgccattttgatctgaaagactcggactacataagtggccatcagcgcaacccagagctccgagggtccagtgggggagctctggatccaaacacccgggtgattgagttcaccactgtgggcataggagggaagaatctccggtgagttgcttaggtttacattgattgaattcacatcggtcctaaagaactctaaaagaattcagatagatgagctagacctattcctataagcaggctcgatatcctggggtttgacctgagttttagaggtttgactttagagaactgttacgttaagaaagctgaattctgtctccttagttttgccactgaggaaaatatggaagacacaaaagtataatccctgaccacctccttaaccacagaggatcattggcacagttgtgcccttggcagcattgttattccaaagtccagaaccctaccctgactgtggatcgctagaggagatggagttttcatttccacagtaacaaagtgctctgaacagttctgcttcccagatgggggactgggttggggccaggttctaagaaatttctcttaatcctcaatcccctgtcccactctcttctgtcaattctccccaccctggccaggacctttaccatcctaaacccaaccaatagcacctactccttctgctggatctctgaagaaattgaaagtctccagaaccctgcagcattcacatgccttacagaaaagggcttcatccaccctgaaaagaaagccgaggtatgtgcagatgagaaccactcaacccaaggcttagatcactctagccattgctgtgtagaaagtgtgccatagacagtaagtggaattaggaagaactgcctgagggtgtagtgcatcaatcaacaagtattta

SEQ ID NO: 40225 - DNA, 1129 bp, Homo sapiens
tgcactcaaggcactgagtgatgctattgaccaagacagacccagcctctactcccatagagctcacattctggtggatataatattcatttccaaccaactaagaaagcaacaactgatgacaaaataaaacaaataaaaataaccttatcctctcaggattcccaacctgccacctggagagcaaggtccggtcctggtagcaaaagggcggagcaccttgcccatctgccattttgatctgaaagactcggactacataagtggccatcagcgcaacccagagctccgagggtccagtgggggagctctggatccaaacacccgggtgattgagttcaccactgtgggcataggaggkaagaatctccggtgagttgcttaggtttacattgattgaattcacatcggtcctaaagaactctaaaagaattcagatagatgagctagacctattcctataagcaggctcgatatcctggggtttgacctgagttttagaggtttgactttagagaactgttacgttaagaaagctgaattctgtctccttagttttgccactgaggaaaatatggaagacacaaaagtataatccctgaccacctccttaaccacagaggatcattggcacagttgtgcccttggcagcattgttattccaaagtccagaaccctaccctgactgtggatcgctagaggagatggagttttcatttccacagtaacaaagtgctctgaacagttctgcttcccagatgggggactgggttggggccaggttctaagaaatttctcttaatcctcaatcccctgtcccactctcttctgtcaattctccccaccctggccaggacctttaccatcctaaacccaaccaatagcacctactccttctgctggatctctgaagaaattgaaagtctccagaaccctgcagcattcacatgccttacagaaaagggcttcatccaccctgaaaagaaagccgaggtatgtgcagatgagaaccactcaacccaaggcttagatcactctagccattgctgtgtagaaagtgtgccatagacagtaagtggaattaggaagaactgcctgagggtgtagtgcatcaatcaacaagtattta

SEQ ID NO: 40226 - DNA, 1129 bp, Homo sapiens
tgcactcaaggcactgagtgatgctattgaccaagacagacccagcctctactcccatagagctcacattctggtggatataatattcatttccaaccaactaagaaagcaacaactgatgacaaaataaaacaaataaaaataaccttatcctctcaggattcccaacctgccacctggagagcaaggtccggtcctggtagcaaaagggcggagcaccttgcccatctgccattttgatctgaaagactcggactacataagtggccatcagcgcaacccagagctccgagggtccagtgggggagctctggatccaaacacccgggtgattgagttcaccactgtgggcataggagggaagaatctccggtgagttgcttaggtttacattgattgaattcacatcggtcctaaagaactctaaaagaattcagatagatgagctagacctattcctataagcaggctcgatatcctggggtttgacctgagttttagaggtttgactttagagaactgttacgttaagaaagctgaattctgtctccttagttttgccactgaggaaaatatggaagacacaaaagtataatccctgaccacctccttaaccacagaggatcattggcacagttgtgcccttggcagcattgttattccaaagtccagaaccctaccctgactgtggatcgctagaggagatggagttttcatttccacagtaacaaagtgctctgaacagttctgcttcccagatgggggactgggttggggccaggttctaagaaatttctcttaatcctcaatcccctgtcccactctcttctgtcaattctccccaccctggccaggacctttaccatcctaaacccarccaatagcacctactccttctgctggatctctgaagaaattgaaagtctccagaaccctgcagcattcacatgccttacagaaaagggcttcatccaccctgaaaagaaagccgaggtatgtgcagatgagaaccactcaacccaaggcttagatcactctagccattgctgtgtagaaagtgtgccatagacagtaagtggaattaggaagaactgcctgagggtgtagtgcatcaatcaacaagtattta

SEQ ID NO: 40227 - DNA, 1652 bp, Homo sapiens
ggttaaaccagaactatttattgcagcttccctttttggccacgtagttcttgtcctacagagtggcagggattttccacttcaagtgtctgcttgtatcttgggaggtgggtcatgaggacctctagccttctttttttcctgtggctctctttggaggtctggccaaactgacccaccagtgctccccaggaccagccacaggcagaacactgcaggacatgaagtttgccttttacagccccatacctgtactattttcacctttcccaattcctaggacttcccagacctacccaggggcttctggctatggtgcctggctccttcgctatgacactaaacctaggcctgccttgattttaaaaaatatagcaacattcaccaccacaattaccatttattggcccttcattgtgtgcctaacattatgttgcacattgtattcatatttttctccatcactgtgtgagctcaacagctataagaagtggctatacatgcagcagatacctttggtgccctctctgtctccttgcctactccaggaggtctcatgcaggccagatggcatgacagctgtgtccctttgcctgagagggtgccctcgcctcctgagaagatggtaaattgagggctaagctagaggtgctcagtccaggagtgatcctcaatctttgaggggtaggaatttctgggaaaatttcttgacttcctattccccatggtgggacaattctggggtaggttcccaggtctcccagagggtcttcaaaaagattgacagcagtggcctagtggtaacctcatggcagccactttattggtttgtctcctgtccctcctgtctcacttaccattccctctcattgctctctgggatttctgcccaagcgtgttctcaatccttgtgtcatgatttgtccttgaaggaatctccaccaacatactgcamgattgtcctcccagaacaggagagaaagagagctttgggaggctgacatgcatgaggacgtgtagctggtgagtggccagcaggacatgaatcagcaccatcacttatgtttccatcagaatcagtgtgggcatatttttctagttagttaatcaaattaattaatgtgtagcttttttgaaaatgatttaagcctttagaacatatcctaatacttccttcttctatcaaatctatttgtcctgtgtcacattccattgagactcaggatttaaccagcaatataattagatacaaaatataacaaattaatcaatattgcaatgctatagctgaaagtgatgaaaggtagtatgcctctagcgctattcatactttacactagacttttccaattgcagtgccttaatttaaaggaagaactctgttagtagaatttcaggcatctaagtagtcaaggaaaccccctctccatgctgttcaatggacttttcctgagccccttacacatctttccatttgctaactctacctgctgatactgatgctttatctaatcatcaatgggattcctcttgaaatggaaggcaaagttcaaccctgaatgtgtgctggcctggctccttcgcagtgacaaaaacatgcaactgtctcttctttacctctctggctcatcagggaacatggaggaactgtt

SEQ ID NO: 40228 - DNA, 591 bp, Homo sapiens
aggcgtgagccactgtgcccagcccggttggtggttttttctattgtggtgtggccaccagccactacactgccatgactatcttcagtgtaaagccatgaaaaaggaggaagaggacttactttatgcaactctcttattccgagtttcaacagcccctttaaaaactgcctaatttgtttttagtctctagagctctcagggagttatgtttctatttcattcagtctgtagctgttatgtatgggacaatcagtttgctggttgttcattyccacgcatgagaaccataaacccccatgcagagttctttgcctgcatctcttggctcacctgtgctggttccagtctctgactgatgccatccacgtgagagcccccgaaagttctggcttaggttcgcctaaatccaaacccagctggaaaggagtgcttcgttaaacaccattttggccacagtgctggctttcactctcactggagagtgccatgtgcctgctctgaaccagtccccttggccagggggatgccattctgtgactggtcagttctgaatctgcttgctcctggaggaagaggtattgcacagag

SEQ ID NO: 40229 - DNA, 591 bp, Homo sapiens
aggcgtgagccactgtgcccagcccggttggtggttttttctattgtggtgtggccaccagccactacactgccatgactatcttcagtgtaaagccatgaaaaaggaggaagaggacttactttatgcaactctcttattccgagtttcaacagcccctttaaaaactgcctaatttgtttttagtctctagagctctcagggagttatgtttctatttcattcagtctgtagctgttatgtatgggacaatcagtttgctggttgttcatttccacgcatgagaaccataaacccccatgcagagttctttgcctgcatctcttggctcacctgtgctggttccagtctctgactgatgccmtccacgtgagagcccccgaaagttctggcttaggttcgcctaaatccaaacccagctggaaaggagtgcttcgttaaacaccattttggccacagtgctggctttcactctcactggagagtgccatgtgcctgctctgaaccagtccccttggccagggggatgccattctgtgactggtcagttctgaatctgcttgctcctggaggaagaggtattgcacagag

SEQ ID NO: 40230 - DNA, 591 bp, Homo sapiens
aggcgtgagccactgtgcccagcccggttggtggttttttctattgtggtgtggccaccagccactacactgccatgactatcttcagtgtaaagccatgaaaaaggaggaagaggacttactttatgcaactctcttattccgagtttcaacagcccctttaaaaactgcctaatttgtttttagtctctagagctctcagggagttatgtttctatttcattcagtctgtagctgttatgtatgggacaatcagtttgctggttgttcatttccacgcatgagaaccataaacccccatgcagagttctttgcctgcatctcttggctcacctgtgctggttccagtctctgactgatgccatccacgtgagagcccccgaaagttctggcttagrttcgcctaaatccaaacccagctggaaaggagtgcttcgttaaacaccattttggccacagtgctggctttcactctcactggagagtgccatgtgcctgctctgaaccagtccccttggccagggggatgccattctgtgactggtcagttctgaatctgcttgctcctggaggaagaggtattgcacagag

SEQ ID NO: 40231 - DNA, 546 bp, Homo sapiens
tgtagagacagggtttcaccatgttgaccaggttggtctcgaactcctgggctcaagcgatcctcccgcctcagcctcctaaagtcctaggattacaagagtgagccaccacacccagccacaagtcttatttctaaagagagactttataagaggatttgcagatatcacatgttctcctccaccctagtttgcagacttgaaggctttcctttggaaaaagcaaaragaaacctgagtgccctcagtttaagaacaagagggaatagtcagtcttgaatcccacctacttcccatgagaatgaaaaatccttttaaggccatgccagggctccttacagtcccaaaacactgccacaagttgggaacagataaagtgctgtgggaggttgttctagccaaggctcttggagttacaaggagcagaaaccctctcagattagcccagacaaagcaaggcttactgcagtgaatcagacacctcaggcacaggtcagaacacatcacgtggccgggacttcttgggactggcaccatcacctgaag

SEQ ID NO: 40232 - DNA, 543 bp, Homo sapiens
acttcctcagagaagggagggacacgcttcttcggggcaaagatgacttccagtttacagacttctttgggcttcagtgtgatgttgtggaagggcgccagggtraggacctgaatgaaatagcacccagagtcagcagctgagggtgggaggcccctaaggcctcggttcccggagttcttgctgctgcgattggaacaggggtcagatctcactcctgctctcccatcagctgtgtatgctttggtaaattacttcaactttctgtgacttactctatgttgaagattaagatcatctctataaaatttgtagcacataatagatatttaataagtatcatttccctttcctgaccctttcctaacttattttgtgtacttccttctttcttcctcctccctgatacaggaaatagtaacgggaaataacaaacacttagagctctggcatttctcaaggagtgttccctgcctcagtttccctgtgtggtttttaaaatgcagattccagttgggtgccgtggctcacgcctgtaatccc

SEQ ID NO: 40233 - DNA, 543 bp, Homo sapiens
acttcctcagagaagggagggacacgcttcttcggggcaaagatgacttccagtttacagacttctttgggcttcagtgtgatgttgtggaagggcgccagggtgaggacctgaatgaaatagcacccagagtcagcagctgagggtgggaggcccctaaggcctcrgttcccggagttcttgctgctgcgattggaacaggggtcagatctcactcctgctctcccatcagctgtgtatgctttggtaaattacttcaactttctgtgacttactctatgttgaagattaagatcatctctataaaatttgtagcacataatagatatttaataagtatcatttccctttcctgaccctttcctaacttattttgtgtacttccttctttcttcctcctccctgatacaggaaatagtaacgggaaataacaaacacttagagctctggcatttctcaaggagtgttccctgcctcagtttccctgtgtggtttttaaaatgcagattccagttgggtgccgtggctcacgcctgtaatccc

SEQ ID NO: 40234 - DNA, 543 bp, Homo sapiens
acttcctcagagaagggagggacacgcttcttcggggcaaagatgacttccagtttacagacttctttgggcttcagtgtgatgttgtggaagggcgccagggtgaggacctgaatgaaatagcacccagagtcagcagctgagggtgggaggcccctaaggcctcggttcccggagttcttgctgctgcgattggaacaggggtcagatctcactcctgctctcccatcagctgtgtatgctttggtaaattacttcaactttctgtgacttactctatgttgaagattaagatcatctctataaaatttgtagcacataatagatatttaataagtatcatttccctttcctgaccctttcctaacttattttgtgtacttccttctttcttcctcctccctgatacaggaaatagtaaygggaaataacaaacacttagagctctggcatttctcaaggagtgttccctgcctcagtttccctgtgtggtttttaaaatgcagattccagttgggtgccgtggctcacgcctgtaatccc

SEQ ID NO: 40235 - DNA, 543 bp, Homo sapiens
acttcctcagagaagggagggacacgcttcttcggggcaaagatgacttccagtttacagacttctttgggcttcagtgtgatgttgtggaagggcgccagggtgaggacctgaatgaaatagcacccagagtcagcagctgagggtgggaggcccctaaggcctcggttcccggagttcttgctgctgcgattggaacaggggtcagatctcactcctgctctcccatcagctgtgtatgctttggtaaattacttcaactttctgtgacttactctatgttgaagattaagatcatctctataaaatttgtagcacataatagatatttaataagtatcatttccctttcctgaccctttcctaacttattttgtgtacttccttctttcttcctcctccctgatacaggaaatagtaacgggaaataacaaacasttagagctctggcatttctcaaggagtgttccctgcctcagtttccctgtgtggtttttaaaatgcagattccagttgggtgccgtggctcacgcctgtaatccc

SEQ ID NO: 40236 - DNA, 543 bp, Homo sapiens
acttcctcagagaagggagggacacgcttcttcggggcaaagatgacttccagtttacagacttctttgggcttcagtgtgatgttgtggaagggcgccagggtgaggacctgaatgaaatagcacccagagtcagcagctgagggtgggaggcccctaaggcctcggttcccggagttcttgctgctgcgattggaacaggggtcagatctcactcctgctctcccatcagctgtgtatgctttggtaaattacttcaactttctgtgacttactctatgttgaagattaagatcatctctataaaatttgtagcacataatagatatttaataagtatcatttccctttcctgaccctttcctaacttattttgtgtacttccttctttcttcctcctccctgatacaggaaatagtaacgggaaataacaaacacttagagctctggcatttctcaaggagtgttccctgcctcagtttccctgtgtggtttttaaaatgcagattccrgttgggtgccgtggctcacgcctgtaatccc

SEQ ID NO: 40237 - DNA, 644 bp, Homo sapiens
ttgagtaggcagatgtccacccaatatgaagaagtgagggcacagaaagagaaggaaccacccttgcctcaccagagtagacatataatgtttatttttccctttaactaatgaactcttcttcttactctttcttgtcccacagattttagtcctagatccagccaacaggattgtgaagttgggagctgtcctaccagggcaggttgtgaaaagaacagtttccatcatgaacaacagcctggcccagctcacatttaatcagtccattctgttcacaattccagaactccaggaacccaaggttggtgctcagaggggctcctagcggccccttcatgctccctgatgatgaggatggccatgctggcaacactagcagctcacatttcttgtgcatctgtaatgtgccagaccattctaagagccttccctgtgctccctctgttcattttcacaaamacagtatagggctttacagggtgcactagtcccatactgtttttgtgaaaacgaacaatattttcattttgcattttcatttcattttccatgtcattcattgtcatttgtttatttacatctccgttgtgtagacagcccagttctctattttcgttcatttcaggtgtttctccttaagc

SEQ ID NO: 40238 - DNA, 584 bp, Homo sapiens
ctccgcctcctgggttcacgctattctcctgactcagccttccgagtagctgggactacaagcgcccgccaccacgcccagctaattttttgtatttttagtagagacagtgtttcaccgtgttagccaggatggtctcaatctcctgacctcgtgatctgcccgtctcgggctcccaaagtgctgggattacaggtgtgagccactgcgcctgacctaaatttcaaagttctatgtgaagccctattttacatgctggtagctagttcawtttttttttttttaacaattcccaaaccaaacaaaacatatttgtagactctccacctggttttgacctgtgcataatgtcagtacccaggccatctagttaaatgtgacaaggtccaggagctgggtccaccataaagacaatcctacctggatcatggcccccgcttcagcccagaaatgtttcaaatgtgagctcggttccaagaggcaagttccaaaatccatcatccaaagtcatgctggtctttaagtgacagtcatatcattgaggtgacacacctccagagcacctgcccacattgtcctggcag

SEQ ID NO: 40239 - DNA, 584 bp, Homo sapiens
ctccgcctcctgggttcacgctattctcctgactcagccttccgagtagctgggactacaagcgcccgccaccacgcccagctaattttttgtatttttagtagagacagtgtttcaccgtgttagccaggatggtctcaatctcctgacctcgtgatctgcccgtctcgggctcccaaagtgctgggattacaggtgtgagccactgcgcctgacctaaatttcaaagttctatgtgaagccctattttacatgctggtagctagttcaatttttttttttttaacaattcccaaaccaaacaaaacatatttgtagactctccacctggttttgacctgtgcataatgtcagtacccaggccatctagttaaatgtgacaaggtccaggagctgggtccaccataaagacaatcctacctggatcatggcccccrcttcagcccagaaatgtttcaaatgtgagctcggttccaagaggcaagttccaaaatccatcatccaaagtcatgctggtctttaagtgacagtcatatcattgaggtgacacacctccagagcacctgcccacattgtcctggcag

SEQ ID NO: 40240 - DNA, 676 bp, Homo sapiens
aaaatgatggtaatcctcaccaaccccacacaagagcagctcacattcattggacatttgctatgaccctggcaccatggggctcattatgtgaactatggctcacagcaatcagatgcggagggttctcttactaacacagcccccaggccccatagtgcacaagtggggaagccggaattcaaacccaagccctctgaccccacagccatgctcagaacccctgtgcactgcctggctccctgctggaacacttgtaccctaaagcacagccactcctgtggctctgactctgatccactggcctcttagctccttgaagcaagggttgggtttctcatctttagaatcctacaacactgtagtggattccctaggagagcccgagagtgtgsttcttgaggtgatttattgagggagggctctcaggagaactataagaaattaagggaagcaagatagggccagaagaaaactaggggaagatgtgatttcagaagtctcacctctgcctgatcccgtggggagctttggagtgtaaattacatcacagtttgtcccactcagagacaaggaggctgggctctcatagctgccacccctatcagtcactccttcctataagtcataccctaatgagagggaaggcagctcagggtgagtgagacatctccca

SEQ ID NO: 40241 - DNA, 676 bp, Homo sapiens
aaaatgatggtaatcctcaccaaccccacacaagagcagctcacattcattggacatttgctatgaccctggcaccatggggctcattatgtgaactatggctcacagcaatcagatgcggagggttctcttactaacacagcccccaggccccatagtgcacaagtggggaagccggaattcaaacccaagccctctgaccccacagccatgctcagaacccctgtgcactgcctggctccctgctggaacacttgtaccctaaagcacagccactcctgtggctctgactctgatccactggcctcttagctccttgaagcaagggttgggtttctcatctttagaatcctacaacactgtagtggattccctaggagagcccgagagtgtgcttcttgaggtgayttattgagggagggctctcaggagaactataagaaattaagggaagcaagatagggccagaagaaaactaggggaagatgtgatttcagaagtctcacctctgcctgatcccgtggggagctttggagtgtaaattacatcacagtttgtcccactcagagacaaggaggctgggctctcatagctgccacccctatcagtcactccttcctataagtcataccctaatgagagggaaggcagctcagggtgagtgagacatctccca

SEQ ID NO: 40242 - DNA, 863 bp, Homo sapiens
caaagcttctaagtgaaataaaacccttgggtagaacaagctaatcatacaattctaaaagattgtaaaatgtagagcacataataattattcaagctgttttttcatgagccaaattccaaggcccagcctgggattctgagccagcagctcagagcgggaccctagaatctgcctattttacaagtacctctggagacctgatgcagaaggttctggaaacctcacttatagaaactgtgcccaagagtgtgtggatggtagaggaagasaaagcaagacaatctttgctctggggcagactgtttgagagggagtggaatgttttcagaggtcagttctctggccggctctcacgttctctggtctgagtctcagggaaagtggaaatgaaagatggctttcacattctgtatttggagaaaattttgccctgcagcttaacatttgggataattgtgacagagtgtggcataaagtcatttgaagggtgaggagggagtgtttctccccttatcagtgggctggtttctgtgtcttaggatactggcacagtgtgacatcagcaccagcagcaggagggccactgaaaagtgactttgctgaggcgtgttctctttttctgattgccagagcagaaagagtagaaagagtccaacactatgttgaggattgaaagtatttaatggtttccagaagtgttgtgaagatttccttgacagggaagggaggagcatgagtttgggggcccacaactggatgagttagagttggacaaacgttatgcacaccttagcctattgagcattgtgttttctaagactatatatatcacttccacaatggcatgcttttagactaac

SEQ ID NO: 40243 - DNA, 863 bp, Homo sapiens
caaagcttctaagtgaaataaaacccttgggtagaacaagctaatcatacaattctaaaagattgtaaaatgtagagcacataataattattcaagctgttttttcatgagccaaattccaaggcccagcctgggattctgagccagcagctcagagcgggaccctagaatctgcctattttacaagtacctctggagacctgatgcagaaggttctggaaacctcacttatagaaactgtgcccaagagtgtgtggatggtagaggaagagaaagcaagacaatctttgctctggggcagactgtttgagagggagtggaatgttttcagaggtcagttctctggccggctctcacgttctctggtctgagtctcagggaaagtggaaatgaaagatggctttcacattctgtatttggagaaaattttgccctgcagcttaacatttgggataattgtgacagagtgtggcataaagtcatttgaagggtgaggagggagtgtttctccccttatcagtgggctggtttctgtgtcttaggatactggcacagtgtgacatcagcaccagcagcaggagggccactgaaaagtgactttgctgaggcgtgttctctttttctgattgccagagcagaaagagtagaaagagtccaacactatgttgaggattgaaagtatttaatgrtttccagaagtgttgtgaagatttccttgacagggaagggaggagcatgagtttgggggcccacaactggatgagttagagttggacaaacgttatgcacaccttagcctattgagcattgtgttttctaagactatatatatcacttccacaatggcatgcttttagactaac

SEQ ID NO: 40244 - DNA, 1186 bp, Homo sapiens
aggcctggctcaatttagtctcattatatgctctccctgaactggagtatcagctttacatgcaatacatccaggtggttcttctcagactaaaggaatctacccaaaggagaatgatcagctagctcatctttgaggcaccagaaagtacagcttattttaaaagactttccagcctataagaggatttaaatttgatttattctgagtattctgttacacatatgtgcacttatgtttctgagtactctgttgtacatctgtgcacttacggccctgatgggacaagaccagtacaactctaattaaatcaaagagtagcctctgaaggaaaaactcaccctgcgggaaaggagaatcaggcaaataaacttgacccaactaaacttcaggtatctgaggttcactcacttcttagcgctacatggtgtctatctcttaggtctgacatcacacacaaacagctaggtgctagggagcagaggtgttttgagaaaacctagaaggactcccttcactctgtaaagcagtggagcttagaaaatgctctggtgatgcctatgtgccagccagtgacacaaaagtggctgttggaggtggtgattactccatttctgtgaggaagatagcacagctttggtacctggatgacttaagcacattcaggcccaaacacacaggctgsagtatccagaggaaatgtgggggcagaagtaatgtgtctggcagggaagtggcactggtgtatcttggagtggtttcagcatctgcataggtatggatgtcccaaagagatgctgatgtcaactgacagaggccttacatttagaaaaggaagcttatggtgctcgcttcggcagcacatatactggaaaaggaagcttatggagggaccggaaggaggctatttcatccagctttgtttgacatgacctttgcttaagggcaccagggcaggaaagtagaaagtgacatatgctatagtgtgtcatataggatctatgtctaagcccttgtgagacactctgggggactcctaggaaaacctaaagggagaccctcaatgggagtgaggttaaattctaactcacactatccaaaggctcccattacttttaccatggatttccttggactcagaacacacacgatcccttaaaataatacacataagaaagctgaacct

SEQ ID NO: 40245 - DNA, 541 bp, Homo sapiens
tgaatacaaattcttattttaatatattaacatttattaattttttatagttagtttttttcctgattaataactctttccttactttgtagtcatgaagatattctacctacagtattgtttaataattagaagtcagtatcaacaataaagctatataaaggaaaaaacattcaatttagttattcaaatgcaattaagcaagtgacttactaagcagtgaacatgaacagacgaatctttagctccataatcaatcatttcaagcagtcatgtcagttttttagggtgaagtaacagtcttgttttttttgttwtttttttgagacaggatttcactctgttgcccgggctggaatgcagtggtgagattttggctcactgcaacctctgcctcccgagatcaaggcattctcatgtctcagcctcctgagtagctgggactataggtgcgtgccaccacgctgggctaatttttgtattttttgatagagatggggtttcaccatgctggccaggttagtcttgaacttctgacctc

SEQ ID NO: 40246 - DNA, 541 bp, Homo sapiens
tgaatacaaattcttattttaatatattaacatttattaattttttatagttagtttttttcctgattaataactctttccttactttgtagtcatgaagatattctacctacagtattgtttaataattagaagtcagtatcaacaataaagctatataaaggaaaaaacattcaatttagttattcaaatgcaattaagcaagtgacttactaagcagtgaacatgaacagacgaatctttagctccataatcaatcatttcaagcagtcatgtcagttttttagggtgaagtaacagtcttgttttttttgttatttttttgagacaggatttcactctgttgcccgggctggaatgcagtggtgagattttggctcactgcaacctctgcctcccgagatcaaggcattctcatgtctcagcctcctgagtagctgggactataggtgcrtgccaccacgctgggctaatttttgtattttttgatagagatggggtttcaccatgctggccaggttagtcttgaacttctgacctc

SEQ ID NO: 40247 - DNA, 1070 bp, Homo sapiens
tgcattctcatgcagtatttgcttcggtttttcctcttctttttttccaaaacagttttcgaccattttcatgccccatgcaagagatgttgcaccataaaatatgggaacaatagaagatataatcattatttatgggcatattgatttcccaatctactgaaattccaggaaggcaggaaaccatatttgcttgtctcactacccattttactgtgctcacagtgggaagataacaaaaggtttttgaaagtaacctcaaatcaacaagacataataagaattaaatgtttttgtgaatagtgttatgcagagaaggaatcagataaattgctttctccttcccataccctcttatttcctttcttctttccttcccctttagcatcaaaatagaaattggccactgtgccttcctgtaaatctttaaactttatagacaaatccattcatgtattcattgagagcttagggttcaggctgccactctaatttcactctcatctgtcagacagggtgtttgaaatgtccattttaatgaatcccctgcctcatgtccatgaagaaacttgtagttaatcctacttaagagtgatatctagtagggttttattcaaaagatctatacatttgtcaaattaaagactttacctcaaatcattttcacttcttagatgttagctcacgaaccataggcaagtcgaatttcaatatagaagaaagtagataatggaaaatctatttgtccagcaattctaatgctgctaaacttcaaaccctaagtggcatggtgcttaaaactgaacttttaattctgtttttttttttwaaaaaaaaggtgaattttagaaattataaagtttgggggggaatggatcaactatttgtcaagctaaattatacattcagcagttttatactgaaaatttagcaattggcaatggaaatggatatcattgtataaaaaccaatgcagagcttccacatacaaatgtttattacatgattgtaaccatatttctgcatctgactaaccacactaacacacaccatgtacctactagtgcata

SEQ ID NO: 40248 - DNA, 645 bp, Homo sapiens
caacatagagttaaatctatacaaactataaatcaatataacaagctgataaacagaatatgtcccccttctgtgaaaaatatgcctccatactgaaaaaatctcaacatacatgtaaagctatgcttgttgcaggaatgtggttagggacaaagtaaaaataactaaactgtattattgtacatttctgagtattctttttagagtctgatgatgttaaaatgaaaagtaagtcacaaaaatgtatttgtgattatatattctgtaatatcaattttagaaaaattactaattatgtcatgttgaagatgtgtatataattaatgttctagagataataaygatataaaagattgaaagtattcaaagtatacaaaactggaatatattttcattgaagatgtaaattaaatgtaaaaaagttattgttcatattttcaaaatcttttctttcaaaatattcaaaattgcctataaaattaaaaggcaaaagacaaatcattataaatcaaaatattaaataaaatatttcaaagtaaagtttaaatttttataatgtttaagaattaaatcttttgatataaataaagccattttatcattcaacataaaattatgtagttttatgtatatatatatttatgc

SEQ ID NO: 40249 - DNA, 591 bp, Homo sapiens
tgtcaattctttattttttaaaaacattattgatgatctgctatgtgatctattttctaattcattcatatyattttcaaatttatataatcaataaaaatcaaaaagcttattattttgttacatacttctgtatgcctgctgatttttaatctgctttatctatttctgatataaatgttaagattttagcaaaatccataatatatgtggatttttcaatttcctttgaatcaggtttgtttctgttttatgcatttcaaggctatattgctaagtaaatacatagttttattattgtattctactccctttagattcttcattttattagaatgaaataattgtctcagcaaatgtttttgccttaaattctaccttgtctggtattaatgtgctttagcagctttttgtgattagtatttgagtgttatggatccttaattttaactttctaatgtcatttttaaaagttacatttctgaaaccaatacataggaagattgctttcagtataatctcttatcaggagaatttagtctttttaataacattttgtgataaattcaatgtctaccatctcattttttg

SEQ ID NO: 40250 - DNA, 1328 bp, Homo sapiens
tttcctctctatgttggctttaaatctccctacatgctatgactccagatacctctctctgtctgccatctccttctagttccagacttcattctccaacttgatatatgagatacaaaagtggacaccagtcaggcctcgcagactatcggtcacccagacagaactcatttccccccgcccyttgaacctcagatcagttccatgcactgtttccccattttagtagatggcccaagaccagccagtcagttcagctctcaactcaggaatctccctgcgcttcccttgtccccaagtcttgttattagcaagacctcccactgtatctgacttccagataatatctgaaacgtgctcacttcaccaccatgcctagcataaacctcctcatgaatctcttgacttaaactctactatttttctattgtggaggactcaacaatctatgttaagttttttaagtgttttaaaaatattataaaaatttacttctaaagtacttttctttttcctaaaaacattgtatgacacatcttaattccaaaaaggatgggaatttctagattgtaagaatggtctcccttgcagttgaaagaccctcctagtaccattgtctgattcaccctctcctgaagaaggcccagagccactggggactggcaagccaggttctgtgtccacctcactgtgcatagtgatgaccaactttctcaacattcagagaggttagaaaaccattttattttgaaacatttatacagtatttaaagtacttaatctgtacaacagttttagtgggaaaagttgactcattttggattaaagccagcaaaaactcactgcagctcttttatctctcataaattctacatagaaagtgacttttagtagatttgtgaccaactaaggtattataatggtggatataatggagggctgttttatttcctttagtgatggcctgttcttttttcctttctgtttctgtttttccatatcttgattccaagaagttctagctttacctgtccaagtcattcattagtttactcaagtcagtagtaagttgaaaataataattctcttctatcagagttgtagaacctgagataatatgtttttggaagggctgtgaaaatggtatataagtgatgaaatagtaaagtactctataccctttgtacttaaagtaatatacttaagtatattactttccagtccttacaataccacttagtacctggaaattcagttactgttctgactcatgaggttagaaacagtgtttgttgatttttgttcctcagtttagatttgaaaacaca

SEQ ID NO: 40251 - DNA, 1328 bp, Homo sapiens
tttcctctctatgttggctttaaatctccctacatgctatgactccagatacctctctctgtctgccatctccttctagttccagacttcattctccaacttgatatatgagatacaaaagtggacaccagtcaggcctcgcagactatcggtcacccagacagaactcatttccccccgccccttgaacctcagatcagttccatgcactgtttccccattttagtagatggcccaagaccagccagtcagttcagctctcaactcaggaatctccctgcgcttcccttgtccccaagtcttgttattagcaagacctcccactgtatctgacttccagataatatctgaaacgtgctcacttcaccaccatgcctagcataaacctcctcatgaatctcttgacttaaactctactatttttctattgtggaggactcaacaatctatgttaagttttttaagtgttttaaaaatattataaaaatttacttctaaagtacttttctttttcctaaaaacattgtatgacacatcttaattccaaaaaggatgggaatttctagattgtaagaatggtctcccttgcagttgaaagaccctcctagtaccattgtctgattcaccctctcctgaagaaggcccagagccactggggactggcaagccaggttctgtgtccacctcactgtgcatagtgatgaccaactttctcaacattcagagaggttagaaaaccattttattttgaaacatttatacagtatttaaagtacttaatctgtacaacagttttartgggaaaagttgactcattttggattaaagccagcaaaaactcactgcagctcttttatctctcataaattctacatagaaagtgacttttagtagatttgtgaccaactaaggtattataatggtggatataatggagggctgttttatttcctttagtgatggcctgttcttttttcctttctgtttctgtttttccatatcttgattccaagaagttctagctttacctgtccaagtcattcattagtttactcaagtcagtagtaagttgaaaataataattctcttctatcagagttgtagaacctgagataatatgtttttggaagggctgtgaaaatggtatataagtgatgaaatagtaaagtactctataccctttgtacttaaagtaatatacttaagtatattactttccagtccttacaataccacttagtacctggaaattcagttactgttctgactcatgaggttagaaacagtgtttgttgatttttgttcctcagtttagatttgaaaacaca

SEQ ID NO: 40252 - DNA, 596 bp, Homo sapiens
gtcaggaattcttcctaatttacagagactctggaaaatggcaggggagtacagatcaccctggcagaccattcccgggggaggcaggtggtggccaaagagataattgctaaactatttatcagagaaggaacttggagccgctggaatggaaagtgtgtgtgtcattagacccatggcatttaattacctcyccggccatttaagaagctcaaaaacaagagtccttggtaaaatacattgcccagattctactgcaatgaacactaggaaatgtagggtttaagatttaattaagagaagacactggctgggcgcggtggctcacacctgtaatcccaacattttgtgaggccgaggcgggcagatcacgaggtcaggagttcaagaccaggcaggccaatatacggaaaccaaccccctctctactaaaaatacaaaaatagccaaatgtggtggcgtgcgcctgtaatcccagctacttgggaggctgaggcaggagaatcgcatgaacctgggagacagcggttgcagtgagctgagatcgggccattgcactccagcctgggtgacagtgtgagactctgcctcaatta

SEQ ID NO: 40253 - DNA, 1363 bp, Homo sapiens
cattctttatttttctccaatactaattgcctcctgaaatgttacctcacccttctttcccaggtccaaggactctacttcttcttcacatggaacttgcaaatcttctttaactgatttaatttattctttgttatactctcttcaaactgtttcataaaattatttaaaaaattttaattgacatcaagatatacatattctactgaggccagtggcatctgttaacagcaaaatccatgttactaaccttgcacagcatccaggacaaagagcttggcacttatcaaacactttttgacgtgattgatgattctaagacytcctagaagatttaagaaagactcagcacttggagcttccacaaattctgacatgtaaggggattcacaggctccaaaccaattctgaaactccatgataccaattcaatttcttacaatgtgaatattctcaagtttccttcttttttctttatagtgaaagttttaggaagtgtatatgaattaataaaaatcctgggctctatgaagccaatctagctttgaacatgcttttattgatctttcaggtaaatctactgtgaatgttatgagccaagcccagatcaccaacttcaaacagaattggaggtacctgtagagagttacgctggcagacaggcttttactaaagccagcagagcagaggtgaagataaaaaaaaaagttgcttaattaacattttagatgtgttgtaggttgaatgatttaaggcagcttattaaactttccctgttgcatcctgggggtatcatttttctttcttttctattttacagatgtaatcaatttgtttctaatatcagaacacattagcataaggaagatttctaatatgctggagttctttttatattcattcttatgagtcaattgtcttgcttgaagattccaaacaatgttactacagcccatacaatgaaaaaacattttctagattcttgcttcttagacacagaaagcatccccaacacaaaaggagatatttccattccctattttgcatatggatgaagggaacaataacatgattacccattcttaccatttcaaaaattcatactctaatatccatatggaggggctgtgatcattcctgtatattttcatgtgtccaaacaggttcaactcatatgtggtgggactctagagatataaaccattagcatctatgtcacatggccttgcttcttggcctagacctaattttgaatctgcactctctaaataagccataaagttacttataaggttccatatagagaaaattttgccaattatgctggctcaaaatagactcatgaaaatctcaacccagggat

SEQ ID NO: 40254 - DNA, 518 bp, Homo sapiens
taattttactcaaaattctttcattgatgaattcgagagtagaaattgaccagggggtggtgatgatactactttttatgtataaagctcagaacaaaagttacatgcaggcttttattaagtatttgtaataaacatttaggcagaggtctttaacttacggttcagaatggtctttgtagggggcagtccatgaacatatacaaactgggtataaatcttgttatctgtgtttttttgtgctataattctgtagattgtatcaacttaaaggaattttggccccagtaaaaatttagagttactgatttagagaaatgaatataggaaaggcatttttcttgttaggaagttttttgcatgasttagcataagaatattctaactttaatgtttcttctttataggtattgtactgatgatatgctgcaaagagaaatgatgtccaatccttttttgggtagctatggggtcatcatcttagatgatattcatgaaagaagcattgcaactgatgt

SEQ ID NO: 40255 - DNA, 1105 bp, Homo sapiens
tcttgatgcatttgtagtgacgtaggcacacattttactgggcatgatgtccaagattgggcacttgaaagggatatagaccagagatttcatttgccatataatccccaagtggcaaggtttatttaaacaaaaaatggcaatttgaagacacacagtgaatatttttgcaatccagaacattgcatgggtgggaggttttgcttcaggcaaaacttaatttggccttaattagaaaccttaattagggccgggtaaggtggcttacacctgtaatcccagcactttgggaggccaaggcaggcggataacttgaggtcaggagtttgagaccagcctggccaacatagtgaaatcccatctctattaaaaaatagaaaaattacctgggcgtggtagtgtgcgcctgtaatcccagctactcaggaggctgaggcaggagaactgcttgaaattgggaggtggaggttgcagtgaatcgagatcatgccactgcactccagcctgggcggtagagggaggcgacatcttaaaaaaaataaaagaaaccttaatttgggccggggtggtggttcatatctgtaatcccaatgctttgggaggccaaggtgggaaaattgtttgaggccaggaattggagaccagcctgccgggcaacatagtgcaatgctgtctcttccaaaaaaaaaaaaaaaagagagagagagtgagcaagatgggcatggtggtggcatgcaactggagacccagctacttgtgaggctgaggcaggagcatcacttgaacccaggaggtctaggctgcagttagctatgatggcaccactgcactccagcttgggccacagaacaagaccctgtttccaaaaaaaagaaacaaatcttaatttggttgaamtacattctgtgctggtaccataccatggactcagtaccaccactggggagggtctattgatcacacttataaagaaagtctgggcggggcatggtggctcatccctgtaatcccagcactttgggaggccaagccaggcagatccccatgtcaagagatcaagaccatcctggccaacatggtgaaaccctgtctgtactataaatag

SEQ ID NO: 40256 - DNA, 562 bp, Homo sapiens
tccacgactttagattgctttcctttttttttttttgagacacggtctcactctgtcgcccaggctgtagtgtgatctaagctcactacagcctccacctcctgagctcaagctatcctcctgcctcagcctcccgagaagctggtactataggcacatgccaccatgcgcagctaatatttttgtatttttttggagaaacggggtttcaccatgttgcctgggctggtctccaatgccagggctcaagcaatctgcctgccacggcctcctaaagtggtggggttacaggcatgtgccagtccccatggccaattttgttttctttggctttcacacatactaaaaattacttgtgaaagtgtagcttagccaaagcacctactctctaatgtctgcgaatagctctacagtccyccgttccttttttgtaacaatctctcactgttcaataaatagggtagtgcatatgtttcaaaatgcactaccctatttatagtattttcaaaattacaaacacatagaaggaaaaccctaaccgaaagcaaattcctagatgact

SEQ ID NO: 40257 - DNA, 1249 bp, Homo sapiens
aactctcactaatggacttattagaactgtacttttatgtatgaccttcttatacagcagaattgaatctatgccaatacaaaattacattgtgtgttatatattagccacagggaatttttgccttcggtgtgatccattatggttataatttattgccctctaagttctagccatgccactaacagttgcatagggagctaaagttgagagtgataactgttccaggtgacctggttagatctaatttatgggtacttagcaggactaagtgaggcctcagtacacagtgcatttgatcctctatttgataagattttgaccttttggtcccagtggtaccactccaagtagaattagaagttgagatagaatgtttttataggtctctcttgcaataattggaagataaataactttaaaagtgcataattcacctcattgtcttccaagaggtgtgccaaggacaaacagtacacatatttattttgtttttaatttacaattaaaatatgctggacatgccttaaaargtctattacacacttgaaagctggtagtaaaaatggaggtcatctaattcaaattctttccaggaaacttctaagagctagtctttttcaatggtcttttatcctcaaactggcatatttcagtgatgggtcttgttttatagaatagtctgttctattccatgtcactttttcctcctgatttttctttattttatacaaagacaaatgtgaaaaaaagaaattgaagcatcacaaatattttagctcataatggcagaggaaaagtatttggaagtgcgaaggcataaatttatttctaacataaactatactcttctactgataagaatctctgctctatttgttattttttaaaaacttttatgggtatatagtaggtgcatatgagttacatgagatactttgatagaggcacataattatttggtgcaaatttggattaagagaagccctctacttatggtgaaaacatgctttgaaatatttttcaactatttttcttatttctgctctctgaaactacagtaagtcaactaatggatgtttccatgacaaccatttagatatttgacaaatcatatgttgttaaatttaaaatcctcccattttatacattctcaaaagtgttcaaatttctcttctatgcacctgtaaaatggtacctgttataatctacctatatattattatctgatattattaattaatgtaca

SEQ ID NO: 40258 - DNA, 612 bp, Homo sapiens
catttatttttcttatttcaaaaatataactagaaatataattagaattgacatgacatacagttattccataaaagaaggtggtaaaaacaaaaatacagttgtcccttrgcataggcagattattagttctaggattcatgtatataccaaaatctgcacatactcaggtccttaattgaccctgtaaaacccacacaggtttcacatccatgaatattgtatttccatctatgcttagttgaaaaactgcatgtacaagtggaccctcacagttaaaattcgtgttgtccaagggtcaactgtaaagtttaataaaatatttcctcaaaaagaaatgcttcatggtgaaaataggtgtattttacttttagaataatattttaggaatcatgattggatgaaagcagaaactgctggatataattagaaagctcattgtcatcatcgttcctaccattcaatgagtgttatctattcattgcatgcacccagcaccataggtctcatgttacattctctgtatcctttaacctttaataactaccctaaaagtattatagttttttttaattgagaaaactaagtccattagaaattaattaattttcc

SEQ ID NO: 40259 - DNA, 612 bp, Homo sapiens
catttatttttcttatttcaaaaatataactagaaatataattagaattgacatgacatacagttattccataaaagaaggtggtaaaaacaaaaatacagttgtcccttagcataggcagattattagttctaggattcatgtatataccaaaatctgcacatactcaggtccttaattgaccctgtaaaacccacasaggtttcacatccatgaatattgtatttccatctatgcttagttgaaaaactgcatgtacaagtggaccctcacagttaaaattcgtgttgtccaagggtcaactgtaaagtttaataaaatatttcctcaaaaagaaatgcttcatggtgaaaataggtgtattttacttttagaataatattttaggaatcatgattggatgaaagcagaaactgctggatataattagaaagctcattgtcatcatcgttcctaccattcaatgagtgttatctattcattgcatgcacccagcaccataggtctcatgttacattctctgtatcctttaacctttaataactaccctaaaagtattatagttttttttaattgagaaaactaagtccattagaaattaattaattttcc

SEQ ID NO: 40260 - DNA, 909 bp, Homo sapiens
cgcagcaatgatctctttgccaaataataatgtaccatggcttagagcaatcattttcaaccgatccattttattaaacttatagatatagaagagatgtggctatgcaagtaaaatgtagcctccaaaaaaacactagaataaatggcaactatcgagagaacacatcgccttaggacagcactcaagaatatacagagaatccataaatacgaatctggcttgaaaaatataacgaaaaaagtatctgttgcattttcttaaggcatgaaattggcctaaatgttataccrttgcataattacaagaaaagtggaaggctctttaaaatattttctcagtaatttaataataactataattatctataatatttctttatcatactactactaccagtctttatccgcctaagaaatgctggaaagaaccatgaatcttttgtaacaagccagaataatgtttaaacacaaatgttgtctcacatacacatacttttgtaaatggcacattttttgcactttttcacatactaggacataattacatgaatattgagtggaatgagtatttttatttttgactgaaatggcaaatacacaacctacatacaatacactccaaagtatagatcagatattgatggcattttattgcctataaatatgttcaagaatgtatatatattcaaggccccagtacatactaatttacaaatacttcacacaactcaccatgaaaagatatttgatctgtatttcaatatataattgagaaattgaaagggaatttattttctcatcaagaaaacttatgtacaataggcaggtcaactaacattaacattaataccttgactcaatagtgtttaagagtagcaactgcaaatcttctgattgtgtgtatgca

SEQ ID NO: 40261 - DNA, 643 bp, Homo sapiens
cagtggtggtatgaagtcaagtacctttctagctaatggtagtcagcttacacagttgttcaatggggcaacacaatcatatctccaaytgttacagagattgaaatgattatcatctgaactactgcacttgtggcaaagttttctttctcaagaaggtttttggtaaaatacagatctatcaacaggagataccattacatttttagcacttaccatatcatttgcagagggatagactcagaatatgatagttgccatgaaaaatagtgaacagtaaaaactgaactaaatggaatatagaacacaagtattggaatgggaggcaaacgttaagaggaagagatatgggaaaatatatcaactcattattcaagcttatttaagcttcatttacatcacaaaaagtttccattcacaaccttttcaaataaaactgaaaggtttccatgatattttaaaaatataatctgtattttatcttaacaagaacttggaacaatattctatccaccattcctgatccaaacaagtgcccaatcttcatctatcttgcctcatattttcagtataaagagcccattcactttttagggaaaaaagacacaaataacacaatggcacaattgttaagtttctcatt

SEQ ID NO: 40262 - DNA, 540 bp, Homo sapiens
ataatatttttatcacactgtaaaatttcctaatatccctgtacagactatcttgtcagatgcagctgcttttgacttcaatcaaaattgcttagtttttgcctgttcttggacttcaatagagtgtgtaccctttcctatctggcttcttttgctcaacttaatgtttttttttgtttgtccttgrtccatctattttattctgtttcactaatgtttttcagattccctttaacataatatggttttcatacctgtgttaaaaatcttgatttcattaaaaatcttgattccattttttatcacaaagactagatgattaatattaagggttactttctctgaataaataatagacaaattcatgtagataagtgtatttaaaataaaaaaagaattattactgttacagagaatgataagtaactctatctttactaaaaactgaggagcaattaagcttaagttgaatatacatatgagcttatttatttatttatctatttatttatttttgagatgacgagtttcgctcttgtt

SEQ ID NO: 40263 - DNA, 540 bp, Homo sapiens
ataatatttttatcacactgtaaaatttcctaatatccctgtacagactatcttgtcagatgcagctgcttttgacttcaatcaaaattgcttagtttttgcctgttcttggacttcaatagagtgtgtaccctttcctatctggcttcttttgctcaacttaatgtttttttttgtttgtccttgatccatctattttattctgtttcaytaatgtttttcagattccctttaacataatatggttttcatacctgtgttaaaaatcttgatttcattaaaaatcttgattccattttttatcacaaagactagatgattaatattaagggttactttctctgaataaataatagacaaattcatgtagataagtgtatttaaaataaaaaaagaattattactgttacagagaatgataagtaactctatctttactaaaaactgaggagcaattaagcttaagttgaatatacatatgagcttatttatttatttatctatttatttatttttgagatgacgagtttcgctcttgtt

SEQ ID NO: 40264 - DNA, 540 bp, Homo sapiens
ataatatttttatcacactgtaaaatttcctaatatccctgtacagactatcttgtcagatgcagctgcttttgacttcaatcaaaattgcttagtttttgcctgttcttggacttcaatagagtgtgtaccctttcctatctggcttcttttgctcaacttaatgtttttttttgtttgtccttgatccatctattttattctgtttcactaatgtttttcagattccctttaacataatatggttttcatacctgtgttaaaaatcttgatttcattaaaaatcttgattccattttttatcacaaagactagatgattaatattaagggttactttctctgaataaataatagacaaattcatgtagataagtgtatttaaaataaaaaaagaattattactgttacagagaatgataartaactctatctttactaaaaactgaggagcaattaagcttaagttgaatatacatatgagcttatttatttatttatctatttatttatttttgagatgacgagtttcgctcttgtt

SEQ ID NO: 40265 - DNA, 751 bp, Homo sapiens
ctggccttcctcctccgcggccgtcgacccccctcggcgctccgggtggacggctccggggcgcggctcgtccctcgggtggtgcagcccccgcggcccgagacccggggagggccgggggtactttctgcgaggcgccttccccgcggcttctgcccgcgccaaagcctggtggaatccagcgcagacctaaagcacgcttgacaccccgatttttcgagactaggacgactctctgagccagcagctttcctctccctctcggggagaatctcatttccttggggtggtgagggtgacgggcactgtcttttggcccsgcgtgtccgttccccggtctcccgcctcacccctctgcgaggtgaggaggggaaacggcgagcttaggcctggcgggaaggagcctacccgacgagagggctccgcggggagggtcggttggaatcccgccctagcgcctcctgctctgcccggtccccaccggggacggggaatgccagtcatttctgttgagtgctagcagggccggtgtcaccacctcgggtggccgaggcttcgaggttttcatgaaaagcccccgaagcgtgaggcgcccgcccagtggagaacaaagggccgagggccgaaggcgaggcgaggcagcgcgcgcggctcccttggctcgacctagctgggagtcgggggcgcgggcagggctcactcccggcctagaaactggagcccgccacccccgccccgcaggcgaccgcag

SEQ ID NO: 40266 - DNA, 1161 bp, Homo sapiens
ttaaagcaacattagccacttgatgtgattaaaatgaagtctctgtaataaaatattgtcagtggattgaagattcttgtttggaaaatgtcccctttgccattacatttatatcccttaaatgttttgctacttctgtagcacagttttatgaattcgtattttcctcctggatagcctctaactttatgcacaaagcattactggagcataattattcagagtgtatttgagatttcactcacaggattatttcagataaatcccctatattgaatcttatgtgcctgctgtgttgatcgtttcaccagcatttaatagtgtattttctttttcaggtattattcccctggatattcagatacacttctgcagagggtggacagctatcaaccacttaataactgagcaaagttatattgtgatactcaaattcacagcagagtagttttgagtaacagtaattaaatccttctaaatatttgaactaagtatattctagatttatttaatgggaaatacctttagataatattttctaaatttatgtaatactttaaacattygtagcttgaatatgtgaggaactattcatggtcattcgcatgcataggatttgttctacaggtagattttaaaaacacgttaaagggccttaaggcattttgttattctgttaaaaaccacacacactcgtacatgcagacacctccaatgagatatagttaagagatggcattcaaaaaccctaaattattctagccaatttgtcataggcataggcaaggaaagctggccttgctaactatatagtagtatacacaagagaaatctttgaaggaggaaactgatgacagatatacagggcacttgaaggagactctgatgctagttatataagtgcattaacttaagacacggactctgtgggtaacctgttaggttttactaagaatttaggaaaaatttactcctctttatcacaagttttccaaacctccttccccaccctatctaaagtgttccttacctttcatgggcccagcgagggtagaattcagaatagagagttatactcctgcatacatgctctccctctcattgaaaggtttcttagtctagctctgctcatgaatgaacaaagaagcaggcatgtaaaat

SEQ ID NO: 40267 - DNA, 615 bp, Homo sapiens
ttataaattacccagtctcaggtagttctttatagcagtgtgagaatgggctaatacaccttcaagcctccccctacctgcaaatgagtaaacaagtacatttaaaccaaaataactaaaggagcacactggagaacagcaaaaaagcagccagaagaaatcctgtagagcacggaaacccagaaaggccacatagagaaggaaaagaaacaccttacctttaccacctcatgccccaagtggggatcagctcacaagcaggaaggaaggacagctccctgcaaggaaaaggtaagcaagataccccagcaacctctctcactactgtggacacttgcagtcattgcgactggagacccctgcagtctgcacaggctctgagcctggctgagggagctcccttccaccagagctgaggcagcactctgctctcagagggccrcaggcctcctgaacactgaagtagttgctgccaccacacatctcaggtgaggtggcaccttgcaccctgagcctccaagcctctggcacacctaagcaggagcatcacagatgatcaaatatgtggaaattaaacaaggtactcctgaacaaccaattggtcaaagaagaaag

SEQ ID NO: 40268 - DNA, 587 bp, Homo sapiens
gtggatcacctgaggtcaggagttcgagaccagcctggccaacatggcaaaaccctgtctctactttaaaaatataaaaaattagccaggcatggtgtcgggctcctgtaatcccagctacttgggaggctgaggcaggagaatcacttgaatccaggaggtggaggttgcagtgagccaagatcgcaccattgcactccagcctgggcaacaagaacgaaactctgtctcaaaaaaaaaaaaaaaaaaaccctcaaggtgactctgatgcatgacatggcttgaggactgatgccctaaatcgtmatgtaatggtggaaattaatgatcttgagttttactttaccatgtataattctattccaaatctgcatatattagctatgtaaaattttctttgttcactgcacattgtcctttttatggtaaataattttcgcagtattttttgaggatctcatacatgcttgatatttgagttcagtatttttctacagaaaaatttgaaggtaacctgaaatcacaatacttctggagacccaaaagaatggaacttagttttggaattcaccattatgcaggaaagg

SEQ ID NO: 40269 - DNA, 587 bp, Homo sapiens
gtggatcacctgaggtcaggagttcgagaccagcctggccaacatggcaaaaccctgtctctactttaaaaatataaaaaattagccaggcatggtgtcgggctcctgtaatcccagctacttgggaggctgaggcaggagaatcacttgaatccaggaggtggaggttgcagtgagccaagatcgcaccattgcactccagcctgggcaacaagaacgaaactctgtctcaaaaaaaaaaaaaaaaaaaccctcaaggtgactctgatgcatgacatggcttgaggactgatgccctaaatcgtamtgtaatggtggaaattaatgatcttgagttttactttaccatgtataattctattccaaatctgcatatattagctatgtaaaattttctttgttcactgcacattgtcctttttatggtaaataattttcgcagtattttttgaggatctcatacatgcttgatatttgagttcagtatttttctacagaaaaatttgaaggtaacctgaaatcacaatacttctggagacccaaaagaatggaacttagttttggaattcaccattatgcaggaaagg

SEQ ID NO: 40270 - DNA, 587 bp, Homo sapiens
gtggatcacctgaggtcaggagttcgagaccagcctggccaacatggcaaaaccctgtctctactttaaaaatataaaaaattagccaggcatggtgtcgggctcctgtaatcccagctacttgggaggctgaggcaggagaatcacttgaatccaggaggtggaggttgcagtgagccaagatcgcaccattgcactccagcctgggcaacaagaacgaaactctgtctcaaaaaaaaaaaaaaaaaaaccctcaaggtgactctgatgcatgacatggcttgaggactgatgccctaaatcgtaatrtaatggtggaaattaatgatcttgagttttactttaccatgtataattctattccaaatctgcatatattagctatgtaaaattttctttgttcactgcacattgtcctttttatggtaaataattttcgcagtattttttgaggatctcatacatgcttgatatttgagttcagtatttttctacagaaaaatttgaaggtaacctgaaatcacaatacttctggagacccaaaagaatggaacttagttttggaattcaccattatgcaggaaagg

SEQ ID NO: 40271 - DNA, 587 bp, Homo sapiens
gtggatcacctgaggtcaggagttcgagaccagcctggccaacatggcaaaaccctgtctctactttaaaaatataaaaaattagccaggcatggtgtcgggctcctgtaatcccagctacttgggaggctgaggcaggagaatcacttgaatccaggaggtggaggttgcagtgagccaagatcgcaccattgcactccagcctgggcaacaagaacgaaactctgtctcaaaaaaaaaaaaaaaaaaaccctcaaggtgactctgatgcatgacatggcttgaggactgatgccctaaatcgtaatgwaatggtggaaattaatgatcttgagttttactttaccatgtataattctattccaaatctgcatatattagctatgtaaaattttctttgttcactgcacattgtcctttttatggtaaataattttcgcagtattttttgaggatctcatacatgcttgatatttgagttcagtatttttctacagaaaaatttgaaggtaacctgaaatcacaatacttctggagacccaaaagaatggaacttagttttggaattcaccattatgcaggaaagg

SEQ ID NO: 40272 - DNA, 587 bp, Homo sapiens
gtggatcacctgaggtcaggagttcgagaccagcctggccaacatggcaaaaccctgtctctactttaaaaatataaaaaattagccaggcatggtgtcgggctcctgtaatcccagctacttgggaggctgaggcaggagaatcacttgaatccaggaggtggaggttgcagtgagccaagatcgcaccattgcactccagcctgggcaacaagaacgaaactctgtctcaaaaaaaaaaaaaaaaaaaccctcaaggtgactctgatgcatgacatggcttgaggactgatgccctaaatcgtaatgtawtggtggaaattaatgatcttgagttttactttaccatgtataattctattccaaatctgcatatattagctatgtaaaattttctttgttcactgcacattgtcctttttatggtaaataattttcgcagtattttttgaggatctcatacatgcttgatatttgagttcagtatttttctacagaaaaatttgaaggtaacctgaaatcacaatacttctggagacccaaaagaatggaacttagttttggaattcaccattatgcaggaaagg

SEQ ID NO: 40273 - DNA, 587 bp, Homo sapiens
gtggatcacctgaggtcaggagttcgagaccagcctggccaacatggcaaaaccctgtctctactttaaaaatataaaaaattagccaggcatggtgtcgggctcctgtaatcccagctacttgggaggctgaggcaggagaatcacttgaatccaggaggtggaggttgcagtgagccaagatcgcaccattgcactccagcctgggcaacaagaacgaaactctgtctcaaaaaaaaaaaaaaaaaaaccctcaaggtgactctgatgcatgacatggcttgaggactgatgccctaaatcgtaatgtaayggtggaaattaatgatcttgagttttactttaccatgtataattctattccaaatctgcatatattagctatgtaaaattttctttgttcactgcacattgtcctttttatggtaaataattttcgcagtattttttgaggatctcatacatgcttgatatttgagttcagtatttttctacagaaaaatttgaaggtaacctgaaatcacaatacttctggagacccaaaagaatggaacttagttttggaattcaccattatgcaggaaagg

SEQ ID NO: 40274 - DNA, 812 bp, Homo sapiens
tatagtatagttctaaaaaatacagatttacttataaaaatgtagaggcagtaactagaaatttagctattaaaagtttgcttataaaccattaaggcaactttaattaacagataaaattatttttgatgtagtttgtaagcaattatatactcttaggctaacttaccaaattataatattatacaatcttactaatccttcttatatattaatttccttgtccaactctctctttatagatggtaaaaaagggaatactttacaacagacactggagcttattggagggtggagagtacgaggagggagacgatcaggaaacataactaacgggtactgggcttaatacctgcrtgatgaaataatctgttcaacaaacctccatgacacagcttcacctatataaccaaactgcacatttacccctgaacttaaaatacaattaaaaaaaagggaacaccttaatccctgttaggatcatctcttagtttaaaataaggacagaaaagtcaatagcgtttaatatgtaagaagtagatataagcaaagtgaaatccaattaaatattttcatcagttctaatttgatcattttcttatttatttttggataatttaaaaaattcacatagatatgaaactgtgttctatagcaataccttattaaaacagtagccaattactagacaagtaagtataacatattaggataatcaactaaaagtggaatcccagaaagcgagtatctcaaagaccaggatcacatttattggtgaggtaatgtatggacacaaatagcaattgacggct

SEQ ID NO: 40275 - DNA, 548 bp, Homo sapiens
aagaatcatttgaaccagggaggcggaggttgcagtgagccaagattgtgccactgcactccagcctgggtgacagagtgagactctgtgtcmcaaaaaaaaaaaaaaaaaaaatggatggatggagaaatagatggattgaaaatgagtgtgtgacagttggcagatgaatggggaattaaatggatggatgacttcatgaacaaatggttgaatggatgggattacttgcttgcattgatcaaaacagacttgacctaatctcaaagtggtaagaaaggagaggaatctagctggtgagattggaactgtggagcttaaaaaaacgttgagaatcttactagcaaacataaggtctgcttgtgaacaagttactatcatcacaaagctctgaataagttccaatctgctattccaggcgaagtccggaggatgatgccagccatgagagtctgatcaactggactgactgatcaacagaacttaacttgctggaagtctattggagttaggtcagatatagaaccttaaggctttgggatctgaca

SEQ ID NO: 40276 - DNA, 546 bp, Homo sapiens
ttgagcctgggaggtcaaggctgcagtgagctactattgcaccactgtacttcagcttgggtgacaaagtgagaccctgtctttcaaaaaataaagtaaaataaaataaaataaaataaaataacatttgtacccacatagatggatattatattttaggacaaaatcatttattcaactaaaatgtaattcttgttagctaaactctcaagttatttcttgagaggagaacatctttcaacttcatgattgagcaacaagaagagttaactatcctaaatatgtatgcwcccaatataggagcacccagattcataaagcaagtccttagagacctacaaagagacttagactccacacaataatgatgacagactttaaaactccactgtcaatatcagacagatcaaagagacagaaggttaaaaaggatatccaggacttgaactcagctctgcaccaagcagacctaatagacatctacagaactctctacccaaaatcaacagaatatacattcttctcagcaccacatcacacttattc

SEQ ID NO: 40277 - DNA, 546 bp, Homo sapiens
ttgagcctgggaggtcaaggctgcagtgagctactattgcaccactgtacttcagcttgggtgacaaagtgagaccctgtctttcaaaaaataaagtaaaataaaataaaataaaataaaataacatttgtacccacatagatggatattatattttaggacaaaatcatttattcaactaaaatgtaattcttgttagctaaactctcaagttatttcttgagaggagaacatctttcaacttcatgattgagcaacaagaagagttaactatcctaaatatgtatgctcccaawataggagcacccagattcataaagcaagtccttagagacctacaaagagacttagactccacacaataatgatgacagactttaaaactccactgtcaatatcagacagatcaaagagacagaaggttaaaaaggatatccaggacttgaactcagctctgcaccaagcagacctaatagacatctacagaactctctacccaaaatcaacagaatatacattcttctcagcaccacatcacacttattc

SEQ ID NO: 40278 - DNA, 644 bp, Homo sapiens
tgcatcgtttatggtattggtagagtgtaagtccttttctgactatactgtaattacatatgtgcatagctcatcacctctacacagccataagcttcttgagggtgaaaacaaggttattcatcttggtatcagcttggtcctaagcccgcttctctgttcactctcttctctccttaaatgatctcatgatttatgacttcatccactccatctaaatgctgatgcttccagcccagacctctcggctaagcaccagatcctactcacaccacctactcccatagccccgtgggtgtctccaggctcctcgtgctcggtgtgttcagtgggaactcaccrtgatgccccccacccaactcaggcctcctccaggtttcctttcttggtaaatgccacccccatcccctactggacatccagttttgcaagccagaatcgaggagtcctcttggaactcctccacccagcaacatctatgtctactccatcaccaggccctgtaagttttacattttaaatggtattcaaatcccataacttttctccacctccactacaccccttaatccaagctgtcctcatctctcaccttgcccacatcctctgctggtatcaaaataggctccccacgtcacctgcag

SEQ ID NO: 40279 - DNA, 1045 bp, Homo sapiens
tgcctccatttattattattattttttcatgtttatatagttttatttatttatttattttttcttcaacttttctttttagttcaggggtacatgtgcaggatatgcagggttgttatctaggtaaatgtgcgccgtggtggtttgctgcatagatcgtcctgtcacctaggtattaagcccagcatccattagctattcctcctgatgctctccttcttcccaacccccataggtgcccagtgtgtgctgttcccctcatgtgtccatgtgttctcatcattcagctcccacttataagtgagaacatgtggtgtttggttttttcttcctgcgtcagtttgctgcagataatgtcttccaactccatccacgtccctgcaaaggacatgatctcattcctttttatggctgcaatgccttcatttattttcctctggattggagttctgccctctagggctatacataaggatatgccacattgtcttactgtcagattgttttatttgctgttatattctatgtgttagtcttgtggcattgattagttatgatatccttagctggtcagatattgtgttttatacttctgtctttctttctttcttttttgagatggcgttttgctcttgttgcccaggctggagtgcaatggcgcgatctcggttcactgcaagctctgcctcctgggttcaagcaattttcctgcctcagcctcccgagtagctaggattacaggcattcgccacsacgcccagctaattttgtatttttagtagagacaagttttctccgtgttggtcaggctggtcttgaactcccgatctcaggtgatccacctgcctcagcctcccaaagtgctgggattataggtgtgagccaccgtgcctggctgtattttacatttctttgttgttgttgtatttatttatttatctatttatttatttatttatttagagacagggtctcatctgccgcccagtctggagtgcagtggtgtggtctcagctcacttcaacctctgtctctcaggctcaag

SEQ ID NO: 40280 - DNA, 1045 bp, Homo sapiens
tgcctccatttattattattattttttcatgtttatatagttttatttatttatttattttttcttcaacttttctttttagttcaggggtacatgtgcaggatatgcagggttgttatctaggtaaatgtgcgccgtggtggtttgctgcatagatcgtcctgtcacctaggtattaagcccagcatccattagctattcctcctgatgctctccttcttcccaacccccataggtgcccagtgtgtgctgttcccctcatgtgtccatgtgttctcatcattcagctcccacttataagtgagaacatgtggtgtttggttttttcttcctgcgtcagtttgctgcagataatgtcttccaactccatccacgtccctgcaaaggacatgatctcattcctttttatggctgcaatgccttcatttattttcctctggattggagttctgccctctagggctatacataaggatatgccacattgtcttactgtcagattgttttatttgctgttatattctatgtgttagtcttgtggcattgattagttatgatatccttagctggtcagatattgtgttttatacttctgtctttctttctttcttttttgagatggcgttttgctcttgttgcccaggctggagtgcaatggcgcgatctcggttcactgcaagctctgcctcctgggttcaagcaattttcctgcctcagcctcccgagtagctaggattacaggcattcgccaccacgcccagctaattttgtatttttagtagagacaagttttctccgtgttggtcaggctggtcttgaactcccgatctcaggtgatccacctgcctcagcctcccaaagtgctgggattataggygtgagccaccgtgcctggctgtattttacatttctttgttgttgttgtatttatttatttatctatttatttatttatttatttagagacagggtctcatctgccgcccagtctggagtgcagtggtgtggtctcagctcacttcaacctctgtctctcaggctcaag

SEQ ID NO: 40281 - DNA, 1045 bp, Homo sapiens
tgcctccatttattattattattttttcatgtttatatagttttatttatttatttattttttcttcaacttttctttttagttcaggggtacatgtgcaggatatgcagggttgttatctaggtaaatgtgcgccgtggtggtttgctgcatagatcgtcctgtcacctaggtattaagcccagcatccattagctattcctcctgatgctctccttcttcccaacccccataggtgcccagtgtgtgctgttcccctcatgtgtccatgtgttctcatcattcagctcccacttataagtgagaacatgtggtgtttggttttttcttcctgcgtcagtttgctgcagataatgtcttccaactccatccacgtccctgcaaaggacatgatctcattcctttttatggctgcaatgccttcatttattttcctctggattggagttctgccctctagggctatacataaggatatgccacattgtcttactgtcagattgttttatttgctgttatattctatgtgttagtcttgtggcattgattagttatgatatccttagctggtcagatattgtgttttatacttctgtctttctttctttcttttttgagatggcgttttgctcttgttgcccaggctggagtgcaatggcgcgatctcggttcactgcaagctctgcctcctgggttcaagcaattttcctgcctcagcctcccgagtagctaggattacaggcattcgccaccacgcccagctaattttgtatttttagtagagacaagttttctccgtgttggtcaggctggtcttgaactcccgatctcaggtgatccacctgcctcagcctcccaaagtgctgggattataggtrtgagccaccgtgcctggctgtattttacatttctttgttgttgttgtatttatttatttatctatttatttatttatttatttagagacagggtctcatctgccgcccagtctggagtgcagtggtgtggtctcagctcacttcaacctctgtctctcaggctcaag

SEQ ID NO: 40282 - DNA, 518 bp, Homo sapiens
tatcataaatttcctcccacaatgcaaggcaaatcctatgacttcaagcacatcaagaacaatgataatcttttcaaatatattagaaaaagtcttatatataggaaattatagtacaatcaatctacatatgaatccaagttcagcagccaaaggaagaatcatcayaggtcgacaattagcatactatgatttagtataagaaactcaaactattttaaaatggctactaggcattttgggtgcctttgacaaaagatgtagaccaggagtgtccaatcttttggcttccctgggccacactggaagaagaattgtctagggccacatataaaatacactaacaatagctagtgagcttaaaaaaaaaaaaattaaaaaccacaaaaaaatgttgttgttgttgttgttgttcttgttgttgttgttgaaacgaagtgttgctctgtcgcccaggctggagtgcagtgcctcaatctcagctaactgcaacctccgcctcccaggttcaaacaatt

SEQ ID NO: 40283 - DNA, 523 bp, Homo sapiens
ggcaaggttaaagcgaaggatcagaagatactgtggaaaatttgtactgactcttccatcacaagtaaaaagtatcccctggatcacaaaattattgaaacatactattaaattgcctaaagctacctgaattagtccacgtacctgttcattataaaaccttaacataccttagggtagtgtacatatttttaaaaacaaagatatccaaatccatcaagaaatggctctatagtcccttaaggaatttcttcacagtataagcttttataaaaaatatttaattaaggctgggcacagtggctcacgcctgtaatcccagcattttgggaggctaaggcaggtggaccatgaggtcaggagattgaggccatcctggccaacatggtgaaaccccgtctctactaaaatacaaaaaattggccaggcatggtggcacgctcctgtagtcccagctactcgggaagttaaggcaaggaaatcacttraacctgggaggcagaggctgcagtgagccaagatc

SEQ ID NO: 40284 - DNA, 523 bp, Homo sapiens
ggcaaggttaaagcgaaggatcagaagatactgtggaaaatttgtactgactcttccatcacaagtaaaaagtatcccctggatcacaaaattattgaaacatactattaaattgcctaaagctacctgaattagtccacgtacctgttcattataaaaccttaacataccttagggtagtgtacatatttttaaaaacaaagatatccaaatccatcaagaaatggctctatagtcccttaaggaatttcttcacagtataagcttttataaaaaatatttaattaaggctgggcacagtggctcacgcctgtaatcccagcattttgggaggctaaggcaggtggaccatgaggtcaggagattgaggccatcctggccaacatggtgaaaccccgtctctactaaaatacaaaaaattggccaggcatggtggcacgctcctgtagtcccagctactcgggaagttaaggcaaggaaatcacttgaacmtgggaggcagaggctgcagtgagccaagatc

SEQ ID NO: 40285 - DNA, 639 bp, Homo sapiens
taaccaataaaagataacatagaaaacataactgccaagggtaggtaaataagtaaagataggaaacaaawcattttaaagggaaacaaacaaggaataaagagaaaactccaaaatgtataatataaataatgttatagaaatcaatccaaatatataaataatcataatgaatataaatggattgaaatttctactaaaaattcaaatatggatgtaaaatatctagtatattaggtttacaggcattccaactaaaatgtgagacagagaaagactgatggcaaagagatggaaaacgttagagcaggcagatgctaaccaaataaaactcatgtagctatattaatatcagacacaatagaccataaggcaagatgtgttactagaaataaatagggtatctatatgatggtaacatttaattcagcaagggctgtctttctatactgtgtgtaacgaataaaaaaaccccctggccaggcacgatagctgacacctgtaatcccagcactttgggaagccgaggcgagtggatcacctgaggtcgagttcaagaccagcctgaccaacatggtgaaaccccgtctctactaaaaatacaaacaaataaaaatcaaaatagccaggcgtagtggc

SEQ ID NO: 40286 - DNA, 639 bp, Homo sapiens
taaccaataaaagataacatagaaaacataactgccaagggtaggtaaataagtaaagataggaaacaaatcattttaaagggaaacaaacaaggaataaagagaaaactccaaaatgtataatataaataatgttatagaaatcaatccaaatatataaataatcataatgaatataaatggattgaaatttctactaaaaattcaaatatggatgtaaaatatctagtatattaggtttacaggcattccaactaaaatgtgagacagagaaagactgatggcaaagagatggaaaacgttagagcaggcagatgctaaccaaataaaactcatgtagctatattaatatcagacacaatagaccataaggcaagatgtgttactagaaataaatagggtatctatatgatggtaacatttaattcagcaagggctgtctttctatactgtgtgtaacgaataaaaaaaccccctggccaggcacsatagctgacacctgtaatcccagcactttgggaagccgaggcgagtggatcacctgaggtcgagttcaagaccagcctgaccaacatggtgaaaccccgtctctactaaaaatacaaacaaataaaaatcaaaatagccaggcgtagtggc

SEQ ID NO: 40287 - DNA, 546 bp, Homo sapiens
gagaccagcctgaccaacatggtgaaaccccgtctctactaaagatacaaaaataagccgggcgtggtggcgggcacctgtaatyccagctactcaggaggctgaggcaggggaattgcttgaatccgggaggcggaggttgcagtgagctgagatcatgccactgcactccagcctgggtgacagagtgagactccatcaaaaaaaaaaaaaaaaaaaaaaaaaaaaaaaaaagatgaattcctgacacttaatacatttagataaagtctaacttatctttaaagttaactttaaacaactgctctacagcataatattatcccctgtgtagacagtgacctctagtataagctttaaattggtttaaaaaatagattaagtatgaaaacatctcttcaacattttcatatctctacaactctttattagaaatatccattttgtcctatattcactttctgctgaactaaagtgcatgccagtctccagaggatgacagatgggcagaaatttataaaacagcagcagtcatggacagcctag

SEQ ID NO: 40288 - DNA, 546 bp, Homo sapiens
gagaccagcctgaccaacatggtgaaaccccgtctctactaaagatacaaaaataagccgggcgtggtggcgggcacctgtaatcccagctactcaggaggctgaggcaggggaattgcttgaayccgggaggcggaggttgcagtgagctgagatcatgccactgcactccagcctgggtgacagagtgagactccatcaaaaaaaaaaaaaaaaaaaaaaaaaaaaaaaaaagatgaattcctgacacttaatacatttagataaagtctaacttatctttaaagttaactttaaacaactgctctacagcataatattatcccctgtgtagacagtgacctctagtataagctttaaattggtttaaaaaatagattaagtatgaaaacatctcttcaacattttcatatctctacaactctttattagaaatatccattttgtcctatattcactttctgctgaactaaagtgcatgccagtctccagaggatgacagatgggcagaaatttataaaacagcagcagtcatggacagcctag

SEQ ID NO: 40289 - DNA, 2462 bp, Homo sapiens
gtttatttgagcattttatatttaacaagaaataatgataggctacctggaatttgtttcaaaataatcctggaggagtgtgaggtaggtaagattatagataaaggaagactggcaatgggttgttcaagctgggcaatgggtccatggtggttattattctcatttctctgcttatagatattggaaaatttctgtaataaaaagatagagaaagaagagaaacttggcttaagggaaaataatgctagtttggttattgggtcctcttcagcacctaagtggctttctgggttaggaggcagtgagaggtgagggacagggtgctgtgctgtgtgaggacacccggctgggtgactttgaacaggtcagatcagcctcagttttctcgcctgcaaaatcgggtagttgaatgtgctaaactcggaggtgcttcagttcctgattctgttgttggtcyccagagacacccttacacccttgactccttccagtccctggctgggcatcttgttctcctctgttttttggttgtggaaggaacctcactggccttcttcaagtgcctccctctcacatgtgcttaagcattgggagaatctggctcttcacgttaccaagactacccaagatgggagcagggctccagacgtaacgtacgaaaacgaacataagatacaaaatggtgtatcatacattagtttttttcacattggagaaagatgtcatatctagaggaaaactgatatattcagttggtgcaaaagtagttgcgatttttgccattacttttagtggcaaaaaaccgcaattacttttgcacaaaactaatatttggatataaccaagagaaagttattttcttctttaaaaaattatctcaagcagtggaatcaagctgtttggatatgatcagggccatttgctgtctgataatcaatgaagtacaccttaggccagacccacaacatcttgaggtataaaagaaagttcatttcttccaagaaaagtaactcttctacgtttgtccttctcttaaactcctgggttggtattcacatggatatgaaccttattgtgttctgccgcacagcgataaataccacttttcctggtatgggtttctgttataggaattcttaattggtagtagataggatgtaacactaatttattaatgcattgtaatagcatgtttattattgtagtgggagttaagaagggtcccattcgtggccagttttggtggtccttgaatcagttgtattttggagtgctcattctacgtctaaaggacatcttgccctataaggcaggctgggcttatgccccagcttccagttctctggccttgttttaaagcagaaagtttccaatatcttcaactctgatttaggctgttcagtgtctggctgttagattctagggcaggagaatagatctcttttccgtccacttctctcagataccccccttcatttcttttcttctcctgcatgagaggtcccacgtaagctctaggttcttctatcccttccctattgttagaactcaaaatggcatttacatctttttttcccctacataatcattttttcccattttgctttgatttgatttgatttggtgggaggtgaggatataaacatccttcctttggatttttatatatgcttgtatctccccaaagctaagagtacaaatgccctgcctaaataaacacagttgtttctctaacttatcacagtgtattaccatcaaaaccaaacttactgaaaatctaacctatctctgctgcctctactttctttcttcccacattctcattccttttcccactgcaatctatctctgtgtcctgtattcaccgaggttactccaagcctccgaaccattaaatttagtgtcgttctcttattttcattcatttcaacctctacaacattttccattactgaacagtcagtcctgccttaatgtccaaaatacctcttccttaatttacaaaagctaccattgtcttgtttgtctttgacttctctttctctcttttgccttttctcttcttcttctcatcacccctaacccccagcaggaaggttgctatgtgccttagcccttctgttgctttgaatatgcacttctttcctatacccacatccctcaaactggcccaggctccagctgatgcccatgcacatctacccaagcacctgatgggtagcactatttgaggacagcatgttaactcaaaatccattcatatggtctaaatgtatttctgtggaaaacatgctagttgctaggcactgttctggaagctggtgttctgcagccaataagcaagtgaggttcctgccctcatggagctttcattctagacaggtagggtactaataaatgctatgatggacacagggagtgaaggaagagggagtggaaaagtactatctataaatgca

SEQ ID NO: 40290 - DNA, 594 bp, Homo sapiens
gagaacgttattctattctatttgactgagtgacctggttaactttgctcatctatccatcttttgtgtcttcttctggaataccttctggaggaactgactgaggctgttttacagtgaccttttaaaaaacagtaagtagaagcagtacactctaaaatggtgattaaaagtatagtaaatccacaaaccggtaacatagacatttgttgtcattatcaagcattatgcactgtacataattatatgtgctacacttatatacaactggcagtgcagtaggtttgtttacaccagcatcakcacaaacttgtgagtaaagcatttgcactatgacagcacaacaactgtgacatcactaggttataggaattcttcaactctattacagttacacagaattaccatcatatatgtggcccactgttggcagaaacatcattatgtagcacatgactctattaataacaagttgttattccttgcttcctccagcttctggaggctaggaaccagaacacattatctttagagtagttatgttgacttctaatttcattgcactacagtgagaaaatgtaatgcaaatcaaat

SEQ ID NO: 40291 - DNA, 966 bp, Homo sapiens
tcagaacatttcaaggacttttccttgccttcattgaggtagttttaccattttctttttaaacaataacaatgaattgctctcagaatgttttggtgattcttcccaagaaatgcttgactgtatttctgaagtctattctggacagcctaatgatawttaaatccctgatttcttatcttggggcattttcagcacgttccccttcttttgtttatgagcagttgaaccgaaataatcgaagctttttttgcagtaacactattattaaattttgttttaagaaacacccggttccaggagcaatttatcctctcctctggaaggaaagcaaaataccagaaagagacaatccagagtaatgtttcacaatatccaatgtttattttatgttgaattagacacatacgtattttcaactcaccagtcatatattgttagttttattttttcacacactgaaggaaactaaaaaaatgagacagaaaaaagtagttatttctcaatgatttagtaattattaagtaagtattcttactttttcagaaagaaaataaagtcaaaccttgatctgaagattgacgacctgattccactctgggtttgcatttttctcaattatgtttgtacaaacctgtaaaatcaccaaagcaaaagtgtaggttttcaagtttctaatttctaaaagtttacaatctatgcatactagattatgactttagcagtttacttatatacttaggaacctggttaaactttatttttcttgatgatttgtaaaatatgacatgggtttaatattaatcattgctgtttcgaggcactaggagcttgcttttaacctttttttaattagttttcaattgtcaggcttctaacattagattaatgtaaaaaagcaagagataaggttgatagagcatttgttacataccgtttgggaagcatctaccattaacacatcca

SEQ ID NO: 40292 - DNA, 537 bp, Homo sapiens
ccttaattttagctgatggcctcaaaactatttggattgtagattttattactattgctttgttgtctagcaacttttctgaatttgtttgtcggtgaagttttattctttctcttaaaggtcaagctttttttttttttttttttttttytgcattttccttctttttttgagatggagtttcattcttgttgtccaggctggagtgcagtggcctggtcttgactcactgcaacctctgccttcccaggttcaagggattctccggtttcagcctcctgagtagctgggattacaggcatgtgccaccactctgggctaattttgtatttttggtagagacggtgtttcaccctgttggtcaggctggtctcaaactgctgacatcaggtgatctgcccacctcagcctcccaaagtgctgggattacaggtgtgagccaccatgcctggcctcctctttcttttatttttgattctttttctttctaaaacttaatttctgtttcatattcattttcccatagcttcagtagtt

SEQ ID NO: 40293 - DNA, 381 bp, Homo sapiens
ttatttttcttctttttttaattatcaaggtcagtgacttttagagaatcaatgtattcattttctactacaagaactttaatcaatagtatctattttccttgtaaaaatctgttccagagatactttccccttccaaagcattactgtatttcatacactttgaggtatgaatataactcctattatctttatttctgtttattcttggtcttaatgtattcctggctcatcactgtccttttaaggcatgtgtgtgtgtgtgtgtatgtgtgtgtgtktgtgtgtatgttttaggggaatagaggaagggaaaggaaaagaagtcagactctactctgagtagttttccctttgattgttatgttttgtccatttcat

SEQ ID NO: 40294 - DNA, 790 bp, Homo sapiens
agataaaaaggtagtaacagctgacaagactggtgaaccgtgtgagctgtgagcttgtacatacacacgagggccatggcccccagattccatcacgttcaacagtgaggcttgcccttctttttcaagcatcttgtgctcattttaaacagatgtcagacacaattttaccacacagatggaaccaaccatttaaactaacttattctgccaagtctgtttggggaagggctgcgtatctagaaatgcacattttgtagtcatatcatgctttcaacttaaattcctgccacccctgactacagagcgacagtttttcaataaccagtgagatagattagcaagacatagcctattatcctaagtttactagaagtgagagtttttatcaacacacacacacacacacacacacacacacacagaaragtcttgaaagatcttccgagaatgcaattatacagtaagttaatttcttatccacagaagtatagctgtattaacaacccttccttaagtggatacactggaatgctgccttagttatctcaaactgctttcctgcagtattttttgcacttacttttagtcattcttctccatctaccttcacccctaccaagcctctggctcctcctcctgccttcctcccacagcacttacactttcctcttgaacagcagtaaaggcatacaggtctgcatctgacatgcttgatttttcaggtgtggctctctaacacagacctatagttggaaccagaagcttgatatggttttagtgaaacttg

SEQ ID NO: 40295 - DNA, 505 bp, Homo sapiens
tgcagattcatctgcagtaaccagaagtttgatcttacaggtgaaagacaaaaatcaatgcaaggaacagactgttaaagccatgatcaggaagaagaaccaccaacttctggaggaataaccaccaatgtgcaagaactggtatgaagaaatcagagagccaggagcgtgytaataaacatctaatagaatctccacaaacaaaaaaaaagggtcaggaggtggggaagccgtatatgtagtgtttgttgatacctgttgcacaaacactcccaccctggcaaccaatatagtgtcactgaacacagagttgggaagacacatgcacagtcggctcaggggaagggagaagtcagccaagtgaatgaagtagtacttgagtaccattagaaagaaaagaaagagttcgcagaagatcaataaataagcaaaatcaataatataaagtatcaacactctgaatgatactcatagttggccagattattgcttttatatgtattgt

SEQ ID NO: 40296 - DNA, 1447 bp, Homo sapiens
  misc_feature (1)...(1447): n = A,T,C or G
tgcagtccttccctgcacagacagcaatatattttccaagaaagctcatgggtggctgtaacggataaccttaactcctcctcagattcaaaatctgactggccctctgtttgcaaaggttaagtaagatgtgtgccatttggaaagccattgaatagcttctgaacacacaaccctttaactcatattggttaatgaagagtggtccctactgcataactcatttccttctggtaagtgaggtgtttggtggggcacgcttactcgtctgagccattagaaactaatttatgccatcctgcctctggaatgcagtgtaaccagcacatctggctatgtctgctcaaacactcagtggtgcccagtggagtgaaggagtgtggaacgcaccacccagagctgggagctcaggctagcaagcagtgggttcatcactggagatcacagaacctaaaggcttggggtttatttttccctctttccttaatacccaggagtattgtttcctcctggattcaatgtggtctacggctctgtgttcctatgcagcatgttacccccatgtgcccacaggaacaatacccagaaactgctcaaatttgttttgcaaagagcaggcaannnnnnnnnnnnnnnnnnnnnnnnnnnnnnnnnnnnnnnnnnnnnnnnnnnnnnnnnnnnnnnnnnnnnnnnnnnnnnnnnnnnnnnnnnnnnnnnnnnncagatgtctaataagaacttttaaataaaaaatgtcttaactgaaaaatagttagcagacaactacaccagaagtaatagcatcatatcaataaccttaaattatattacctaatatttaatcctgttaaaatgttggccttctctcctcagagaagttttagtctgtttgttttgttttattttgttttgttttgttttgagacagggtctcactctgatgcccaggctggagtgcaagtagcatgatctcggctcactgcaacctctccctcctgggttaaagcaattctcaagcctcagcctcctgagtagctgggattgcaggtgcgcaccactacacccagttaatttttgacgtttttaatagagggtgggtttttccatgttgcccaggctggtcttaaacttctggcctcaaatgatctgcccacctccgcctcccaaagtgctgggattacaggcataagccaccgcacccagccatctcagagaagcttgatgccaggcactgaagattcaaagatgggaaagatccgttcctgmctttgtaatggttacagtacagcaaagacccaaacgcagattgaatagggtgttgggtgctatggtgaagattagtaacagctgctatggaagcagagagacaggaaactcacctagggtgtcctggaggcctcctggaagagaggctgcttgcggtttaataggatgagtaaaaaaaaaa

SEQ ID NO: 40297 - DNA, 633 bp, Homo sapiens
tgcaaaaaaatcctatttgcaaagtattacaataatccattaaatatttcagggtttaatcttgaaatactgatattagatagtacttagtactttagtaaagcactgtcatttatattccatattagtttataaagctgttttataatctgaaacaatagcatatttgttgtagactgtcaatggaaagctgctatttctgggtaggaaatctagacaaatctttcaattgctgaatcctgaaatgtccaacttcctcgtcagcaaatgacttgcttcttctaagcaattcaacaaatatttagtgcacattaaatatttacatggcagaggcctatttctcctacccttgtcgaactaatagaaaatactgcttctaagcaaaaattactaccaaataaataaaggagcatagagattaaaagcttgtcaccaagygcagagattaaaaacaataatcaccaagcccagtttaatgcaaagcattaggaagttgaaccaatgtttcaatacttattaacttatccattgaataagctaaacgcaggtatatttttaacagtagaaaaaagaagaacccaactagaaaatggagtttttattatttcatattaaaaaaaaaattgttgcatt

SEQ ID NO: 40298 - DNA, 418 bp, Homo sapiens
ccacccacttgcagcagcagaggaagttagaatatttgctctgccaaaagcagagctaagtgtttccttaaacacttggcagtattactgggtgaggccagtctgaccamcaatgggcatggaacagaaggaacatttgagtgtttggtgagggttttcttcttaagggcgctttgagtgattacttgcagctgcattttacagacaaggaaactcaagttccaggagcttgtccttgttcaggtagcgtcactaggatctcaaattaggtctttgtggctactgaggccacaccgtccctgtgtatcagactgcctgattgttacttaacctgcaaccatgttcctgtcaggtggacatttgccagataaaacattgggtcctacacagttgccagattctgtgtattcaaactcaa

SEQ ID NO: 40299 - DNA, 801 bp, Homo sapiens
tcggtttccaaactaggccagtggcagaacttgttggttctccttccttccctagccagaaaaagtgacttctatttttccttaaatatttaactgacacataaaattacatacatttcaggcrtatgacgtgatgatttgatacatgtacacactgtgtagtgacgatcacaatcgaattaatgaacacatccatcaccacccacattttgcatggaagccccaggattttgttcaccttgtaactgaaagtttgtaccttttgaccacgatttccccatcctgagtcccggcaaccaccgttctactctctgtttctatgacttcaactttgttagattccacatataagtcaaatcatgcagttatttgttttctgtgaatgacttctatctttacatttgctggctaaatgcaaacttttaaaatatatacaaataaatcatcctatgtcatccctttaaatccctttgttgaaaggaaactttaaaaatatacacaaataaatcatcctatgtcattcctttaaatgagactgagacatggcttcagtagatggcaccatgttccagaagatcacaggccagctcagaactcgtcagtggggccggccataggcagacagagggcagctgtgtgcacatggctctgcatttctgttgtcgcctcccttgtgacagacacacaggatggaaaaaggctgacagcctgtggcaggaggaaccagagggagggtgccagctgcatacgctgggccagtgactacagttccaatcctcatcatctgcctttccatagata

SEQ ID NO: 40300 - DNA, 801 bp, Homo sapiens
tcggtttccaaactaggccagtggcagaacttgttggttctccttccttccctagccagaaaaagtgacttctatttttccttaaatatttaactgacacataaaattacatacatttcaggcgtatgacgtgatgatttgatacatgtacacactgtgtagtgaygatcacaatcgaattaatgaacacatccatcaccacccacattttgcatggaagccccaggattttgttcaccttgtaactgaaagtttgtaccttttgaccacgatttccccatcctgagtcccggcaaccaccgttctactctctgtttctatgacttcaactttgttagattccacatataagtcaaatcatgcagttatttgttttctgtgaatgacttctatctttacatttgctggctaaatgcaaacttttaaaatatatacaaataaatcatcctatgtcatccctttaaatccctttgttgaaaggaaactttaaaaatatacacaaataaatcatcctatgtcattcctttaaatgagactgagacatggcttcagtagatggcaccatgttccagaagatcacaggccagctcagaactcgtcagtggggccggccataggcagacagagggcagctgtgtgcacatggctctgcatttctgttgtcgcctcccttgtgacagacacacaggatggaaaaaggctgacagcctgtggcaggaggaaccagagggagggtgccagctgcatacgctgggccagtgactacagttccaatcctcatcatctgcctttccatagata

SEQ ID NO: 40301 - DNA, 801 bp, Homo sapiens
tcggtttccaaactaggccagtggcagaacttgttggttctccttccttccctagccagaaaaagtgacttctatttttccttaaatatttaactgacacataaaattacatacatttcaggcgtatgacgtgatgatttgatacatgtacacactgtgtagtgacgatcacaatcgaattaatgaacacatccatcaccacccacattttgcatggaagccccaggattttgttcaccttgtaactgaaagtttgtaccttttgaccacgatttccccatcctgagtccsggcaaccaccgttctactctctgtttctatgacttcaactttgttagattccacatataagtcaaatcatgcagttatttgttttctgtgaatgacttctatctttacatttgctggctaaatgcaaacttttaaaatatatacaaataaatcatcctatgtcatccctttaaatccctttgttgaaaggaaactttaaaaatatacacaaataaatcatcctatgtcattcctttaaatgagactgagacatggcttcagtagatggcaccatgttccagaagatcacaggccagctcagaactcgtcagtggggccggccataggcagacagagggcagctgtgtgcacatggctctgcatttctgttgtcgcctcccttgtgacagacacacaggatggaaaaaggctgacagcctgtggcaggaggaaccagagggagggtgccagctgcatacgctgggccagtgactacagttccaatcctcatcatctgcctttccatagata

SEQ ID NO: 40302 - DNA, 801 bp, Homo sapiens
tcggtttccaaactaggccagtggcagaacttgttggttctccttccttccctagccagaaaaagtgacttctatttttccttaaatatttaactgacacataaaattacatacatttcaggcgtatgacgtgatgatttgatacatgtacacactgtgtagtgacgatcacaatcgaattaatgaacacatccatcaccacccacattttgcatggaagccccaggattttgttcaccttgtaactgaaagtttgtaccttttgaccacgatttccccatcctgagtcccggcaaccaccgttctactctctgtttctaygacttcaactttgttagattccacatataagtcaaatcatgcagttatttgttttctgtgaatgacttctatctttacatttgctggctaaatgcaaacttttaaaatatatacaaataaatcatcctatgtcatccctttaaatccctttgttgaaaggaaactttaaaaatatacacaaataaatcatcctatgtcattcctttaaatgagactgagacatggcttcagtagatggcaccatgttccagaagatcacaggccagctcagaactcgtcagtggggccggccataggcagacagagggcagctgtgtgcacatggctctgcatttctgttgtcgcctcccttgtgacagacacacaggatggaaaaaggctgacagcctgtggcaggaggaaccagagggagggtgccagctgcatacgctgggccagtgactacagttccaatcctcatcatctgcctttccatagata

SEQ ID NO: 40303 - DNA, 801 bp, Homo sapiens
tcggtttccaaactaggccagtggcagaacttgttggttctccttccttccctagccagaaaaagtgacttctatttttccttaaatatttaactgacacataaaattacatacatttcaggcgtatgacgtgatgatttgatacatgtacacactgtgtagtgacgatcacaatcgaattaatgaacacatccatcaccacccacattttgcatggaagccccaggattttgttcaccttgtaactgaaagtttgtaccttttgaccacgatttccccatcctgagtcccggcaaccaccgttctactctctgtttctatgacttcaactttgttagattccacatataagtcaaatcatgcagttatttgttttctgtgaatgacttctatctttacatttgctggctaaatgcaaacttttaaaatatatacaaataaatcatcctatgtcatccctttaaatccctttgttgaaaggaaactttaaaaatatacacaaataaatcatcctatgtcatycctttaaatgagactgagacatggcttcagtagatggcaccatgttccagaagatcacaggccagctcagaactcgtcagtggggccggccataggcagacagagggcagctgtgtgcacatggctctgcatttctgttgtcgcctcccttgtgacagacacacaggatggaaaaaggctgacagcctgtggcaggaggaaccagagggagggtgccagctgcatacgctgggccagtgactacagttccaatcctcatcatctgcctttccatagata

SEQ ID NO: 40304 - DNA, 756 bp, Homo sapiens
ttcttcttcttgtgatctccagcctgataaccaagagggctactaaaggactcacaggtgggcaatgtctacagcgtggatacaccggacaaagataatttatgtcctaggcgggactgcatgagatttcatcacactattcagaacagcaaacaatgtaaaacttatgaactgtttatttttggaattttccatgtcatatttttggtctacaggtaactgaaaccatggaaagcaaaaccacaaataagggggaatgactgtatggtgttgcatgctgtaaaatgtgataagacgagagatcttatgttacatgttcatgttacacattatgtacatcttatgttacaggttcttacaaaaaaaaaaaamaaaacaaaacagcaaagggacaaaagaaaacttgtgaaggtgatggatctgtttattaccttgattgtggtgatggtatcaggggtacatacaagcctatcgaatcgtatgcattaaatatgtgcaaggctattctgtatatccattatatctcaaaaaagctttaaaaaaaacagagggaaaaagtcataatgaagactttctggcagctccaactattacataatgaagaaaaacacagtgaactgctgttatgagatgacaaacatatacaaccagcatacttctggttccaagaaggcattttaagaacatatggttactcttggccaggcgcggtggctcatgcctgtaatcccagcactttagaaggcaaaggcagga

SEQ ID NO: 40305 - DNA, 756 bp, Homo sapiens
ttcttcttcttgtgatctccagcctgataaccaagagggctactaaaggactcacaggtgggcaatgtctacagcgtggatacaccggacaaagataatttatgtcctaggcgggactgcatgagatttcatcacactattcagaacagcaaacaatgtaaaacttatgaactgtttatttttggaattttccatgtcatatttttggtctacaggtaactgaaaccatggaaagcaaaaccacaaataagggggaatgactgtatggtgttgcatgctgtaaaatgtgataagacgagagatcttatgttacatgttcatgttacacattatgtacatcttatgttacaggttcttacaaaaaaaaaaaacaaaamaaaacagcaaagggacaaaagaaaacttgtgaaggtgatggatctgtttattaccttgattgtggtgatggtatcaggggtacatacaagcctatcgaatcgtatgcattaaatatgtgcaaggctattctgtatatccattatatctcaaaaaagctttaaaaaaaacagagggaaaaagtcataatgaagactttctggcagctccaactattacataatgaagaaaaacacagtgaactgctgttatgagatgacaaacatatacaaccagcatacttctggttccaagaaggcattttaagaacatatggttactcttggccaggcgcggtggctcatgcctgtaatcccagcactttagaaggcaaaggcagga

SEQ ID NO: 40306 - DNA, 623 bp, Homo sapiens
tcacttacatgaaatgtccagaataggcaaatctgtagaaagtacatgagtggttgccaggggctgggagatatacagtgtttgtaagtgacagctaagggatgtgaggtttctttttggggtgataaaaagatttgaaaatggataatgctgatggttgtccaattttatgaatatactaaaagcctttgaattgtacattttaaatgggtgaattatatgttatataatctcaataaatcctttcttaaaaagggaaatgaacatttctgcatgtttgctgggtctccaactgataataagttccccaaggcaggggtcctttgtcttccttataaccttctcatcccatcctctcttcctcccaaagatgacacttaaataacagacagacacctcctagcaaagctactataaaatttttttgtagcrgatgaggggggttggttgctggtttgactttcatacttaaatcagagaggctctcccatattaaatctccactccagatatgcaagtaccaagaatttatgaaaaaaaattaagtttctgcttgtttctaaagtagcttcctaccaactgcttctatccagaccatcagaaaccacacttaaagatattct

SEQ ID NO: 40307 - DNA, 2657 bp, Homo sapiens
  misc_feature (1)...(2657): n = A,T,C or G
gcatatactttaaataatagggagattttaaaataaactctaatggatgatagctataacaattatgttgctatagaattcagagctagaaattgaagtgatcctttgattaacctgagtattttaggttgatatcccagtcaacaagccattgatgtggtaagagaacaaagctcagccaacttttaagtgttttttaatctaatttatcttatttaaatatttattgagtgcctactatatttcaggcactgttctaggtactcaggatccaattgtgaacaaaacaatgataaaacactgtggaaccaccattctatgaaatagtagatcacaaaaatagtaaatacataaatagaagtaaaaataaagactactcataacttgtaaaatactagcctaggaaatagtctaggtggtactgacagcaaaattccagtggatgactgtaacccaaccagaaacatttttgtgactgcactcactgtttgccatttggttgctcatctatgatttcagtttactgaactctaactttctcgtctgatctgaattacaatgagggtattaaatcaaatctgtggttacctttgcatattttggaacttcaaacatttagattgtgattcactgtgtgcataattttttaaattgtctcaaatcaacaatctttctcttacttttctaggttttctctaatgaactaactttatagcatactttttgtgctgtagtctaacaaaccgatagctgagtttttttaaaaatgaatacaatatatgctttttctgcctcgcttttttcatctgtaaaatgggatctgtgggatacctaacacataaagtcattgtaagaattaaataaggtaatgtttannnnnnnnnnnnnnnnnnnnnnnnnnnnnnnnnnnnnnnnnnnnnnnnnnnnnnnnnnnnnnnnnnnnnnnnnnnnnnnnnnnnnnnnnnnnnnnnnnnntgaaagccacactgaagcgcggggggggggggcagccctcccaggtaggtatcagtgtcacagctgcccctgtagttgagtctttcaagtctgttaacccacccatacccccacacacaaaaaaaggtgttaaggtttggcttctcttattctcggtggctcctaaagagattcaaacctatttagtagcagttcgggcacaaaactaaatggaatcagtatcattcctcacaatccacagacgggggttaaagattaaaataaggtaaattttatagagatttatttttactatttcaggcttcctgggaatggtctcatttcgtaaagcccccagcatcctaaaggtaagcaccacagttcttgaaaaacaaggattatttattttgcacccatcgcctgaccccaagagatgagtgcttagagagtaatccatctttgtacgtttagatctctcaatcccatttctcatctggaccctctcgggagggtcttcaagcttttacttgcagatcaaactcacatcagaggcaaaaaaagagaaaaataggagtcctaataggattatagtttacaatgaggcaatgggacccatcggattaaaatttggaatttgctttcacaattttaaagtaagactacttttcttcacatttcattggccaaagtaaatcactcatccatgcctaaaytcaaagaaaatggggaagtacaattttaccttttaccatgtgcctataaagacgcaagaaccaaggacattatggacagtcctaatgattaccacagagatctgtaattaaaaaaaaaaaaaagggcttagtcttggagtcttggaaacctggactctatttcaactatcacagaaaatgttaaatcatattcaccacctaattaaagaagtcctcattgaaatacccaagcagtaagtcatgagaaaggctttctgtgagtcacccagcttgattagcgtagtcagttcctcaggttgttcaaaagttattaaattgctcatcccacatttgagagcaccagctgcttttattcatagcccaacaaaaccttaatcctagtggcttcatgggattcaggacacctaactactgtgactcacaaaaaaccacctgttcttactgatcttgggagatatcagctgaggaaacctccatgacattccctggcagtaccgtcttaatggaggtttgtgatgcagcagaatgcataccattgggaagcaccagatccatcattaactacattacttccctgttctgcccttggcctcagttttcccacccacaaagagaaggacaagagttgggcaagatgattcctaagctctaatgggaaatgcctcctggtgggtggtatctaaaattcttgtcagcacctaggacagagatattcatagcactccagggatttcagagaggatggaaccttagcatggatagaagcatggatgctgttgaatgcatgtttggattaaaatcctcttttcatttagatcttgaagtttagttgaactttttatggagtttaagaccctttcaacattttgatattaaaaaaccgaaaatagaacctaactcctgtgccatttattccttgggagtatgaaccaaaaataaaaattatatagaaattgtatttcttgtcttcatgaagtttgctaggtaaat

SEQ ID NO: 40308 - DNA, 2657 bp, Homo sapiens
  misc_feature (1)...(2657): n = A,T,C or G
gcatatactttaaataatagggagattttaaaataaactctaatggatgatagctataacaattatgttgctatagaattcagagctagaaattgaagtgatcctttgattaacctgagtattttaggttgatatcccagtcaacaagccattgatgtggtaagagaacaaagctcagccaacttttaagtgttttttaatctaatttatcttatttaaatatttattgagtgcctactatatttcaggcactgttctaggtactcaggatccaattgtgaacaaaacaatgataaaacactgtggaaccaccattctatgaaatagtagatcacaaaaatagtaaatacataaatagaagtaaaaataaagactactcataacttgtaaaatactagcctaggaaatagtctaggtggtactgacagcaaaattccagtggatgactgtaacccaaccagaaacatttttgtgactgcactcactgtttgccatttggttgctcatctatgatttcagtttactgaactctaactttctcgtctgatctgaattacaatgagggtattaaatcaaatctgtggttacctttgcatattttggaacttcaaacatttagattgtgattcactgtgtgcataattttttaaattgtctcaaatcaacaatctttctcttacttttctaggttttctctaatgaactaactttatagcatactttttgtgctgtagtctaacaaaccgatagctgagtttttttaaaaatgaatacaatatatgctttttctgcctcgcttttttcatctgtaaaatgggatctgtgggatacctaacacataaagtcattgtaagaattaaataaggtaatgtttannnnnnnnnnnnnnnnnnnnnnnnnnnnnnnnnnnnnnnnnnnnnnnnnnnnnnnnnnnnnnnnnnnnnnnnnnnnnnnnnnnnnnnnnnnnnnnnnnnntgaaagccacactgaagcgcggggggggggggcagccctcccaggtaggtatcagtgtcacagctgcccctgtagttgagtctttcaagtctgttaacccacccatacccccacacacaaaaaaaggtgttaaggtttggcttctcttattctcggtggctcctaaagagattcaaacctatttagtagcagttcgggcacaaaactaaatggaatcagtatcattcctcacaatccacagacgggggttaaagattaaaataaggtaaattttatagagatttatttttactatttcaggcttcctgggaatggtctcatttcgtaaagcccccagcatcctaaaggtaagcaccacagttcttgaaaaacaaggattatttattttgcacccatcgcctgaccccaagagatgagtgcttagagagtaatccatctttgtacgtttagatctctcaatcccatttctcatctggaccctctcgggagggtcttcaagcttttacttgcagatcaaactcacatcagaggcaaaaaaagagaaaaataggagtcctaataggattatagtttacaatgaggcaatgggacccatcggattaaaatttggaatttgctttcacaattttaaagtaagactacttttcttcacatttcattggccaaagtaaatcactcatccatgcctaaactcaaagaaaatggggaagtacaattttaccttttaccatgtgcctataaagacgcaagaaccaaggacattatggacagtcctaatgattaccacagagatctgtaattaaaaaaaaaaaaaagggcttagtcttggagtcttggaaacctggactctatttcaactatcacagaaaatgttaaatcatattcaccacctaattaaagaagtcctcattgaaatacccaagcagtaagtcatgagaaaggctttctgtgagtcacccagcttgattagcgtagtcagttcctcaggttgttcaaaagttattaaattgctcatcccacatttgagagcaccagctgcttttattcatagcccaacaaaaccttaatcctagtggcttcatgggattcaggacacctaactactgtgactcacaaaaaaccacctgttcktactgatcttgggagatatcagctgaggaaacctccatgacattccctggcagtaccgtcttaatggaggtttgtgatgcagcagaatgcataccattgggaagcaccagatccatcattaactacattacttccctgttctgcccttggcctcagttttcccacccacaaagagaaggacaagagttgggcaagatgattcctaagctctaatgggaaatgcctcctggtgggtggtatctaaaattcttgtcagcacctaggacagagatattcatagcactccagggatttcagagaggatggaaccttagcatggatagaagcatggatgctgttgaatgcatgtttggattaaaatcctcttttcatttagatcttgaagtttagttgaactttttatggagtttaagaccctttcaacattttgatattaaaaaaccgaaaatagaacctaactcctgtgccatttattccttgggagtatgaaccaaaaataaaaattatatagaaattgtatttcttgtcttcatgaagtttgctaggtaaat

SEQ ID NO: 40309 - DNA, 1273 bp, Homo sapiens
  misc_feature (1)...(1273): n = A,T,C or G
ctgttactgattctaaaacccaaatctcacgccaaaccaaatttctctctcaggactcaagctctcattctcagtttcctgctatttgcccaacattagtcatactgacatttgaaaaaccattatttgcaaaactaaactcttcacctttactccaaaaccttctctttttcattataatgcttttatttatggtgcaaccatcttcccacttaaaattttcaagtcactgttaacttagtctttccttttacctcaatcaataaatttatttctattgaacttcctaaacatttcyctttactctccactctcatagtgtcttaactggtctctggacctctcatttcttcctatttcaatctctcctgtacatttgctgccataatttcagcttctaaaagcactactctgatcacattatgtactttgcttacaaaaaccttccgtcagtatttctgggctgcaaaacaagagagccgaatcctatcccacccatagggctttcattcctttattcagtaaatatatattgagtgactactgtatgccaatcactgtgcaaggtgcttggattcagcagtaagataaagtcccaacccacatacaatttactttctagttgggaaggcaaacaataaacaatttaatcaatatacaatatcatttcaggtattgatacattctatgaataaagatgaacagaataaggatttaggaaacagttggtagggaagtagctttttttgttgttgttgattttcgtggggttttgttttgtctttatgagaaaatgactgttattattatacagtgtcccccagcgattatttttctgtaaattattggggaacaggtggtttttggctacataagtaagttctttcacggagagttgtgagattttggtgcacccatcacccaagcagtatacactgcaccctatttgtagtcttttatccttgtcctccttcccatcctttcaccttgagtctccaaagttcatggngacattcttatgcctttgcatcctcatagtttacctcccacctatgagtcagaacataggatgtttggttttccattcctgacttacttcacttacaacaatagtctccaatctcatctaggtgccttgcaaatcccattaattcattcctctttatggctgagtagtattccatcatgtatatatatataccacagtttctttatccactcattgattgatgggcatttgggttggttccacatttttgcaattgtgaattgc

SEQ ID NO: 40310 - DNA, 1273 bp, Homo sapiens
  misc_feature (1)...(1273): n = A,T,C or G
ctgttactgattctaaaacccaaatctcacgccaaaccaaatttctctctcaggactcaagctctcattctcagtttcctgctatttgcccaacattagtcatactgacatttgaaaaaccattatttgcaaaactaaactcttcacctttactccaaaaccttctctttttcattataatgcttttatttatggtgcaaccatcttcccacttaaaattttcaagtcactgttaacttagtctttccttttacctcaatcaataaatttatttctattgaacttcctaaacatttctctttactctccactctcatagtgtcttaactggtctctggacctctcatttcttcctatttcaatctctcctgtacatttgctgccataatttcagcttctaaaagcactactctgatcacattatgtactttgcttacaaaaaccttccgtcagtatttctgggctgcaaaacaagagagccgaatcctatcccacccatagggctttcattcctttattcagtaaatatatattgagtgactactgtatgccaatcactgtgcaaggtgcttggattcagcagtaagataaagtcccaacccacatacaatttactttctagttgggaaggcaaacaataaacaatttaatcaatatacaatatcatttcaggtattgatacattctatgaataaagatgaacagaataaggatttaggaaacagttggtagggaagtagctttttttgttgttgttgattttcgtggggttttgttttgtctttatgagaaaatgactgttattattatacagtgtcccccagcgattatttttctgtaaattattggggaacaggtggtttttggctacataagtaagttctttcacggagagttgtgagattttggtgcacccatcacccaagcagtatacactgcaccctatttgtagtcttttatccttgtcctccttcccatcctttcaccttgagtctccaaagttcatggngacattcttatgcctttgcatcctcakagtttacctcccacctatgagtcagaacataggatgtttggttttccattcctgacttacttcacttacaacaatagtctccaatctcatctaggtgccttgcaaatcccattaattcattcctctttatggctgagtagtattccatcatgtatatatatataccacagtttctttatccactcattgattgatgggcatttgggttggttccacatttttgcaattgtgaattgc

SEQ ID NO: 40311 - DNA, 1273 bp, Homo sapiens
  misc_feature (1)...(1273): n = A,T,C or G
ctgttactgattctaaaacccaaatctcacgccaaaccaaatttctctctcaggactcaagctctcattctcagtttcctgctatttgcccaacattagtcatactgacatttgaaaaaccattatttgcaaaactaaactcttcacctttactccaaaaccttctctttttcattataatgcttttatttatggtgcaaccatcttcccacttaaaattttcaagtcactgttaacttagtctttccttttacctcaatcaataaatttatttctattgaacttcctaaacatttctctttactctccactctcatagtgtcttaactggtctctggacctctcatttcttcctatttcaatctctcctgtacatttgctgccataatttcagcttctaaaagcactactctgatcacattatgtactttgcttacaaaaaccttccgtcagtatttctgggctgcaaaacaagagagccgaatcctatcccacccatagggctttcattcctttattcagtaaatatatattgagtgactactgtatgccaatcactgtgcaaggtgcttggattcagcagtaagataaagtcccaacccacatacaatttactttctagttgggaaggcaaacaataaacaatttaatcaatatacaatatcatttcaggtattgatacattctatgaataaagatgaacagaataaggatttaggaaacagttggtagggaagtagctttttttgttgttgttgattttcgtggggttttgttttgtctttatgagaaaatgactgttattattatacagtgtcccccagcgattatttttctgtaaattattggggaacaggtggtttttggctacataagtaagttctttcacggagagttgtgagattttggtgcacccatcacccaagcagtatacactgcaccctatttgtagtcttttatccttgtcctccttcccatcctttcaccttgagtctccaaagttcatggngacattcttatgcctttgcatcctcatagtttacctcccacctatgagtcagmacataggatgtttggttttccattcctgacttacttcacttacaacaatagtctccaatctcatctaggtgccttgcaaatcccattaattcattcctctttatggctgagtagtattccatcatgtatatatatataccacagtttctttatccactcattgattgatgggcatttgggttggttccacatttttgcaattgtgaattgc

SEQ ID NO: 40312 - DNA, 1080 bp, Homo sapiens
cctcccacctcagcctcccaaagtgtgtctggcatcatcctacttttgattcatgcatctaatgattcaggatactgtggattatattttaagttggtcctaatggactaaaatttgcaaactagtggtcaaaatccagtgcacctacctgacccccaaactataaatgagaaagtaaaatacagggattactaaggtagttgggaggatgatgtggcatcagatgacagtgatagatgtcctcctctggtgaggagcccttatctggatattccctccctttccccaccaagtccaggtttcccagaaaacacttggaaaagcgagcaggggattatttaatcattaagatgctttcctccttcaagagcatcccaatggcagttttataatctatgtctgtgctcgaaacacatcttattgctagttccttcttcatcaatatttgaatgctgttttaatttagccttgtacagctggtagcctttggtacagtgccttctacaatgggtactcaatacatgttttcaattgggttgaaataattcctatgccaaaaatggattttcaggaatgggctacaaattcttaccactaggaattaaaatctagtgaggtgggcaaagtgaacacattggatcagaatgaaaggcagaggcagataagtgctaagaaaaatgctacagaggctgaaagtggggagggattctatttagytgggaaaggtgggagcccctcaagaagtgttccaaaaaaaagatggtgtttgagatggtctttgaaggaagagtaaggtttcaacaagagaaatttctggagaaacacatcctagaaggagggtccaaaatgtggaaggcagccaagtcagaaaatgaatgaggcaaactatttgccttttgtttcatggaacgagaattatcaaagtttgcagaacaggatgaaacaggtggctgaattgggagtctggagctaagtggaggagaggcttgtaggccagagtctgcatttagttcagtagaaaatggggagccattgaagatttctggacaggataaaagggtcatcagagttgcccttctg

SEQ ID NO: 40313 - DNA, 1080 bp, Homo sapiens
cctcccacctcagcctcccaaagtgtgtctggcatcatcctacttttgattcatgcatctaatgattcaggatactgtggattatattttaagttggtcctaatggactaaaatttgcaaactagtggtcaaaatccagtgcacctacctgacccccaaactataaatgagaaagtaaaatacagggattactaaggtagttgggaggatgatgtggcatcagatgacagtgatagatgtcctcctctggtgaggagcccttatctggatattccctccctttccccaccaagtccaggtttcccagaaaacacttggaaaagcgagcaggggattatttaatcattaagatgctttcctccttcaagagcatcccaatggcagttttataatctatgtctgtgctcgaaacacatcttattgctagttccttcttcatcaatatttgaatgctgttttaatttagccttgtacagctggtagcctttggtacagtgccttctacaatgggtactcaatacatgttttcaattgggttgaaataattcctatgccaaaaatggattttcaggaatgggctacaaattcttaccactaggaattaaaatctagtgaggtgggcaaagtgaacacattggatcagaatgaaaggcagaggcagataagtgctaagaaaaatgctacagaggctgaaagtggggagggattctatttagttgggaaaggtgggagcccctcaagaagtgttccaaaaaaaagatggtgtttgagatggtctttgaaggaagagtaaggtttcaacaagagaaatttctggagaaacacatcctagaaggagggtccaaaatgtggaaggcagccaagtcagaaaatgaatgaggcaaactatttgccttttgtttcatggaacgagaattatcaaagtttgcagaacaggatgaaacaggtggctgaattgggagtctggagctaagtggaggagaggcttgtaggscagagtctgcatttagttcagtagaaaatggggagccattgaagatttctggacaggataaaagggtcatcagagttgcccttctg

SEQ ID NO: 40314 - DNA, 546 bp, Homo sapiens
aaggcctccaggaaggctgccctgtggccacacccatcctcctttcctctctgctgactccacatttccaaaattcagtgcaaaaaaagccctgctgagcatcacatgctggactcttcccctgccacaccgctcagtgccttctgttctcttgagactccctctgagtagctgagtgaatccaaagccataattgaccctgaacgtaggaggaggaaaaggcraagctgacctaagaagtgggaccctggccgggcgaggtggctcaagtctgtaatcccagcgctttgggaggccgaggcgggtggatcacgaggtcaagagatcaagaccatcctggccaacatgatgaaaccccgtctctactaaaaacacaaaaattagctgggcgtggtggcacacgcctgtagtcccagctacccgggaggctgaggcaggagaatcgcttgaacccaggaggcggagattgcagtgagccgagattgcaccgctgcactccagcctggcgacagagcgagactctgtctcaaaaaaaaaacaaagaaa

SEQ ID NO: 40315 - DNA, 517 bp, Homo sapiens
ctcccaggctggagtgcaatggcaggatctctgctcactgcaacctccacctcccaggctcaggmgattctcctgcctcagcctcccgagtagctgggattataggcacccaccaacatgctcagctaatttttgtatttttagtagagacggggcttcactgtattggccaggctggtctcaaactcctgaacttaggtgacccgcccacctctgcctcccaatgtgctgggattacaggtgtgagccaccgcgcccaccctaagaccacttctgagtacaaatttctagatagaatctgattggcccatcttgggtcaggtggcacccagtcagccaatggtgtggggtcaactttactaagctgccttccaaggagttctcaggggttctcagaggagcaggtgtgggctgggtggctccccaaagactgtcctctacactctgccaacagaggaaatctgattaggtggttaagccccccaagcaacatggtgcctccctatgtggcagctgt

SEQ ID NO: 40316 - DNA, 517 bp, Homo sapiens
ctcccaggctggagtgcaatggcaggatctctgctcactgcaacctccacctcccaggctcaggagattctcctgcctcagcctcccgagtagctgggattataggcacccaccaacatgctcagctaatttttgtatttttagtagagacggggcttcactgtattggccaggctggtctcaaactcctgaacttaggtgacccgcccacctckgcctcccaatgtgctgggattacaggtgtgagccaccgcgcccaccctaagaccacttctgagtacaaatttctagatagaatctgattggcccatcttgggtcaggtggcacccagtcagccaatggtgtggggtcaactttactaagctgccttccaaggagttctcaggggttctcagaggagcaggtgtgggctgggtggctccccaaagactgtcctctacactctgccaacagaggaaatctgattaggtggttaagccccccaagcaacatggtgcctccctatgtggcagctgt

SEQ ID NO: 40317 - DNA, 579 bp, Homo sapiens
ctgtggtgctgggcaggctgatgatggtggcctcgcccagcaggttgcagatacgttgttgcatgggggtcagcagcactggggctacagatgggccaccgccrccactgccaccgcatgtcccaggccccccagctccgtcctcctcagtgggccccggcgcctcaccaccctccacggcggcccggacatgggcaaccttgcgacggacctcggtcttgaggtcagaccacttcttcttgacctcaggcagctctctgcggcaggtggccacggcgttgacccttctcaggatgccgtgccaggccgcactcttggcggccaggggtaccccggcgttgaagtggttcaccagcaggtgcttcttcagctccagctcctccacgatgatctccacctcccgctctgagaagttcatcttccttttcttggctgggacggccatggcctctcccctcccctctttttaaagaaattataatcccctcaagcgccccaattccccttctcttcttcctcagcctcgcccctcacccaccccctacaggggataggccaggcttgctcgaggccaagcac

SEQ ID NO: 40318 - DNA, 596 bp, Homo sapiens
cggcccctccgctaagctcaaccctgcctccctcaggtgcctcggtctcccccaggactgaaggaagtggtggagcaaggcccacaagggcgagtgtccccgaagctgccttagtttccccatctgtaaaacgggactggtgacctgcagstctcacggggctgggaaccggctcgcgggtgctcgccctgcatccgagacagcacctacaactccggacccgctcggggcggaatgggtgggctctttgttcccttccgagaccccatctcgattccccttcccgggagggcagccctgaaaatgcaaggttgctccagcagccccctcgggtcacctgcttccccgaagccgtcctcctcgccttccgctcccgcctccaccggcatccccaggtctccgttggggcccgacattgcgggctcgggcgcccgaagggccgcgcgacgatggaacgcggcgaccgtcgcgccgaaagccggcgccggatggaaggtggaggcggcggatagaacacgggccggaagggtagaacgcggcagcagatctccgcccagaggccggtgccccgcccctgaagccggaatcccgcagct

SEQ ID NO: 40319 - DNA, 661 bp, Homo sapiens
ggatgctatgttctgtatatgactgttaggtccatttagtggaaagtatagttcaagcccagtgtttcctcttgattttctgtctggacggtcagtccattattgagagtggggtactgaagttccctactgctgttgtactcctgtcaatttttcccttcagggttgctaacattcactttatatatttaggtgctcaatggtgggcatacatttttatatgctgtatatctgggaatgtttgaatttctccctcatttttgcatctgttgaaagccttcgactttctgctttatttcttcccctgatccttgtcctggtaccccctgcagctctgacatatggcagcagtcagtactgcccccagggtctccatcctgatatcccaagcaggctgcccttcgcatcaacactccaagatgcgtgggacagaaaccagttccacaggcagcccgcagacaagccagaaccctgtaaacatgttkcggtctttcccttgtgtccccagggaggtaccaggagtagggtggcctcctcctgaccgtgctgggaaggaggtggggcagaggtgagccaaatgccacaacatttcctgctgctttgagtgtggttttgtcctcattgggagttggcgtgattgctgcagatccttaaccagttc

SEQ ID NO: 40320 - DNA, 1021 bp, Homo sapiens
aaaatcccatcaggagccatttttgaccatgcttattccatatgctccagaaagcattgtcagggttggccaatatctcaaatctaaaactggcttctgggggaaccaactgccttatacagcctgctgagtgtcttctaatgctcattgctggggcttcccccaatggaaggtggtagacttgcaagtgactgtgtaaacaggctgaagtaaaatggaaaggggtggaatgtgttgttgccagaacatgtagagacttaacagatgttgagtctggcaaatgtctgggttgggctgagctgtaaaagctaatgtttaactgtgttagaaatttgttggccattggaagaccagactatgcccaagaatttcactgaggttggcagacctaggattttgtgtagagttattgcttgcccctgttcttggagatggtgcatgcaaatcctctttgactgcctcctcagagggccctcatatcaggaaaccacctatgtagtgccattagaagccttatggggaactgtgtcagggtcctgaagtacaaattgtaagcaatggctgaactatttagatagcctatgggctcaatcctgccacaaaaatagggacacaggaagagacatgtccacctgagtcattagggcaggtttgctggcctcaaccctggttgtggatgctgaaacagccctgagacttggctctagcccctcccagcagtggtcagagaagagtcctgccagcagcacagggacccaaaggaagaaayatttgccaggacatgcttgctgaccccaggcctacagcagatcctgaaatggttctgagtctcagctcagcccctctcagtagtggtctgtgatcagtcctgccagcagcacagggacacagaggactacatgcagcctgagtcctctgggcaggcctgctgacattggtcccagctatagaccctaaaatagccctgaaactcagttccagatcctctcagatacagattaaggcaatactgcctgcctag

SEQ ID NO: 40321 - DNA, 594 bp, Homo sapiens
cccctccgccttcataaagtaatcaaaaaaaactttcttaaattataggctatgccatagagctcatgcttcaatggcctaacaatctcatttggtctatggtaaattaattttattaataagaaacaatttggggaaaaattgaaagatgtctaatcaatttcttagaccactttggtcaaaaatgaataaatatctcatttcagataattataaagaaaattttaccaaagtttccaaaaaggcatctttaggatcaattgtctttrcagagaatcagtgctgggattattgttaagaggaaaaaagaaggttgcagatgtattttaacctccttttttgttacctgagaatgtcttttacctttatccctggtccattaaaactagatctgagatccaccttgatttcatacaatgtggatcaatatacagaacttggattggagggaagaaataactctatgatttaaatctatgcttcaacttctttatttccacatttatgaaaaatgtgtctacaggactatagacactactgggaggcagcacagaatatgagacagacctggaacatggggtcagacagatttga

SEQ ID NO: 40322 - DNA, 564 bp, Homo sapiens
tagagagtaaagctgtggagcagggaggttgtttgtactcctataaataagataatcctgtgccaaacatggggaaaagattgatttttaatcaccagccagttagctggagagttatttcacttatagtttttggagacatttatattgtgaaccaattcccaagttttccaggctacggcacacctttcctggaggcaaagacacaaagtttctaagagtttagttcctgggcctttagagagtctatgggtrgcctctatccatacctagcttgattcttgtcctaaagcaagaccagtctagcagtatagataaagaatacagccatttttcccctatctactgtctcttaggcaggataatttcacagctttgttggagaaatatgaatcaaagcaaaggcacatgtttgaaatcaccgaactacagtatatagggcctcagctctcctactcgatgccaagcgtcccagactctgaagtggaaaaacagtctgacttcctttgtagctcttccccaacagaagtctttttttttttttaaaagggtcttgctctgtca

SEQ ID NO: 40323 - DNA, 564 bp, Homo sapiens
tagagagtaaagctgtggagcagggaggttgtttgtactcctataaataagataatcctgtgccaaacatggggaaaagattgatttttaatcaccagccagttagctggagagttatttcacttatagtttttggagacatttatattgtgaaccaattcccaagttttccaggctacggcacacctttcctggaggcaaagacacaaagtttctaagagtttagttcctgggcctttagagagtctatgggtagcctctatccatacctagcttgattcttgtcctaaagcaagaccagtctagcagtatagataaagaatacagccatttttcccctatctactgtctcttaggcaggataatttcacagctttgttggagaaatatgaatcaaagcaaaggcacatgtttgaaatcaccgaactacagtatatagggcctcagctctcctactcgatgccaagcgtcccagactctgaagtggaaaaacagtctgacttcctttgtagctcttccccaacagaagtctttttttttttttwaaagggtcttgctctgtca

SEQ ID NO: 40324 - DNA, 1036 bp, Homo sapiens
gcataatcctgaaagggcatccaaactatgtaaaaatagttaaatgtaagcgctgcgatagatgggaaatactgctcaacatatctgtttatatcatttgatttttgatccatctagtwtgttatctatttttcaagtaaattttaaaaatcatttctggaaaccgagagcatggttactaccagcaatactcctggaatcacagggctttgcaaactggttttctgtagtcagaagttaattatttgcatgtgctctttgtactcttatagtattacaggtatccccagtgcctaactctgctgtctgctatatttcagcctttcatccgctgtagtttacaatgcagggatctggttgatgaagcaaagaagtttcatctgaggcctgaacttcggagtcagatgcagggacccaggacaagggctcgcctaggtaagctggtatctcggcagaatgaggggatgcttttcaactacttcttgcaggtgacaacatagttgaaaataatactctataagaagtacagacacctcgtttcagaccttttcttctatcatctcagacaagtcactttaccactctaagctttctttcctataaatcaaggatgtcttctctatctacttcacataattatttggaaattaaatgagataaaatataaaagcactttatacattgtcaggcattacataatatgttacaattttttgtcaatattatttagattctgtgaattagagataattttagtgccacataatggcaggtaagtagtatatgcttccacccacctcttcacttccccttatgtggtttttccattccggaatgaagagaggaagaaaaggagcccagtgtggtagaaagtacatgggttttggcagttactgttggtgcaggtaccagtttacctcgtactagatttattaacttgggcaggaaccttaacctctgtgtgcttcagttgcctcatctgtaaatggaatcatcgtagcacctgcctgtaacattgttatgaagagtaaataaa

SEQ ID NO: 40325 - DNA, 880 bp, Homo sapiens
cattcttccgcctcagcytcccgagtagctgggactacaggcgcccgccaccacgcccggctaatattttgtatttttagtagagacggggtttcaccgtgttagccaggatggtctcgatctcctgacctcgtgatccgcccgcctcggccttccaaagtactgggattaggggcgtgagccaccgcgcccggccgattggaagcttttaagaactccttctcctattttgagaattcagaaatttatttatagctttcgtaaaatagagtgaagactcttacagacctatgttagactagcaggcgctcagtctctgtggtccgagatagagcacgaagatgacagtgtatatgcattttggtgctgaagtggacctggagtgtggacagaggagttactaagaagaatcccggagaccaggatgtaaactctcaattctaatcaacacaggtgtgggctatggttctgagacaccattcatctcacacgaggtacggcgatacgcgacaccacccagtacaacagctctctctccacctggaacccggacccagcttgattcgcgggtgccggatgatgacgtatccttgcacctggcgatgattggttcgcgtggagaggcgtcgtccgacaacgcgactcggaacccggacctatgttctcgcgagagttagcggcctccggtgtgggatggccgcggagccgggcggagctggcttgcggctcccggggccggctctccggccggagacatggcccgggggcccggcccgctaggcaggcctcgccccgatacggtcgccatgcccaagagaggaaagcgactcaagttccgggcccacgacgcctgctccggccgaggtgggcgaggggggca

SEQ ID NO: 40326 - DNA, 509 bp, Homo sapiens
tctacacctgacaggtgcaaattatttcattagttcaagaaatagtcactcattcccttctgaagcccaaattctttttgaaaatataaaaagaaatatttcagaaatccctgcccttaagaagctcacaacctagttggggtacttggaaagcaatgtcaatgcagtatgataattactatgagagaggaaatygtgctgtggtaatttttcaacataccttttacttttacttattccctttgcctgagcttgtaattacatatttattagtacaattatcagtttaattactttctcccctgctaaaatctaagcttcatgagagaaggcactaaattttttctttcagcgattatctccagaactcagagagtatctaaaatacgtaataaatatttgttgagtaaaggcaaacaattgattaagacaggtacttttgccaaggaaaacacatgtggggtaaggattttccaagaagacatgtagtatacaaaaagactggaaat

SEQ ID NO: 40327 - DNA, 1197 bp, Homo sapiens
tgcatttaataatttaaaaatattctgctaaacaatattctgctcaatggggagatttttaaaagaaaattataaaagaaagcaatgttgagagaaaaacttatggcaaccagaactctaccaatggcaagaggtagttaagtgagtaaggrtatttgaagctatttctgtattaaaataaaagaagaatatatgcaattgtgcctaaatttcagcagtgattaattctgggtggtgaagacatgggttattgctattttcttttttgggttgttctgtattttttaaatttcaaaaagtgaaagatcaagagagaaaggaatgaagaaagggaggaaaggagaaagaaaagaaaagaggaagaaaggaaggaaaacaaaaggaaggaaaggatcatcctgatgatactttgaataacaccttagaaaaggtaggataattgagacaagacagaaggctagtaaaacaataaaggtgagactagattaagaaaaagaaagagaaagagagagagaagaggaagaaaaggaagaagtggaggagttcatgagggagaaaagaaaagaagggaaagatagagaaacaaaagatccaaaaacctgtgtggacgcactggaaatgaggatggggagaagttatcaaataggtagacttaaaagaattcgatgactgtttggatggcagtgtaaagagaataaagacatttttaacttcgctgttgttccatgtgtagtcgtcattaattaggcatctcaggaagactaaaagagttgccatttatgaagaagatagaataacagcaaggtgagtgttcaacttgctgagtttgaagtacctgtgagatggccaggtggacttgtctaggaagcctttggaggtaaagatctgaaggtaatgaacaactaagttgtcattatgaatgtggaaattatcaaaggaagtagtagctaaagaattaactctgaataagattttccagaaagtctgtttagagaagtggttcctaaattcaatgtgataaatacctttggagtaatattaatatggttttgctctgtgtccccacacaaatgtcatcttggcttgaaatctccatatgtcaaggtagggacccagtgggaggtgactggatcatgggggcagtttcccccatactgttctcatgatagtgagggagttcttacaagatctgatgca

SEQ ID NO: 40328 - DNA, 577 bp, Homo sapiens
atgagtggtggcattttaaatttgatgaagccctcagatgacccctccctcatagggctggtgtgagggttcagtgagttagtgtgttgggcgattagaatgcagccagtgaaggcctatgatggtacccagtgctggtagtagtagtattgactccatcatcactccaactcagatctgggactcccagccctctcctcaccctggcccccacccctgaggaccctttgccctggttctaccctgcctctgggccttgacctgtgccctcttcttccacagctgtgattgtgggcggggtggtgggygccctctttgctgccttcttggtcacactgctcatctatcgtatgaagaaaaaggatgagggcagctacacgctggaggaacccaagcaggcgagcgtcacataccagaagcctgacaagcaggaggagttctatgcctagtggagccacagtgcctccctgcagcctcaacaccaccctgctgtccagtccccagcctggccccaccagcccaagcctgggactgggcctggaacctggccccagttcttctctgccctctctcccaa

SEQ ID NO: 40329 - DNA, 764 bp, Homo sapiens
gtttattgaaagctttctgtgcagagttaagtgctgtacatgtaatttctatttctcttattatgatagttgtacaacttcttgttttatgaaatagaatttcataattgagaggaaatcgattgaggaaatacaatttgtgtgcccagggtcacacaaatacaaagttgttaagatttgaacataagcctctgtcttgacaacttttcttctgaccatattgtgatgtcttgacttaaagaaaatctgagatcttgtgtttcttctgccgttaactagcttacaactagggcaagttggatggcttctctaaatgcatatatttttgttataaaatggacataataatcattaacttttcagttttctgtcattccctacaggttctgtcaaaccctactaagaagtttttagcattagtttttaattagcagccattgttttagttcctttttwttgggtgccagtttctgattttaagtatttgaggaaaatatgatttttttggtaaactgccttgtcatagtaattaaaatgagaggttctttttaaactttgctgttggccttttgggcccttgtattttatcagaaagtatatgttgcgttctagtcaagctgactgttctaggatagtttttataaattcagtcattttgtgatttattagactttaaaatgttacttgtgaaactgtatattttgtttccataaaatcatggatttgacagctattgatgaaatgaaaatatatgaattttggca

SEQ ID NO: 40330 - DNA, 604 bp, Homo sapiens
tagggctggccatctctctaggactctccacccctgagatcctgcgtaaacatcaatagtcacctactctgggccagggcccatgtgacagacagaacacagccgagatgctccctggctgggaggaaaatggaaagcacccagtctcaccaagtcctgggctcaagctgcaaataacaaggcctctctggagttccaggagtggaagggcctgaagagtcatcatgcaggatggactgcaggctgctcaacagctctggagaaccagcccccagaaactcagcaccacggaccctagaatgtgcttcctctcatctggcttaagtcctgctggctccaactgggagtccggcccwtggtctccttctaagggtacccccacccccagagttctccttcaggccatccatgattattcaaacttagttccccctctctccaaaagaaaaccctgctcctcacccccaagcagtagttcttcagtaagacccagagagggacagaaaaagaacaaaaaccaaggcaggtgaatggaaaaaaaacaagatttgcaggagcagcccgctccttatttactttagtactttatttactttattacttt

SEQ ID NO: 40331 - DNA, 848 bp, Homo sapiens
tcgaagtcttcttacagacctacaggacacataggctggtggagtgagtcctgagaacaactgaaattccattgagaggcaactgttccagtttatatataaagaagctgcatccattaacaaagttttaggtgtatatgggaattcaaattcctcagctttatgtttcttctctaatgtgctcatgccacgccccattcttccattctttcccaaccaggaccttttcttagaataaagatctagtagaattgtacattgcattagttttgttctgtaattctaccgtgattacaatcaggccctgtgcttgactctacgtctataggacgtaagaaactctgttataattgccttttaaaaacaaatttcctgtcgggctcagtggctcacgcctgtaatcccagcactttgggacgctgaggcgggcagatcacgaggtcaggagatcgagtccatcctggctaacacggtgaaaccccttctctactaaaaatacaaaacattagctgggtgtggtggcgggcgcctgtagtcccagctactcgggaggctgaggcaggagaatggcgtgaacccgggagatggagcttgcagtaagcccagatcgcgccactgaactccagcctgggagatgcgagactccatctcaaataaataaacaaataaataaatataaatataaataaataaataaataaacaaatttccatctgaacattgcaattggcatccacgacaatcagcattttgtttcctcattactctctaggaccctcagaggagctatccctgtttcaaactttgtaagcactrttgttactatatagacacttggtcacaaaagc

SEQ ID NO: 40332 - DNA, 808 bp, Homo sapiens
ccctggttctcagactacagagggagaagatatattttcctggccttcatcagaccacctctcaggatacttgaggtttcttttctttttttaaaaaaaattttagttttgatttgatagttccaagtttttggaagaatttgcttaaaggtttggaggtttttttttttttttggtggggggtatttaacattttccttaggatttaatactcaaaattttttcagaatcctctttcaaatcaagaagcaccttaggtctttgtgaatatgttcctgatttgcaattactagctggaggatgatattaaaataaagaaggctaaagatagttcgctaactagtagatgtagaagggatgatagagttagaatattactattttgaaaccatcattagtaattcagaaaaaaattrtgaatgcatgctaaaactagtagatgaagttgaatgaggaacaggatatattcatagccttaaggtatcttcttacaaactacttactaattgtggaggaaaaaataatagttttataatagaaaaagttgacaggcaccatctcataccaagtgatccaagttatcgttgccagcatctcttatctctcttgatgtgatatgctgagaagaacacatcatttctgtgataattgtaccaaaggatgcataaccccaaataggggagattctatgaaagaatctctaaaaaaatgtcaaggtcatggaaaacaaaggaaggctgaagaactactccaaaataaaggagaccgaaaatgtatgataatgaaatggaaagtgtgagtctggatt

SEQ ID NO: 40333 - DNA, 808 bp, Homo sapiens
ccctggttctcagactacagagggagaagatatattttcctggccttcatcagaccacctctcaggatacttgaggtttcttttctttttttaaaaaaaattttagttttgatttgatagttccaagtttttggaagaatttgcttaaaggtttggaggtttttttttttttttggtggggggtatttaacattttccttaggatttaatactcaaaattttttcagaatcctctttcaaatcaagaagcaccttaggtctttgtgaatatgttcctgatttgcaattactagctggaggatgatattaaaataaagaaggctaaagatagttcgctaactagtagatgtagaagggatgatagagttagaatattactattttgaaaccatcattagtaattcagaaaaaaattgtgaatgcatgctaaaactagtagaygaagttgaatgaggaacaggatatattcatagccttaaggtatcttcttacaaactacttactaattgtggaggaaaaaataatagttttataatagaaaaagttgacaggcaccatctcataccaagtgatccaagttatcgttgccagcatctcttatctctcttgatgtgatatgctgagaagaacacatcatttctgtgataattgtaccaaaggatgcataaccccaaataggggagattctatgaaagaatctctaaaaaaatgtcaaggtcatggaaaacaaaggaaggctgaagaactactccaaaataaaggagaccgaaaatgtatgataatgaaatggaaagtgtgagtctggatt

SEQ ID NO: 40334 - DNA, 808 bp, Homo sapiens
ccctggttctcagactacagagggagaagatatattttcctggccttcatcagaccacctctcaggatacttgaggtttcttttctttttttaaaaaaaattttagttttgatttgatagttccaagtttttggaagaatttgcttaaaggtttggaggtttttttttttttttggtggggggtatttaacattttccttaggatttaatactcaaaattttttcagaatcctctttcaaatcaagaagcaccttaggtctttgtgaatatgttcctgatttgcaattactagctggaggatgatattaaaataaagaaggctaaagatagttcgctaactagtagatgtagaagggatgatagagttagaatattactattttgaaaccatcattagtaattcagaaaaaaattgtgaatgcatgctaaaactagtagatgaagttgaatgaggaacaggatatattcatagccttaaggtatcttcttacaaactacttactaattgtggaggaaaaaataatagttttataatagaaaaagttgacaggcaccatctcataccaagtgatccaagttatcgttgccagcatctcttatctctcttgatgtgatatgctgagaagaacacatcatttctgtgataattgtaccaaaggatgcataaccccaaataggggagattctatgaaagaatctctaaaaaaatgtcaaggtcatggaaaacaaaggaaggctgaagaactactccaaaataaaggagaccgaaaatgtatgataatgaaatrgaaagtgtgagtctggatt

SEQ ID NO: 40335 - DNA, 563 bp, Homo sapiens
  misc_feature (1)...(563): n = A,T,C or G
tnnnnnnnnnnnnnnnnnnnnnnnnnnnnnnnnnnnnnnnnnnnnnnnnnnnnnnnnnnnnnnnnnnnnnnnnnnnnnnnnnnnnnnnnnnnnnnnnnnnntgtttattttgtatttctttgattattagtgaagttgtacttgtaccgtttttgkttttttgtttgtttgtttgtttgttttttttgtgatggagtctcattctgtctcccaggctggagtgcagtggcataatctcagctcactgcaacctccgcctcccggattcaatctaggtgcgtgcctcagactcccaacttgctgggattaaaggtacgtgccaccacactctgctaatttagtagagatggagtttcaccacgttggccaggatggtcttgaactcctgacctcaagtgatcatcccagcctctggctcactagtgcatcctcagctctccactatgacaagctcaggaggcacagtgatgtcacttcctgcatatgtaagttgcataactgacaaataaaaattgcatatataaatgtatatgcgtgtatttatttatatattataaatatat

SEQ ID NO: 40336 - DNA, 563 bp, Homo sapiens
  misc_feature (1)...(563): n = A,T,C or G
tnnnnnnnnnnnnnnnnnnnnnnnnnnnnnnnnnnnnnnnnnnnnnnnnnnnnnnnnnnnnnnnnnnnnnnnnnnnnnnnnnnnnnnnnnnnnnnnnnnnntgtttattttgtatttctttgattattagtgaagttgtacttgtaccgtttttgtttttttktttgtttgtttgtttgttttttttgtgatggagtctcattctgtctcccaggctggagtgcagtggcataatctcagctcactgcaacctccgcctcccggattcaatctaggtgcgtgcctcagactcccaacttgctgggattaaaggtacgtgccaccacactctgctaatttagtagagatggagtttcaccacgttggccaggatggtcttgaactcctgacctcaagtgatcatcccagcctctggctcactagtgcatcctcagctctccactatgacaagctcaggaggcacagtgatgtcacttcctgcatatgtaagttgcataactgacaaataaaaattgcatatataaatgtatatgcgtgtatttatttatatattataaatatat

SEQ ID NO: 40337 - DNA, 901 bp, Homo sapiens
taaaactgtgttaaatacacttaaactctataattctataagacccattttaggtttatacactgagcatccagttcctcaccgtcctctcataggttaaccctgtgtaatacaagttctgctcccataattctatgaacaaaacagcccttgatatataggtttgattttttaaatacattttctttactttattctaaatgtaacataaggtcaacatagaaaactgaaaagcataaggaaagtgaaatatctgtaatcttatcaaccattgttaattttgctgtattcctagtttctttttatacatatcaatatggtacttttgttttaataaaagactgccaaaaggcacatgccartttggactctgctttttcccctacaatgatatcatagtttctcatatttggtattcttttgcaatatttgctgcatagaattccatcacacaaaggtaactgccagaaattctttattacttttgctagacacttagggtttacattttttcaaaaattaatcacatcagagttttgatcacatcagagctttgatcacagctctgatgatttctctgggaactgagagcctaacacaagtcatgtccactttaagacttttaacatactgaaaagttatgttacagagtgctggtccccctgcaacacgttcactcacattggctgacgttttaattctttgccaatctgaggggaagaaatgtcaactctttgtttgctcttttaatgtcagtcatgtccttttccttttaccggtcattccggtttactcacaatcctacaaatcaatcctgctcattcttaattttccagtattgttcctcagattgtttcaccagaaaagttctcccccttatccactcttcacctaacaattt

SEQ ID NO: 40338 - DNA, 549 bp, Homo sapiens
cacaaaaaatcctatgccatatgaggggaaggagggaaatatgctgccccctataaatggagcctggctcacccgcagggcttcaggtggcagatggctcatgctggggtgtgagcgaacagagtgggcaacactggcttcttgtyaggagatctgggttcaagtcccagctcttgctcaggtttgctgtgtggccttaagcaagttgtctgcctgctctgggcctgttttctttgaagtgagggggttggcccaggtgtcccttccagccaagcaagctgagaatgtggggccgcaccagtcaaggcggcccctggacacttctgggagagtctcctttgccctcaggtggtcgggaacctcctgtactaccgcttcctgaacccagctgtggtggctcctgacgccttcgacattgtggccatggcagctggtggagccctggctgccccccagcgccatgccctgggggctgtggctcagctcctacagcacgctgcggctggcaaggccttctctgggcagagccagcacctacgggtcctgaat

SEQ ID NO: 40339 - DNA, 293 bp, Homo sapiens
accctctaggcacccagggcttattttgtgggggtggcacagcccccccccacaagggtatgctctgtgggtaacagcccttccatcggtgctaagggttggggacacagggtagttctgcaggccagtgtgggaaaacttcctggaagaggggcatgtggagcagctgatttaaygtgaccccatcggtgcatgtgtgtgtgtgtatgtgtgtgtgcgcatgtgtgtgtgtatgcctgtctccctctcattcctcaccacacctcaggtgagagcatcgctgcagatgggca

SEQ ID NO: 40340 - DNA, 938 bp, Homo sapiens
aaatcttacgattgctaggggcctggcagttctaaaaactgacttcgtggtcaagtagctttggagtcactgactgtctccagacgtccatttttgcacatgagaaatgaggatataatactacagaagaggcatcttacccaaccaatgcaccttacttctctgtgaaacacaggggatgctgggcgcaggcctaggctgtggcctgtagcctgtaggacagctcctgccagcagccacaggaacagtgatgtgatgtaacatttcccaagtacttagctcatgccccaccctattctaggtgcttagctcaggccccaccctattctaggtgcttagctcakgccccaccctattctaggtgcttagctcatgccccaccctattctaggtgcttagctcatgccccaccctattctaggtgcttcacaagtgtattctcctctaatcctcacaacaaatatatgaggtgctattatcccctttcgcaaatgaggaaaataaggcacaaagcttcagtaatctgaattcccaggtcacataactagtatgtagagaagctgggaatcaaacccaggcagtgagcactttctagaatgctgtgcagttccacttccccagctaagcccttgcttacccagagtccattgtgatttaatatcaagtgtgtctatgcccgttgtatgtgttattgtaattcataatgtaattaaatactatacacattgatgaacaggccaggtgagatggctcacccttgtaatcctagcactttgcgaggccaaggtgggaggattgcttgagcccaggagtttgagaccaccctgggcaacatagtgagaccccatgtcaatgtaaaagaaaatttatctttaaaaaaaaataaattgatgaactgagagtgggaaaagcagcactgtttctataaaaactaagtt

SEQ ID NO: 40341 - DNA, 1007 bp, Homo sapiens
tgcatggcaaacagtcttcccagcacccggtgggcactggctgctcctgcccaatggtccccactccagccccagaacagtcctcccaagcaccccaatgyctggagctggtctccgcacctctaatctggccccatcaagaacctcctccctctgaaaggtcagagagaggccctaagcatctggttgtgccactcctctcccaactctgaccctagggaatgatatccagacacagtgggggagatgggggttatgatggcagggaggtgggaggatctgggaaaagtaggaaatttcccatcatctcaggcttaggaaagtgcagggacaggtatgaaggcagatgctgagagggcagggaagatgggggataaacagtgggcctggaatgggagtgcacagccagtggaataaacctgatctctaggaagtcctgcctgtagtctaaccttcaattctcttgctgcatcattggcctattccatggcatacctggatctccatgctcttctaagtttagcccaacccttaaagatgatgtagctctgagtcttctctcctgggagcacattgccctcgtgcctgacttggctttactagggatccagggtcagccctatccttctctgagcctcagtctccatttctcaatgtcacaacacatcctttttatgagagtgtaagtgcttcgagatctttggaggaatattctgggttctagagcttctgatagccaggggtaggaaggggtagcccctcccatttattctccccccccttagtccaccctccggcccaaggctttcacaaaaggtagggtgggggaagggaggggctggatagaagccacactggcagagacaggggctttgtcccaactgatttctgagccaagatttcccgtgggaaagcccctgccaggcagaaaggagaggctgggaagaagaagggaggaggcatacaaggaagggggatggagaatgttggggagtaaagagaggagt

SEQ ID NO: 40342 - DNA, 1007 bp, Homo sapiens
tgcatggcaaacagtcttcccagcacccggtgggcactggctgctcctgcccaatggtccccactccagccccagaacagtcctcccaagcaccccaatgcctggagctggtctccgcacctctaatctggccccatcaagaacctcctccctctgaaaggtcagagagaggccctaagcatctggttgtgccactcctctcccaactctgaccctagggaatgatatccagacacagtgggggagatgggggttatgatggcagggaggtgggaggatctgggaaaagtaggaaatttcccatcatctcaggcttaggaaagtgcagggacaggtatgaaggcagatgctgagagggcagggaagatgggggataaacagtgggcctggaatgggagtgcacagccagtggaataaacctgatctctaggaagtcctgcctgtagtctaaccttcaattctcttgctgcatcattggcctattccatggcatacctggatctccatgctcttctaagtttagcccaacccttaaagatgatgtagctctgagtcttctctcctgggagcacattgccctcgtgcctgacttggctttactagggatccagggtcagccctatccttctctgagcctcagtctccatttctcaatgtcacaacacatcctttttatgagagtgtaagtgcttcgagatctttggaggaatattctgggttctagagcttctgatagccaggggtaggaaggggtagcccctcccatttattctccccccccttagtccaccctccggcccaaggctttcacaaaaggtagggtgggggaagggaggggctggatagaagccacactggcagagacaggggctttgtcccaactgatttctgagccaagatttcccgtgggaaagcccctgccrggcagaaaggagaggctgggaagaagaagggaggaggcatacaaggaagggggatggagaatgttggggagtaaagagaggagt

SEQ ID NO: 40343 - DNA, 1353 bp, Homo sapiens
tcacacaagcagatggtaataactatcttgccggatcggctgacacaatccacactggcactctaaatgtcccttctcccctctccgcctagagggaagccctcgcctcagcaggtcagagtggcctgggcacctccggcttgttcccgtgcccatcagctctggctcccttccgacgcctgttggctgacccctttgtcttggagacgctgaacccagcctggccttaagcccaagaatgcactggcccacactcctgcatttttttgtcacccactcacctgccatctgcctcttcaggagtttccatgtatcaaagtcccaggtatcaagcccacaggtgaggggccatttccagactagttccgaggactgagccttgagggagaggaccccaggatatgtcttccggggaagcccctagtcagtatgacatgggggtgaccccagctcctgtgttcactggacctgggctggggcttggctggcctgggctgagaactcwgtggagcagccgctggggaaaggaggcaggcgaaccacacttctcggctgctctccccgccagcagtgccgacccagggcctctccctgctgaatctgacagtagagtgagtagagaaagaatacaggctttgaggtcccacagctctgggtctaatcccagcctcaccatttcctaggaaatacatttccttcatattcatgagtctcatctgtaaaatgtgcaaatgcagcctactccatgagtttactatgagaattcaatgaaataatacaagtgagatgctcagtgtgtcatagctgtattctgcacctccttcctgacaactgggtccacataccagcgcttctctaataaataagaaataatgactttgttctttgcccacccaattaacccttagagcatccctactaatgagctgagtttcagttagttcccactttataggtgatgagccgaggacctaaaaatctgggtgacctctctgcagtcatacagcttgtttgtaagaagtctgggttggaactcacctaccaccaccaaggagggcagctgtgctttgacgagcacctactaggtgccaggctagtattccgatgtattccagtgctcagcactttgaaccatcccaggcaagtcaatactcacagtaactgtatgtgttaggaggcatcattatccctactgtacagataatgaaactaagtgggagagaagccaggtcacttgtccaaggccacacgagtgataagcagctagcacaccaggactgcttgacttcagaactctgcggtctggcctcctggtatcaccagaccttggcctcggggtcagggttgaatgca

SEQ ID NO: 40344 - DNA, 1337 bp, Homo sapiens
tcgttcctgaagatgactccctatcttttttcttgatacttccactatctgcacatcccaggctatccccaactatctcataaaattctgtccatccttcataatgtacctcaagcaatacaacttccatgaaacctgccttgaccccataaaccttcccctgaacttcaatcttctgtctttctatcttccaatatttttccacactttgtatcatggtctgctgaatacttgtctaatctcggattctgtgtgagacagtagtcaaagtaaaaattattaccaaggaaaaatcttactctcttgagtggattgaatggtggccctcaaaaagatatgtccatttcttaacacaaggaatcggtgaatgtgactttatttgaaccgactttatttaagaaaaaaaaaagggtctttgcagatataatttaaggatctggagatgagagcattttggattatctgaatggattctagatccaatggcaagtgtctttataagagagaaagagaagaccatatgaagacagaagcagagactagaatgtgtggaatcaccaaaacctggaggaggcaaggaaggattcccctctagagtctttggagggagcacagcaaccctgctgacaccttgattttggacttctacctccagaactgtgaaagaacaactttctgttgtttaaagccacgaagtttatagtaattgtgttacagcaatgttaagaaactaataaaccccctttgctccatctgattctgacaagtcatttttatttactgcagtagctctgcaggagcatcagaagagatttaaaaaatatagattctgccccctaccccaaatctcttcttattctcctgctattatctgcaaagatctctgcacttccattatcaatagccctccagaggtgccagtacaggataacatctgaatagtaaagagactgtattcttgtgaaaagttgataacatccactgtgacaggtggtgggctctagaggatgaaggcctaggttcaaaactggaccctgaacttgtaaacctgaacaggwtacttctttgacatttagtttgtcatccataaacaactctttgaggattgctgtaagcagtaaataggcaatatatttaaagctactggcataaaagctttttagtgtaggttaaccaatatgaaagatgattttctgagtataatattgcccctggctattgatatactgttctgtgatttaagaaaaaaaaaatcttactacgccgaaaattccatctgccctgtttacagagataatcgacaagtttgagtaaaagcctttatttaattatagcca

SEQ ID NO: 40345 - DNA, 1337 bp, Homo sapiens
tcgttcctgaagatgactccctatcttttttcttgatacttccactatctgcacatcccaggctatccccaactatctcataaaattctgtccatccttcataatgtacctcaagcaatacaacttccatgaaacctgccttgaccccataaaccttcccctgaacttcaatcttctgtctttctatcttccaatatttttccacactttgtatcatggtctgctgaatacttgtctaatctcggattctgtgtgagacagtagtcaaagtaaaaattattaccaaggaaaaatcttactctcttgagtggattgaatggtggccctcaaaaagatatgtccatttcttaacacaaggaatcggtgaatgtgactttatttgaaccgactttatttaagaaaaaaaaaagggtctttgcagatataatttaaggatctggagatgagagcattttggattatctgaatggattctagatccaatggcaagtgtctttataagagagaaagagaagaccatatgaagacagaagcagagactagaatgtgtggaatcaccaaaacctggaggaggcaaggaaggattcccctctagagtctttggagggagcacagcaaccctgctgacaccttgattttggacttctacctccagaactgtgaaagaacaactttctgttgtttaaagccacgaagtttatagtaattgtgttacagcaatgttaagaaactaataaaccccctttgctccatctgattctgacaagtcatttttatttactgcagtagctctgcaggagcatcagaagagatttaaaaaatatagattctgccccctaccccaaatctcttcttattctcctgctattatctgcaaagatctctgcacttccattatcaatagccctccagaggtgccagtacaggataacatctgaatagtaaagagactgtattcttgtgaaaagttgataacatccactgtgacaggtggtgggctctagaggatgaaggcctaggttcaaaactggaccctgaacttgtaaacctgaacaggtwacttctttgacatttagtttgtcatccataaacaactctttgaggattgctgtaagcagtaaataggcaatatatttaaagctactggcataaaagctttttagtgtaggttaaccaatatgaaagatgattttctgagtataatattgcccctggctattgatatactgttctgtgatttaagaaaaaaaaaatcttactacgccgaaaattccatctgccctgtttacagagataatcgacaagtttgagtaaaagcctttatttaattatagcca

SEQ ID NO: 40346 - DNA, 1337 bp, Homo sapiens
tcgttcctgaagatgactccctatcttttttcttgatacttccactatctgcacatcccaggctatccccaactatctcataaaattctgtccatccttcataatgtacctcaagcaatacaacttccatgaaacctgccttgaccccataaaccttcccctgaacttcaatcttctgtctttctatcttccaatatttttccacactttgtatcatggtctgctgaatacttgtctaatctcggattctgtgtgagacagtagtcaaagtaaaaattattaccaaggaaaaatcttactctcttgagtggattgaatggtggccctcaaaaagatatgtccatttcttaacacaaggaatcggtgaatgtgactttatttgaaccgactttatttaagaaaaaaaaaagggtctttgcagatataatttaaggatctggagatgagagcattttggattatctgaatggattctagatccaatggcaagtgtctttataagagagaaagagaagaccatatgaagacagaagcagagactagaatgtgtggaatcaccaaaacctggaggaggcaaggaaggattcccctctagagtctttggagggagcacagcaaccctgctgacaccttgattttggacttctacctccagaactgtgaaagaacaactttctgttgtttaaagccacgaagtttatagtaattgtgttacagcaatgttaagaaactaataaaccccctttgctccatctgattctgacaagtcatttttatttactgcagtagctctgcaggagcatcagaagagatttaaaaaatatagattctgccccctaccccaaatctcttcttattctcctgctattatctgcaaagatctctgcacttccattatcaatagccctccagaggtgccagtacaggataacatctgaatagtaaagagactgtattcttgtgaaaagttgataacatccactgtgacaggtggtgggctctagaggatgaaggcctaggttcaaaactggaccctgaacttgtaaacctgaacaggttacttctytgacatttagtttgtcatccataaacaactctttgaggattgctgtaagcagtaaataggcaatatatttaaagctactggcataaaagctttttagtgtaggttaaccaatatgaaagatgattttctgagtataatattgcccctggctattgatatactgttctgtgatttaagaaaaaaaaaatcttactacgccgaaaattccatctgccctgtttacagagataatcgacaagtttgagtaaaagcctttatttaattatagcca

SEQ ID NO: 40347 - DNA, 1337 bp, Homo sapiens
tcgttcctgaagatgactccctatcttttttcttgatacttccactatctgcacatcccaggctatccccaactatctcataaaattctgtccatccttcataatgtacctcaagcaatacaacttccatgaaacctgccttgaccccataaaccttcccctgaacttcaatcttctgtctttctatcttccaatatttttccacactttgtatcatggtctgctgaatacttgtctaatctcggattctgtgtgagacagtagtcaaagtaaaaattattaccaaggaaaaatcttactctcttgagtggattgaatggtggccctcaaaaagatatgtccatttcttaacacaaggaatcggtgaatgtgactttatttgaaccgactttatttaagaaaaaaaaaagggtctttgcagatataatttaaggatctggagatgagagcattttggattatctgaatggattctagatccaatggcaagtgtctttataagagagaaagagaagaccatatgaagacagaagcagagactagaatgtgtggaatcaccaaaacctggaggaggcaaggaaggattcccctctagagtctttggagggagcacagcaaccctgctgacaccttgattttggacttctacctccagaactgtgaaagaacaactttctgttgtttaaagccacgaagtttatagtaattgtgttacagcaatgttaagaaactaataaaccccctttgctccatctgattctgacaagtcatttttatttactgcagtagctctgcaggagcatcagaagagatttaaaaaatatagattctgccccctaccccaaatctcttcttattctcctgctattatctgcaaagatctctgcacttccattatcaatagccctccagaggtgccagtacaggataacatctgaatagtaaagagactgtattcttgtgaaaagttgataacatccactgtgacaggtggtgggctctagaggatgaaggcctaggttcaaaactggaccctgaacttgtaaacctgaacaggttacttcttwgacatttagtttgtcatccataaacaactctttgaggattgctgtaagcagtaaataggcaatatatttaaagctactggcataaaagctttttagtgtaggttaaccaatatgaaagatgattttctgagtataatattgcccctggctattgatatactgttctgtgatttaagaaaaaaaaaatcttactacgccgaaaattccatctgccctgtttacagagataatcgacaagtttgagtaaaagcctttatttaattatagcca

SEQ ID NO: 40348 - DNA, 1337 bp, Homo sapiens
tcgttcctgaagatgactccctatcttttttcttgatacttccactatctgcacatcccaggctatccccaactatctcataaaattctgtccatccttcataatgtacctcaagcaatacaacttccatgaaacctgccttgaccccataaaccttcccctgaacttcaatcttctgtctttctatcttccaatatttttccacactttgtatcatggtctgctgaatacttgtctaatctcggattctgtgtgagacagtagtcaaagtaaaaattattaccaaggaaaaatcttactctcttgagtggattgaatggtggccctcaaaaagatatgtccatttcttaacacaaggaatcggtgaatgtgactttatttgaaccgactttatttaagaaaaaaaaaagggtctttgcagatataatttaaggatctggagatgagagcattttggattatctgaatggattctagatccaatggcaagtgtctttataagagagaaagagaagaccatatgaagacagaagcagagactagaatgtgtggaatcaccaaaacctggaggaggcaaggaaggattcccctctagagtctttggagggagcacagcaaccctgctgacaccttgattttggacttctacctccagaactgtgaaagaacaactttctgttgtttaaagccacgaagtttatagtaattgtgttacagcaatgttaagaaactaataaaccccctttgctccatctgattctgacaagtcatttttatttactgcagtagctctgcaggagcatcagaagagatttaaaaaatatagattctgccccctaccccaaatctcttcttattctcctgctattatctgcaaagatctctgcacttccattatcaatagccctccagaggtgccagtacaggataacatctgaatagtaaagagactgtattcttgtgaaaagttgataacatccactgtgacaggtggtgggctctagaggatgaaggcctaggttcaaaactggaccctgaacttgtaaacctgaacaggttacttctttgwcatttagtttgtcatccataaacaactctttgaggattgctgtaagcagtaaataggcaatatatttaaagctactggcataaaagctttttagtgtaggttaaccaatatgaaagatgattttctgagtataatattgcccctggctattgatatactgttctgtgatttaagaaaaaaaaaatcttactacgccgaaaattccatctgccctgtttacagagataatcgacaagtttgagtaaaagcctttatttaattatagcca

SEQ ID NO: 40349 - DNA, 566 bp, Homo sapiens
taatggttgcagtaagattcactgatagttgctaaaagtatttttattaattataaaggaaaaaatggctgggtgtagtggcttatgcctgtaattctagcacatggggaggctgagatgggaggattgcttgagatcaggagtttgagaccagcctggtcaatagagtgagacttcatctctattgttataaagaataaaacaaaatttaaaataaataaattttaaaaacgttttaagaaggaaaaaatataaaagtggagaaatccggtaaataccaccctaatcaagtgatcaaggttagtattactagtaataattgataytgacattaggtactccctgatgtgatgccttgagttgagcacagtatcatctcttacatcaatctcatcatgataaaacactagacaaacccagactgagatggggttccacagactcctactcaggtgtcagaattagaacccagagcccatcatctttccactctgggcaggaaaggtatggaggccaagggtagggggatgcctcctttctggagggaggcactgctgactgaacgt

SEQ ID NO: 40350 - DNA, 563 bp, Homo sapiens
ctcgagaactacttatgcttcaaatataccctctgctctccctaaagagagcagaaacttgaaacccatgatgtatttccctcattcttttttttgagcaaaacacatagcatagagcaagggctaagaaaacatagtaatatcatgagtttttatctttgagtgactaaaaatatgccaagtacttttcagtgccttctatataatttatatcattagtatacattaacggaattaatttaatcaactaatccaatggaaaccaattaatccagtggaaacccagtgaaataggcgttatcatcccattttactgatgaggaaatcaagaatcaaagacattaaaaatacttacttagcttccasctatataaaggatataggatttttttttttttttaagagagatgggatctttctctgacacccaggctgcagttcagagacactgtcatagctcatagcagccttgaaatcctgggctcaactgatcctcccacctcagcctcctgagtagctaggaccacaggtgcaagccattgcacctggctcctccatgctat

SEQ ID NO: 40351 - DNA, 565 bp, Homo sapiens
taggctattttggaaagggtcctaggacaaataaaaagaaaacatataaacttgccattggatttgttccccataaataatcccaacagagaaaattgacctggtggcctgggatccacgcatctgctacattgatatcattgtttttatataccattattctagtttctaaatcattcattcatcaacaggtagtaagttttgactaagtgtcaggttatgtgatactctttgtggttaaaaaagacagcttggctgtccttactttcacttcccttgatatcaatctctaccacaataaagtagagacaagccttagagtattcagaaagttckttttctagattatatatatattaatgaagttgtaggcatggtaagagctccacagagtgagtcagatcctcaactgacacaaacacccatcataatgaggcagattatctgcttcacaaaacactcatcataggacacaagcagacttggaacctacgagaaggaaggttttgattttacatctctgccctgtgaatttaccttaaagaaagcctttgtgcatattatt

SEQ ID NO: 40352 - DNA, 565 bp, Homo sapiens
taggctattttggaaagggtcctaggacaaataaaaagaaaacatataaacttgccattggatttgttccccataaataatcccaacagagaaaattgacctggtggcctgggatccacgcatctgctacattgatatcattgtttttatataccattattctagtttctaaatcattcattcatcaacaggtagtaagttttgactaagtgtcaggttatgtgatactctttgtggttaaaaaagacagcttggctgtccttactttcacttcccttgatatcaatctctaccacaataaagtagagacaagccttagagtattcagaaagttctttttctagattatatatatattaatgaagttgtaggcatggtaagagctccayagagtgagtcagatcctcaactgacacaaacacccatcataatgaggcagattatctgcttcacaaaacactcatcataggacacaagcagacttggaacctacgagaaggaaggttttgattttacatctctgccctgtgaatttaccttaaagaaagcctttgtgcatattatt

SEQ ID NO: 40353 - DNA, 541 bp, Homo sapiens
ctcatattatggtacaaaattgtagctcagtaaagcaaggagatataggacttatatcttctatgtaatgtaatcttagcatttcaacatttggcacagtaccttgcagatggtcaactctcaatctcaatttatgtcattgaattaaacagcatcaaatagaatgaaaaagagttaagcagaattccatcaacggtctaaagggtaatatttgcacattatttttataaatttgttttaagtatctaggaaaaagatgaatggaagttgttgatgcaaagtttgggtttattatggtgtccaaatttaatttccaccaaaagtggagtcrtatgttaattatttctagttgtgaggccacttactagacagccctgggtcatcaacaagtcatctctttcggggggcttttctcttgcttagtctaaagacacatgtagcttcatatatactcattagcattcttttatgaaacctctttcagaaaagaaagccatttttatactgatgacaagctgtggttgtaattttttcttttcca

SEQ ID NO: 40354 - DNA, 555 bp, Homo sapiens
tgattctggggtagaacccaagaatttgcatttctaacaagatttcaggtgatcttgaagmtgctgttctgggtgtcaagctttgagaacccctatcctacaacatgctgcccacagagaggagtgagttccctgtctttgcaggagttcaagcagaagctgaatgactgctggtcacagaggtaggaggagggaggatacaaccaaatgctatttgccttgccaccaagaggctctcagagtctgggcactcagtaggaagggtgtcccggatcttgtggggacaggtgggttctgttcagcctattaactgaatgcctgttagagctccagtctctatccccattagaggcaacctggagccatcaaaagagcctgggctctggattctgatgggattgggtttcagacccctcactcaccccttactccttactcactcactcacagcatggcctggggcaggcaaatgactcaactcttcagaacccaagttattttcctctgtaggatggagagctaaatgcctgcctcctagggctgttttatggatta

SEQ ID NO: 40355 - DNA, 586 bp, Homo sapiens
acatgtatacctatgtaacaaacctgaacattgtacacatgtaccctagaacttaaagtataattaaaaaaaaaaacatatatatatatagagagagagaggcagtaagattgtatataacccagatcctggcaacaatggcaaagttcatttttccttctgatattaagtctatcttcctcacataatatggctcaaacatgaaagagaatcctaaaaaatatattttaggccaggcatggtggctcatgcctgtagtcccagcactttgggaggccatggcaagaggatcacttgagcccaggagttcgaaaccagcctaggcaacccagggagacccagtgtctctaaaaaaaaaaaaaaaatggrgagagagagagattttaattattttagagcaagcaatgattgccaaaggccaatggcgattttgaccaagatgagaaaagtaccccgacatagtatcacaacattggccactgtgtccactgtccttgtccttaggcacattgtgattctagtttgcatggctctgaacacaaagaaatgcaaggtgctcacaagccaaggacatgaatactttaat

SEQ ID NO: 40356 - DNA, 535 bp, Homo sapiens
tggacatttgggactcctgaagaaaaccaaacaaaaataaaatatcataaataataaaataaaactactaaaagatccagagcaaaaacactgggtaatacttcggttattagtatgacagctttcccatgatcaggggaaaaaatcattttttcatatatatatgtatatacatatacatatatatacacatatatacatatatgtgtatatatgtgtgtgtgtgtatatatatgtgtgtgtatawatatgtgtgtgtgtgtgtgtgtatatatatatatatatatatatatttttttttttttttttttttttttttccgagacggagtcttgctctggctctgtcacccaggctggagtgcagtagcaagatctcagctcactgcaacttctgcctcctgggttcaagcaattctcctgcctcagcctcccgagtagctgggattataggcacccgccaccacacccggctaattttttgtacttttagtagtgatggggtttcaccatgttggccaggctggtctcgaact

SEQ ID NO: 40357 - DNA, 1016 bp, Homo sapiens
aggactgactgtctgccctgcagtttgccacgattctatccaaacgtccawctctactctttgggcgtttgttctagtctttgccaactgccatttcccccactctcacctttgatgacttaagaattttgtgttttttgttgcctcatcactgcccttgtgctttcctgatccccaccctgcgtcttcctccctttccgcattccctgacccacatacttgtccactggttgagataaagccctcaattcaacgtatcttcacttggcttttttttaagtcgtggtggtgcgataacaatactgtcatttcctgaagactcactgcaggtgtcaagtgctgtgttaagtgttttgcagctgttaccactttaatccttacagcaacccctgcgacctctgtgttttattattattcctatcttatggatcaaaaaacagacacattctagactgcaggctggctgattggcaagaccgcagttgacgtagccagagaaccagagagaggttcatttaacagcaaagtttgggcacttgatttgcctgtggacctaatctaatgtgttaactggttacgagccttcccctcgacttcctcttgaataagtaaatgaatctaaactttaaatattggaataccatacacatacggaaaagtgcatgaatcatacatgtctagctcagtgacttttcaccaaaggcagccacctgtgtaaccagcccttggatcaaggaacagagcaggatcattgcccagaaacccctcccatgccccttgcagtcaccaaggttaaccaccaccttgactttcaatactgcagatgaattttgcctgtgttcgaaattctagaaatgcggtcatttccatgtccattattttgtatctggcttcattctgaattcaggtgtgagcgatattcatgaatgctcactatctgtttatacattcctctttctgattggttttacttttcctagttcctcaaccagtagagaaagttaagtttccttctg

SEQ ID NO: 40358 - DNA, 746 bp, Homo sapiens
gggaatgagggggctggtgccccacatactattcctgytccactcggtccctctcctgccgccgaagcctggggacagagaacagacagggttagcaggggcgggggagagtccctggggacaggtgaggaacaggggcccaacttagggccctcatgcccccatgcccacattggggctagtcccttctcatccccccagcaaaggggaatgagagagggctggctccttcctattcctgaggagtgtggaacaagatgtgtgtgtggagagctagagggagggtcccagacccttacctgtctgcatctgtcaccaaggccagccgcccatagtcccaggccaccttccggaggatagagaataagaacagcagtgcctgagggaagagggggcagttggcaagtgcagaggctgtctgtccacctgctggactagggggcagaagcagagggtccaaaatcttgtcttagaaggggatgaccctggcttgggtgaatggtcaaaggcgaggcttgggctggatgatggggactcctcctgcttaagcctgggaaaccggggcaggtgggagagtggttagagctggaagtgtttgccaggtgtgtacagggcatggatgccaaggtaaggggtggtcgctttgcacttacaaggaagcacatgaagtcgagagccagcacggtggggacgcccccaaagggcaggccctgcaggacagtgctgcggatgcgggcgctgtagca

SEQ ID NO: 40359 - DNA, 719 bp, Homo sapiens
ttgctcaccagtagatgttctgagggtcaggggcataggacacggtccagttggagatgtgcagggactcgctgcaggatgaggggcgtggctccccacggcaggtgcagccctggcatttacacacgttgaagtccttcaggatgctagaaagatgggcactggttaccacaggcccacctggaggccacactgctggcagaaggccatgagcacaggggtcagggagccctggagggctgctcagggccgagggccgagttggggactcacatggcggtgatagtctcattgtggaaggtgacaaaggccatgccaagaggcttctcattcaccttctccttctcccgcttgtagtcttccttcagcttctgctccagctttgtgtagtactcaatggcctccacctttgtgggagggttagggacagggcctctagttggaaagccaggctggggcctgcagcatccagcccacgctgacttggggcttcctacaagccaggcactgctcctctaagcatttttttttytttggaaacagcgtctcgctctgatgcccaggctggagtgtagtggtggaatctcagctcactggagcctcaagctcccaggctaaagtgaccctcccacctcagcctcccaagtggctgggaatacatgtgtgcagtaccatgcctggctaatttttgtattttttgtagagatcaggttttgcca

SEQ ID NO: 40360 - DNA, 1132 bp, Homo sapiens
ggatcccagagtcctgctacaggaccatcaaacacaccatatggtctttggatagaaaataattctttcattatacaagggagagcctgtacaagtagatgttatcagtgtatacgtgtgtgtacatgcatgtgtgtatatatgagtgagtgtgtgagtaggtctgtgtgttgatacactcagtatttttttcagtgtaatgtttatacctgctaatgaatcaagctgatattttcatcactattgactcatttatcaggaacaataagtcttcatgacatccaaagagaaaaattaaaaggacttagaaaaaggaagacaggaaaggcattttacaacttatcaaaacaagataacaaagagttcatgtttcataaaaaagtctgtgaacagaaaagttataatagggcctttatgatatagaaataggtaacagcagaattaattctaatacatagtaagtaatatatgcattttgactactggtttttaactgaaccttcttccaagggtttgataatccttcccatctgttccacaaaagagtggactatgatctaagaaacaagtcatttgaagccaatttaaataatcataatcaatgaatggcaaagtgaccataatacaccttctgaaaacaagatataaatattccctgatgtgttcactgaccctaatataatcagctgggcttcctgaagcagaccttccataatggttcacataatagatttaattctagcactgaaaaacwtcatataaaatttccagtctgccaagcttccacttcagcatgttacttagacttctttctgatctggctagcgtcacatagaaaaccctggaaaaaggctagccaagcttgtcaaaaatattctgtcttctgtatttgttataagaaagaataactcttctttggttgtcatggccactgtcatattggaattgggagagttttattttaaaattcatgagtcagtacatttatattccattagtcacccagtccatgtatctcattcaaacctaaatcttctctctcttctcattatcgtctgatgaccttgcttcctatttcactgagaaaagagccatcaaaaaccaaacttccacatgctctcactgctgattc

SEQ ID NO: 40361 - DNA, 1250 bp, Homo sapiens
cttggtagacttattttaatatattgcttgatttggtttgcaaatgtccatttcctggcgttctagttaattgaaatacttgctttccccaaagcagcaacaccagtactttttctttcaataataacattggtgttcatattctaaaatatctagcttttcctgtgccagacttaaaggttagttatattttaatactacatgttttatgcagctccttaaacctcaaatcagaacaacactagtgatagttgtctccatatgttctcattagaattctaccaaatatctggctgggtagctgccctcgtcaggtggaacatgtaaccatcaaactgaagcatgaattggggattacagctgtaatgaatttccagactgaatgggatattgtacagaattcctcaggctgtaaccgctacccagagcccatgactccagacactatgattaaactatatagggaagaaggcttggcctacatctggatgccaacaccagatatgagcaccgaaggtaaggatcagaactgttctgcctccttgctgtatttcagagaaacccttgctgtctgtctgtctatctataatttaatatcttaaaaatgaatggtagaaatggaataaatataagattttagatttaatatatataatacatatgttttgacactgtggctaagattctgtttaatgtggcttctttgtttattcattcaacacatatttattgtgtatgtactgggtatgcggcattatgctagtagctaggaacacagcagtaaagaaagacaggcacaacttctgcccccacggagcgcattgtcctatagggatggcaaatgttaatcaaatgactaaaaatagaagtttaaaactatgatgaattttttgttagaaaatatatagatattgctatgagattatgtacaggtaatcaggccaagaagtggggtcaaagagggttttcttggaaagtagtgtttgggctaagatctgagggtgggctggwggaagagtgagtggagggagtgacccaggcagaagcagcagcttagaagaatccttgtggcaggagagagcacagagtgttgcaaaaactgaaagaccaatgtggcttggatcagagaacgaggaaagatgatcctgcaggatttgagcgacaaaaaggactttagacgctatcctattgcaggaagaagcagttgtacagtaagacgagttcgacactaattacagcacacaggggaa

SEQ ID NO: 40362 - DNA, 1272 bp, Homo sapiens
gcattagcacattaaagtttgagacacacttgatcaaatggcataatatatatcaaattgcttagcatggtgcctggcatatttcagaaatctcaatgaaaggtgttcattcatctaacaaatatgtattgatcgcctactaggagccgggaatcattctaagcattgggaatactgtagtgagtaaaactgtcaaggaccttaaactcatggagtatatattctaggggaagagacagacaacaaacagataagcaaataaatatgtaatttaataacaaatatatattattaataaagccacttagagtcacagccagtcaagttcaatccaattaaatacacatttattaaataaatattatgtgcatggcatctcacaggtatctgtctaggatggaaagaggccagatctcttctctcttacaacacatctctttctaaagccccatgctgatttcttactcaatacaagaagtaaatagtttttagggccagaaacaacagtaaatcaccaagccactttataagcaacattactataagactcttctggagtcctcgctcaaagaaccacaggcttacatgctggctaccactgtgcacattgcaatactgattaaacatattattttcttcacaatgtagggtcatcatagaatcatccaagcaggtggaaactcggaactagtaagggccattgcctgagggttaataattatctgggagaattcatggcccaagagtcttgctcacaccactaatctcatcccaccactagtgcctttcgacggggcctaagatcattttagacattagaagcttcttgtgtccacacatacaaatgcacgcacattcatgcacactgtaaatgtgcaaaagcaaacatgctttaggttagagtgtttagggaagtgcataatctacgctgcacattttaagtgtgcaaaagcaaacatatgcttttaggtaagagtgtttagggtgagttcataatctactagattaaatagtgcaaagwtcattcttgaagagtgctggtttaccctaagtgctgaagtatgtttaccctttttctgattctacagattcagaatctctgacgtctctactcactttctgatcatgcagcataagatttgctgccttctttgccctttttctgatcctgtagcatagaaaatattgtcagtttcagtttttatctaccagggttctgtaaaagaattaactcttaatgcctcaaagaacccctattatgtaacaaattaa

SEQ ID NO: 40363 - DNA, 1163 bp, Homo sapiens
gtatccacacacttatgtacaaatacacacacatgtgtatatagagtttacataagtatatatacactgtgtgtatatatagtgcatagtatgtatatagtgtatgtttgtgtgtagatatacatgtatatattaaaatttctctcctctatatttttatattctctctttccataaatatgatttatattggacctcccagaggtgtctgatatcattctcttctcttttctgttttctgtatttttgtctttatgttcaactttctagagatttcctcatttatcttccaacccagccactgaattattttaaaaatattttggattttaaaagtatactccacactttttacttctaaattttctgccatttttaatagaacgtgttcataccccactaaggacaccaatcacacgtgtatgtaggtgtgtcttatagtttctatttcctctgcagtcgcctcttacctggtttctctgcatcaatccttccccactagagtccattttcaacatggtagctagaattatcattttaaaaagtgattaatgttttaagggataaaataatccttaccctcaaaaataagcaatatgggaatttataaagtaaaaagtaaaaaagtactcacaatccactacccaaaaacaactgtcatggatatctggtggctgtcactctgacatctctctaaggaacatatatatatccctgtctaaagaatatacagaaacatgatagatgagttgagagacagataaaaatgtaatgctattataagggctattttatttattattatttttttttaattttttttttttgagatggagtctcaccctgtcgcccaggttggagtgctgtggcaagatctcagctcactgcaagctctgcctcctgggttcatgccattctcctgcctcagcctcccgagtagctggaactacaggcgctcgccaccatacccagctaatttttttgtatttttagtagagacagggtttcrccgtgttagccaggatgatctcgatctcctgacctcgtgatctgcccacctcggcctcctaaaatggtgggattacaggcatgagccaccagtgctaggcctattattattttttacatgatacatatttatggtatgcaacatgatgtcttga

SEQ ID NO: 40364 - DNA, 1078 bp, Homo sapiens
atttgcatcaaggaagcatctctaacagttcctccaggagtccctgtagacttttaccagcttgagactgaatatttgagggggagggggtcaggatacaatcatctaaaatgcaaacaaaaaaagtgttttcctaaagttctccgaattaaaaagaaaagaatatgtttgggatacaatacacaaatttatttgaattcctttgccaattccaagtgaatccacagccaaacgaatgaaacttatggttgcacagctggaggcttattacttcttcattttataaaaacaaaaccacaagtgattgtgaaccagttggtctgaatttatacttatagcaaataagtataaattacttcctctgctttctcaaggtgctgaatggaagcatttgtcataaattcatcatagactgaatgtatgagactgaatattaagactgaaaatacccttttaagaagtcatttttgcccattcattctgttttgttcctttgtccttctgyttctttatttattcagtcatttcgcaataaatatttattgagttcttcccgtgaagtaggcactgtgctaaattttggggatacagtggtaaataaagacaatttattttggaggagctccaaagacaattccagatctttctcagatttactgatccatttattcctgtttatttccaacacgtaatacaatgaaaacagtcaaacagacatgaatttaatttgcatttcatcttgggcaagatgtttaaattctcagaaccttagctttcatatctcccatctacctcaaagaatgatggaaagtgaattacaaagataacctataaaactgcttgacattttgttctccacccccaccccaaatatcactgttccctacatatgttgggtcctagaggtataaattgataggatacattttctagcactgtgcttagttgtagctaagaatatagagaaaaaacaaatgatgttcctgccttctagaagattacatttagaataataatgactaacatttgatatataccaatgactgttctgagcactataaatggatgaactcacata

SEQ ID NO: 40365 - DNA, 899 bp, Homo sapiens
gcaatggggagggtgaaaggttttcacaaatgtctgttatggcaagcactacgacgccagcactggggtgaaggggcttgcaccccacccatccctgcccattcccagccacagctgtccagtsgacagactatgtaaattatggggtggcttgccagctttcagctggtgtgattaagcatctgcaattaattggagttctaaaatcttcccacctcccatttccacagcagacattcaaaatttaaacagcaagaaagtaaaagagggattgaagcaattctctgctgtgtttagttaagttcatcagttcattcaaatcagccccgaacagaaacaaaacaacagatgaagctttgtgaccaaaacagcaggtttgagagtatagatggcttattttaaagtttaaaaagttttcactgactttaaaatataaagaaagtataaaaacaaacatttttaaagtcaaacatttaagacccaaataataattgctgtcattcgaaaaaaaaagtaacaattcatgtgatatgatgtttaaaaacaatacctgttatgagtctctagtatttatttcaactaaaacattattttcatatatcctgtatctctatcaatttatccctttgtttatacacttttttctccttcctccctccctcccttccttccttccctctttctttccttcctttccttctttctttctttctctttctttatttctttctctttcttcctcccttccttcctttcttccttcctttctttctttctttttctttctttttttttaagatggagtctccctctgttgcccaggctggagtgcaatggcacaatctcagctcactgcaacctctgcctcccgggttcaagcgattctcctgcctcagcct

SEQ ID NO: 40366 - DNA, 638 bp, Homo sapiens
atttgtgttcaatgtaggaacacaaatacgttatgcttctgtgttcatatactatttcatatacattattttctttacctaccaatcttctattttctagtctagtaccattagaatctagaaatacttcgttytgaattttcttttttcaaatttaaggatcaacttgggtatttttccaggacacccaataaggatgaaaacaatattttcaataagtcaaagataaagtcaatatataaactacgaaatctctcaatactgggttctaaaaagtgcagaaaggtcattattcttgattgtgaacataaatttgttttgcacttgtttttactgggtcaatgataaaatattattttcctattattttctttggaacagctcttctcatgggaatacacttaaaactattttacaatttcacattaaaatactgtccagttagctttcaaataattttttagacaccaatataaattcaaccgtacaaaatcaacaatgaaagaaaaacaggacatatgacccaaaataattatagttttaaaaattatagatcatgttgcagtgagctgagatcgcgccactgcactccagcctgggtgacagagcgtgactccgtctcaaaaaaaaaaaaaaaa

SEQ ID NO: 40367 - DNA, 657 bp, Homo sapiens
ggagtcctgccccgggaggagtccgggcgctgcccctgcccccacaagcccatattcctcctctcccgcactgcattgcagacctaggagggcactgagaacccagagagccctgccgagccgtgatgcagcagcggatctgacaaatccgcccggtgcacagagcacgtgactcattgtgatgtgtcagtgagtcggcggctggacgcggttccgcacagagctcctagccctatccctccccgaaggcgatgacagaggtgtaggctcctagaagctgccaggccttgcagcaacgctgcacgcaggagacgcacctagggcagaagctcagccagtagcttcgggctggcttttctgcttcatgcaggtgaatacagaatgcctttgtttccttccctcggtcccacctccagtgtagtaaagctgatttttcttagcagagaaagagcaaacgttaattttctaaaaaagatacatttttaaaaaggcaaacttaaatccaattcaaagaagaatgcattgctstgactgagttatccaataagatgcatttattcaacagatacattgactacctactaagcactagacaccgttttaggcattgtggaacaaaacaagcaaatattcttgctttctgaaacttatattctt

SEQ ID NO: 40368 - DNA, 515 bp, Homo sapiens
atttagaaagaaatataacaagaagggacaatgcctttttcaaaaaaaattgtaattataattgtcggctacttataacaagacctgaaaaaagtattgagacacagcaatatcatttactatattaaaatatcaaattccaaagtatatttatatatatatacacacacatatatattacataatgcaattaaaatcagaaattttcakagctaaatacatttatatttaataaataaattctaaagattaaagatgaagtgttcaagaactaaaatgaaaagaaactgaactcctgttgtacaatatatacaaaactctggattaaagagttaaggccaaaaaatacaatttaaattagaagaataattaggaaaatatgtttaaccgtaatgatagaaagaaacataggaaatcctgaagcttaaaacttaaaagaaaaacatgtcagactactcattcttatagatgtcaatgggaaaagaggtaaaaaatgatatcaaaagagaagtaaa

SEQ ID NO: 40369 - DNA, 1096 bp, Homo sapiens
atttctttaatacaatatatttgctaaatctagtatttaatactcaagaattataagggaaggacaaaaaaaaaaaagaaaacaaaaaataaagaaaaaaagccctatatagatgagtccaaagtgtaatttatatggaagaacttacctttggagaaaaatctgtcttgtcgtatacacaaacatttgtatttattatttcaaagtccactcaaacaaaagtttaacatgcaaggttagaggtaaaattaagctcactatctgtattaggcatcattttaaatgaaggtaaactaaaataattcaaattagtttccatcattcagagtgcaacaccaccccaccccaaaaaaacccgcagcaagagaacagggttatattatgaaaggaagccctcaagctcagtaaaatgtcatctttgtgctcactctggaatggctgacagtggtagctgcagaaccatctctacaatgtattaaatacataatgcagaagtgtgggagatttgggagccacatttaaacccgcatagcagcagatgaggacagaccatttttttaacccactccaacagttagaagctgataatgtgacatgttctttttaatgttcctacatggtagtcttctgccaaagtaattagcgcctgcccattatttcaaaaatttcaatgacataattgactggcaaaccttggtccatatcagaaaagtttcttacaatccatgatgtaatttcttgatgctcattcatttatttcaattgttaatttctactttttcttgagaaaaacatctcttaaaataatctgtagccatcaaattgcctggacttcaataatgcatagagaaatttttaccaaacttctgcttcctgaattacataaaatgcttattttagcaacattttagccatatatacattataaacattaagtttaaataacatttactgataatttccttcaaaatacaaygaaaggtacagcaagggtgaaaatttcacctcagtaggacagaaatttttctcttgtgagaaataaccacatgaaattgtcaacatttgactatttttgacctacaactaaagaaaaaaa

SEQ ID NO: 40370 - DNA, 708 bp, Homo sapiens
gtatatgttttgcttaaactctttggatgttttgaaatgttttggtttaactagcaagtactttattaatggcagcttatcccatagatattttaatgatttggcctaagaacaaaattaatcttcctggatttgatttctctaaaacatatccaccaaatgcaattgccctttctgtcaaataagcccttcctggtatataagtctgaagtgatttttttttctctctcattayggttgttccaagattcttgacattctctaaatcatctttcgctgagtacaagaggtccatgaggaagtcaagatcgatgatagacttcatctctcttgaattttaatgcaaatgtctgttcccctaatcaaacaaaggttaaaaaaggaaatcaaattagcttattacaaaagccagcataactgagctgacaagaaaaatgctttctgcataaaaagtctttaatcaataccttaaataagaatgtcactggaaaagaagagttcatatgtggtcagttttaatctgcaaatcaatacgtcctttttaataaatatttgaccacagctgctcaataaggcattgtccattagaatttctttctttaaaccaaaatgaaacaaaattatagcataaatgtaatgttcagggcataacctaaacttgtgagagaattcaaggttagggttatttcaccatttaattgttgggta

SEQ ID NO: 40371 - DNA, 708 bp, Homo sapiens
gtatatgttttgcttaaactctttggatgttttgaaatgttttggtttaactagcaagtactttattaatggcagcttatcccatagatattttaatgatttggcctaagaacaaaattaatcttcctggatttgatttctctaaaacatatccaccaaatgcaattgccctttctgtcaaataagcccttcctggtatataagtctgaagtgatttttttttctctctcattacggttgttccaagattcttgacattctctaaatcatctttcgctgagtacaagaggtccatgaggaagtcaagatcgatgatagacttcatctctcttgaatyttaatgcaaatgtctgttcccctaatcaaacaaaggttaaaaaaggaaatcaaattagcttattacaaaagccagcataactgagctgacaagaaaaatgctttctgcataaaaagtctttaatcaataccttaaataagaatgtcactggaaaagaagagttcatatgtggtcagttttaatctgcaaatcaatacgtcctttttaataaatatttgaccacagctgctcaataaggcattgtccattagaatttctttctttaaaccaaaatgaaacaaaattatagcataaatgtaatgttcagggcataacctaaacttgtgagagaattcaaggttagggttatttcaccatttaattgttgggta

SEQ ID NO: 40372 - DNA, 708 bp, Homo sapiens
gtatatgttttgcttaaactctttggatgttttgaaatgttttggtttaactagcaagtactttattaatggcagcttatcccatagatattttaatgatttggcctaagaacaaaattaatcttcctggatttgatttctctaaaacatatccaccaaatgcaattgccctttctgtcaaataagcccttcctggtatataagtctgaagtgatttttttttctctctcattacggttgttccaagattcttgacattctctaaatcatctttcgctgagtacaagaggtccatgaggaagtcaagatcgatgatagacttcatctctcttgaattttaatgcaaatgtctgttcccctaatcaaacaaaggttaaaaaaggaaatcaaattagcttattacaaaagccagcataactgagctgacaagaaaaatgctttctgcataaaaagtctttaatcaataccttaaataagaatgtcactggaaaagaagagttcatatgtggtcagttttaatctgcaaatcaatacgtcctttttaataaatatttgaccacagctgctcaataaggcattgtccattagaatttctttctttaaaccaaaatgaaacaaaattatagcataaatgtaatgttcagggcataacctaaacttgtgagagaattcaaggttagggttatttcaccatttaatygttgggta

SEQ ID NO: 40373 - DNA, 484 bp, Homo sapiens
cttcacccagttccttccaatagtaatcttttgcccctgttgtcttatgaagcaactcttggaacaggtatttgagtgctcctgtcttctttgtctagcatcttctctgctcatcattttttctgttcatcatcttttctgcttcaactgggtccctctcagtctttgyaacttttcttagggtttcacagatattacttctttgccaaggctcttatggctttgatgaaataccttgatgtgtaatgctgcctgtgtagaaacagctgcttacctggagaatgctgcattttcttaccaagtttaaaaactattagtaccctaagtcttagaatatcttctcttggctatagctgttaaaatacaattaaaatcagtatatcagagagatatctgcactctcatgttcattgtagtgttattcacaatagccaaaatttaaaatcaacttaagtgatcctcaacaaataggtaaaaagaatgt

SEQ ID NO: 40374 - DNA, 484 bp, Homo sapiens
cttcacccagttccttccaatagtaatcttttgcccctgttgtcttatgaagcaactcttggaacaggtatttgagtgctcctgtcttctttgtctagcatcttctctgctcatcattttttctgttcatcatcttttctgcttcaactgggtccctctcagtctttgtaacttttcttagggtttcacagatattacttctttgccaaggctcttatggctttgatgaaataccttgatgtgtaatgctgcctgtgtagaaacagctgcttacctggagaatgctgcatttkcttaccaagtttaaaaactattagtaccctaagtcttagaatatcttctcttggctatagctgttaaaatacaattaaaatcagtatatcagagagatatctgcactctcatgttcattgtagtgttattcacaatagccaaaatttaaaatcaacttaagtgatcctcaacaaataggtaaaaagaatgt

SEQ ID NO: 40375 - DNA, 643 bp, Homo sapiens
ggttttaattgtagctatttcaaattaattctatttctcatatgttaatagcttagtatcatattcatcataacagcatatagcctgcagcctcaataacataatgatctcctaaaaaatcaaatgcaaatatttgagtttatatcttttacaagaatatagtgaaccatcagaaggatagcgtagcaagaatgatttttagtgtaattatcattatatattttcaatttatcaaattttaatgcattagtgcaatctcataaaattgttctcctctctctgcctctatctctatctctaccaatttttacttcttgccctcttttaaaattaattcccttgaagtaggacaggaactcctttccttagggaagtttctcttcagtaaataactctaatgtagaaatcttaaatgtgttcagcagctattaaaattactaaagttaatgaaaaacttttgcatccyaagcataaatttgatccctttagaactttttctctcttgcctttccaaagacttaccaatacttccttctaccatagctctttctttaactatgtttataactgtgaactaagttctaggagaataacatatagtgttcaagaacagatttccagggaatatttgtcatttctacct

SEQ ID NO: 40376 - DNA, 1315 bp, Homo sapiens
aattcattccgtctttgatattctatttttctcatttgttgttttgttttctagagacttaaaatgagtatttytgattccattctcttaatctctatgagtataatctggctacacaatctcaggtaaaatagactagaatgtaggaaatactaatgagaaaacatgcttttatggttacctaatctctaagaaagaagggttaacaaagaacaataagaaactatctgtatataactggttgaaaacaaggatgatttatctttaaaaaaagaaattcaacttgcagataaaataattattgtcttatgtctcaatttgcttgctgaaattatagtacatttatggtgttaaacatcctcatttaggaaaagacaatcattctatttactctctgtgaccaaactattagtcactactacatattgactttttttctgattttttttaatcagaaaaatataattggtagtattaacttagaaaaaaaaacaagggttaattacataaataaaattagaagaatggtttacaaatttttaatgcccttatacatactcattatataaagtctcatttggcaaatttaatctacaatattacagctacctatttgcaactgtgattgatgaagcttttggaatatacaaataccattcaatattaattttacatactatatactttcaccaacattatgttgcatattatcccataatatctgacacatacaagatttaattccttgtattagaacttacgaggaaaatatttgtaactgatttcctaaaagcaaaagcggctgagcacggtggctcacacctctaataccagcactctgggaggcagaggcgggcagatctcttaaggtcagcctggccaaaatggtgaagcactatctctaccaaaaatataaaaaattagccaggtgtggtggtgtgcgcctgtaattctagctactcaggaggctgaggcaagagaatcgttggaacctccgaggtggaggttgcagcgagccgagaacctgccactgcactccagcctgggcgatggagcgagattctgtcaaaaataaaattaaaataaaataaaataaaatagcaaaagtaaatttggaaggtaggagaggtagatcagagcttttaaacaagtcagaaaacttataactctgggcacaaactttcttttgattatggtttaaataatccacattatgctgtgaactctgtgagcgagacaccttgtctagtgtgaccactattgtgtctggtttttaatatactcatcaaatatattcaaatatatcttgaatgca

SEQ ID NO: 40377 - DNA, 1315 bp, Homo sapiens
aattcattccgtctttgatattctatttttctcatttgttgttttgttttctagagacttaaaatgagtatttctgattccattctcttaatctctatgagtataatctggctacacaatctcaggtaaaatagactagaatgtaggaaatactaatgagaaaacatgcttttatggttacctaatctctaagaaagaagggttaacaaagaacaataagaaactatctgtatataactggttgaaaacaaggatgatttatctttaaaaaaagaaattcaacttgcagataaaataattattgtcttatgtctcaatttgcttgctgaaattatagtacatttatggtgttaaacatcctcatttaggaaaagacaatcattctatttactctctgtgaccaaactattagtcactactacatattgactttttttctgattttttttwatcagaaaaatataattggtagtattaacttagaaaaaaaaacaagggttaattacataaataaaattagaagaatggtttacaaatttttaatgcccttatacatactcattatataaagtctcatttggcaaatttaatctacaatattacagctacctatttgcaactgtgattgatgaagcttttggaatatacaaataccattcaatattaattttacatactatatactttcaccaacattatgttgcatattatcccataatatctgacacatacaagatttaattccttgtattagaacttacgaggaaaatatttgtaactgatttcctaaaagcaaaagcggctgagcacggtggctcacacctctaataccagcactctgggaggcagaggcgggcagatctcttaaggtcagcctggccaaaatggtgaagcactatctctaccaaaaatataaaaaattagccaggtgtggtggtgtgcgcctgtaattctagctactcaggaggctgaggcaagagaatcgttggaacctccgaggtggaggttgcagcgagccgagaacctgccactgcactccagcctgggcgatggagcgagattctgtcaaaaataaaattaaaataaaataaaataaaatagcaaaagtaaatttggaaggtaggagaggtagatcagagcttttaaacaagtcagaaaacttataactctgggcacaaactttcttttgattatggtttaaataatccacattatgctgtgaactctgtgagcgagacaccttgtctagtgtgaccactattgtgtctggtttttaatatactcatcaaatatattcaaatatatcttgaatgca

SEQ ID NO: 40378 - DNA, 1315 bp, Homo sapiens
aattcattccgtctttgatattctatttttctcatttgttgttttgttttctagagacttaaaatgagtatttctgattccattctcttaatctctatgagtataatctggctacacaatctcaggtaaaatagactagaatgtaggaaatactaatgagaaaacatgcttttatggttacctaatctctaagaaagaagggttaacaaagaacaataagaaactatctgtatataactggttgaaaacaaggatgatttatctttaaaaaaagaaattcaacttgcagataaaataattattgtcttatgtctcaatttgcttgctgaaattatagtacatttatggtgttaaacatcctcatttaggaaaagacaatcattctatttactctctgtgaccaaactattagtcactactacatattgactttttttctgattttttttaatcagaaaaatataattggtagtattaacttagaaaaaaaaacaagggttaattacataaataaaattagaagaatggtttacaaatttttaatgcccttatacatactcattatataaagtctcatttggcaaatttaatctacaatattacagctacctatttgcaactgtgattgatgaagcttttggaatatacaaataccattcaatattaattttacatactatatactttcaccaacattatgttgcatattatcccataatatctgacacatacaagatttaattcctygtattagaacttacgaggaaaatatttgtaactgatttcctaaaagcaaaagcggctgagcacggtggctcacacctctaataccagcactctgggaggcagaggcgggcagatctcttaaggtcagcctggccaaaatggtgaagcactatctctaccaaaaatataaaaaattagccaggtgtggtggtgtgcgcctgtaattctagctactcaggaggctgaggcaagagaatcgttggaacctccgaggtggaggttgcagcgagccgagaacctgccactgcactccagcctgggcgatggagcgagattctgtcaaaaataaaattaaaataaaataaaataaaatagcaaaagtaaatttggaaggtaggagaggtagatcagagcttttaaacaagtcagaaaacttataactctgggcacaaactttcttttgattatggtttaaataatccacattatgctgtgaactctgtgagcgagacaccttgtctagtgtgaccactattgtgtctggtttttaatatactcatcaaatatattcaaatatatcttgaatgca

SEQ ID NO: 40379 - DNA, 1315 bp, Homo sapiens
aattcattccgtctttgatattctatttttctcatttgttgttttgttttctagagacttaaaatgagtatttctgattccattctcttaatctctatgagtataatctggctacacaatctcaggtaaaatagactagaatgtaggaaatactaatgagaaaacatgcttttatggttacctaatctctaagaaagaagggttaacaaagaacaataagaaactatctgtatataactggttgaaaacaaggatgatttatctttaaaaaaagaaattcaacttgcagataaaataattattgtcttatgtctcaatttgcttgctgaaattatagtacatttatggtgttaaacatcctcatttaggaaaagacaatcattctatttactctctgtgaccaaactattagtcactactacatattgactttttttctgattttttttaatcagaaaaatataattggtagtattaacttagaaaaaaaaacaagggttaattacataaataaaattagaagaatggtttacaaatttttaatgcccttatacatactcattatataaagtctcatttggcaaatttaatctacaatattacagctacctatttgcaactgtgattgatgaagcttttggaatatacaaataccattcaatattaattttacatactatatactttcaccaacattatgttgcatattatcccataatatctgacacatacaagatttaattccttgtattagaacttacgaggaaaatatttgtaactgatttcctaaaagcaaaagcggctgagcacggtggctcacacctctaataccagcactctgggaggcagaggcgggcagatctcttaaggtcagcctggccaaaatggtgaagcactatctctaccaaaaatataaaaaattagccaggtgtggtggtgtgcgcctgtaattctagctactcaggaggctgaggcaagagaatcgttggaacctccgaggtggaggttgcagcgagccgagaacctgccactgcactccagcctgggcgatggagcgagattctgtcaaaaataaaattaaaataaaataaaataaaatagcaaaagtaaatttggaaggtaggagaggtagatcagagcttttaracaagtcagaaaacttataactctgggcacaaactttcttttgattatggtttaaataatccacattatgctgtgaactctgtgagcgagacaccttgtctagtgtgaccactattgtgtctggtttttaatatactcatcaaatatattcaaatatatcttgaatgca

SEQ ID NO: 40380 - DNA, 277 bp, Homo sapiens
tcgagaaaccccatctctactgaaaatacaaaattagccgggcatggtggcacaggcctgtaatcccagctactcrggaggctgaggcaggagaattgcttgaacctgggaggcggaggttgcaatgagccagattgcaccattgcactccagcctgggcaacaagagtgaaactccatctgggtggggaggcgggggagggggccggaagaaaggaaaatccaaacctcctagggcccagcaacccaaacaaaacctctatttacatttcataaat

SEQ ID NO: 40381 - DNA, 588 bp, Homo sapiens
gcccttgagtaggcacttgaatctttctgaacctcggcttccccatctatctggtgggctatgctattgtagggttgatccttagcaaaactgatgaagtttgtctttcagagacccttcctgcctcaggtgaatttgtttgcactgtgttcttggagagcagtctaattcaatattctcatgattcatgctttccctcccagtggttttgtctttgatcatggaactctttaaaactgtaaagtcttaaagactcaaagggatgagcccagtgaaggttcaggaactgagacaactgagtaaggagggtgagattattttaggactgaggagtttgtttggaggcttctaaatccaccccttcccaggcattatatgcccaaaaagctggtcttggttgacagactagtgagactctgcatraggaataagcctttacatacaaaaacacacaagcctcattgatgtagggacccaggacagtgggtgccttgagaatgatgaagcttggattcatcaaagcaattggtgatttcagaggtagtgaggccttaggaagcaatttatagtagcttcccttcaagacca

SEQ ID NO: 40382 - DNA, 658 bp, Homo sapiens
actatgcatagtgttctctatcttgatttctttatttgataactccctcacacaagtcttaccttgctttctagatttcagattggctaggaggtggatgccagtttctcctagtgtccctgctcctgtccamctccaggtgacagaatgtttaagaagaatttatattatttaatccatgctaggatagtaaactgcccacaactagttctcagttagacagaagaatgaaaggtaccattcttccaacattcttccagtcattcttcttattcacagacatttggtatccagtagccaaatcttcccattaaatattttgagagcattttaaatagctttttttttctgttgcatttttctctacttgccatctctctgttatctactgatacaaggcctaagagaccagtatcagcaccattaccttcaatcagagccaaaaccttatatctggaatcaagggaaccactgagatttcagccagtaatctgtccataggcacagccaatgatcagagccagaaatcatgaagtaagctaagttaatatctaagatgtgagccaagagccataaaacaacattggcagaggagaggtgaggaagggaaatgggtgtcaaatgtaagccaaagaagttacaaacacctcatataacc

SEQ ID NO: 40383 - DNA, 1747 bp, Homo sapiens
  misc_feature (1)...(1747): n = A,T,C or G
ggaattttttctgattgtattgtttctaaacagtgttataattctgtattttaaatctagaattaccacatttccttatgtcaagcataggaagcttgaaacaacttttaaaaaattttccttgactcaaataattttaaataagaaattctgacaagaaatagtaacacttcatactgtgtatcaccttaattttttttttttggttgataaggtgtattttagaataatattatgcttttttttaataattggcaaaacttttaaatgttaagaaggaagttcatgttggttggggaaaattacgggagatakatatatatatatatatttaagtaaatattttccccataattgagaatgggacagcgattgcatataactatagtaaggtcatggtggtggtaaggagagagggcatagaggagggagaaatgggcatggaaagcaactgcgccaagtcttttattagtttgcttccaaaatccctatcaagaggtttctgcttcaactggccagtaacttacactgcttatgagttagaatcctaaccaatattacattataaggtagtgttttattttataagaggattaaactatgcatagtgttctgtatcttgctttctttatttgatgattactccctcacacaaatgttacttctttgttagatttcagattggctaggaggtacatggcagtttatatatttaaataaaatacataaagtacaagttcctcctaccccaactcttgttatctaaccctgtttccctggaatagatatcattagcagctgtataaacttccggacctttttctattttttgtttttgttttttgagacggagtctcactctgtcaccaggctggagtgcagtggcgcgatctcagctcactgcaacctccgactccctggttcaagcaattctcctgcctcagcttcctgagtagctgggattacaggcacgtgccaccatgcccagataatttttgtatttttagtagagatggggtttcaccgtgttggccaggatgatctcaatctcctgacctcaggtgatccacatggctcaatctcccaaagtgctgggattacaggtgtaagccactgcgcccggccttccagacctttttatatgcacatatgaacatatatttatatttctatgcacatataagcacatttatataaacatatgtaacaaatgcataaatataaaatgtctgtgtataggcatttatttaccattaatttagttattttaatctgcatccttttatgtgtatttttatgaacttgtgataatatttctgattgacaatttactagaagtagaattgatagactaaaggttattcacattttaaacagtacagggaaattgcccacctaaatggtttacactcttttcaactgtgaatgtgagtatcctttttctccacaccattgccaacatgggtattaccgatctttttaattcttgccaagctgaaaagtggtatcttcctgtttgcaatttccttatacctaatgagatggagcctctggcatttcttctgcaaattgcctatgtatatccttgctgttttttttttctgtgtgtgtgttgtttgtatttttcatattgatnttgggagcatttttggattattggggtactaacattttgttaaatacttgtcataaaattttcttcagtcttatgtttattttttttaactttcttccaaaaaattatttt

SEQ ID NO: 40384 - DNA, 1747 bp, Homo sapiens
  misc_feature (1)...(1747): n = A,T,C or G
ggaattttttctgattgtattgtttctaaacagtgttataattctgtattttaaatctagaattaccacatttccttatgtcaagcataggaagcttgaaacaacttttaaaaaattttccttgactcaaataattttaaataagaaattctgacaagaaatagtaacacttcatactgtgtatcaccttaattttttttttttggttgataaggtgtattttagaataatattatgcttttttttaataattggcaaaacttttaaatgttaagaaggaagttcatgttggttggggaaaattacgggagatatatatatatatatatatttaagtaaatattttccccataattgagaatgggacagcgattgcatataactatagtaaggtcatggtggtggtaaggagagagggcatagaggagggagaaatgggcatggaaagcaactgcgccaagtcttttattagtttgcttccaaaatccctatcaagaggtttctgcttcaactggccagtaacttacactgcttatgagttagaatcctaaccaatattacattataaggtagtgttttattttataagaggattaaactatgcatagtgttctgtatcttgctttctttatttgatgattactccctcacacaaatsttacttctttgttagatttcagattggctaggaggtacatggcagtttatatatttaaataaaatacataaagtacaagttcctcctaccccaactcttgttatctaaccctgtttccctggaatagatatcattagcagctgtataaacttccggacctttttctattttttgtttttgttttttgagacggagtctcactctgtcaccaggctggagtgcagtggcgcgatctcagctcactgcaacctccgactccctggttcaagcaattctcctgcctcagcttcctgagtagctgggattacaggcacgtgccaccatgcccagataatttttgtatttttagtagagatggggtttcaccgtgttggccaggatgatctcaatctcctgacctcaggtgatccacatggctcaatctcccaaagtgctgggattacaggtgtaagccactgcgcccggccttccagacctttttatatgcacatatgaacatatatttatatttctatgcacatataagcacatttatataaacatatgtaacaaatgcataaatataaaatgtctgtgtataggcatttatttaccattaatttagttattttaatctgcatccttttatgtgtatttttatgaacttgtgataatatttctgattgacaatttactagaagtagaattgatagactaaaggttattcacattttaaacagtacagggaaattgcccacctaaatggtttacactcttttcaactgtgaatgtgagtatcctttttctccacaccattgccaacatgggtattaccgatctttttaattcttgccaagctgaaaagtggtatcttcctgtttgcaatttccttatacctaatgagatggagcctctggcatttcttctgcaaattgcctatgtatatccttgctgttttttttttctgtgtgtgtgttgtttgtatttttcatattgatnttgggagcatttttggattattggggtactaacattttgttaaatacttgtcataaaattttcttcagtcttatgtttattttttttaactttcttccaaaaaattatttt

SEQ ID NO: 40385 - DNA, 1747 bp, Homo sapiens
  misc_feature (1)...(1747): n = A,T,C or G
ggaattttttctgattgtattgtttctaaacagtgttataattctgtattttaaatctagaattaccacatttccttatgtcaagcataggaagcttgaaacaacttttaaaaaattttccttgactcaaataattttaaataagaaattctgacaagaaatagtaacacttcatactgtgtatcaccttaattttttttttttggttgataaggtgtattttagaataatattatgcttttttttaataattggcaaaacttttaaatgttaagaaggaagttcatgttggttggggaaaattacgggagatatatatatatatatatatttaagtaaatattttccccataattgagaatgggacagcgattgcatataactatagtaaggtcatggtggtggtaaggagagagggcatagaggagggagaaatgggcatggaaagcaactgcgccaagtcttttattagtttgcttccaaaatccctatcaagaggtttctgcttcaactggccagtaacttacactgcttatgagttagaatcctaaccaatattacattataaggtagtgttttattttataagaggattaaactatgcatagtgttctgtatcttgctttctttatttgatgattactccctcacacaaatgttacttctttgttagatttcagattggctaggaggtacatggcagtttatatatttaaataaaatacataaagtacaagttcctcctaccccaactcttgttatctaaccctgtttccctggaatagatatcattagcagctgtataaacttccggacctttttctrttttttgtttttgttttttgagacggagtctcactctgtcaccaggctggagtgcagtggcgcgatctcagctcactgcaacctccgactccctggttcaagcaattctcctgcctcagcttcctgagtagctgggattacaggcacgtgccaccatgcccagataatttttgtatttttagtagagatggggtttcaccgtgttggccaggatgatctcaatctcctgacctcaggtgatccacatggctcaatctcccaaagtgctgggattacaggtgtaagccactgcgcccggccttccagacctttttatatgcacatatgaacatatatttatatttctatgcacatataagcacatttatataaacatatgtaacaaatgcataaatataaaatgtctgtgtataggcatttatttaccattaatttagttattttaatctgcatccttttatgtgtatttttatgaacttgtgataatatttctgattgacaatttactagaagtagaattgatagactaaaggttattcacattttaaacagtacagggaaattgcccacctaaatggtttacactcttttcaactgtgaatgtgagtatcctttttctccacaccattgccaacatgggtattaccgatctttttaattcttgccaagctgaaaagtggtatcttcctgtttgcaatttccttatacctaatgagatggagcctctggcatttcttctgcaaattgcctatgtatatccttgctgttttttttttctgtgtgtgtgttgtttgtatttttcatattgatnttgggagcatttttggattattggggtactaacattttgttaaatacttgtcataaaattttcttcagtcttatgtttattttttttaactttcttccaaaaaattatttt

SEQ ID NO: 40386 - DNA, 1747 bp, Homo sapiens
  misc_feature (1)...(1747): n = A,T,C or G
ggaattttttctgattgtattgtttctaaacagtgttataattctgtattttaaatctagaattaccacatttccttatgtcaagcataggaagcttgaaacaacttttaaaaaattttccttgactcaaataattttaaataagaaattctgacaagaaatagtaacacttcatactgtgtatcaccttaattttttttttttggttgataaggtgtattttagaataatattatgcttttttttaataattggcaaaacttttaaatgttaagaaggaagttcatgttggttggggaaaattacgggagatatatatatatatatatatttaagtaaatattttccccataattgagaatgggacagcgattgcatataactatagtaaggtcatggtggtggtaaggagagagggcatagaggagggagaaatgggcatggaaagcaactgcgccaagtcttttattagtttgcttccaaaatccctatcaagaggtttctgcttcaactggccagtaacttacactgcttatgagttagaatcctaaccaatattacattataaggtagtgttttattttataagaggattaaactatgcatagtgttctgtatcttgctttctttatttgatgattactccctcacacaaatgttacttctttgttagatttcagattggctaggaggtacatggcagtttatatatttaaataaaatacataaagtacaagttcctcctaccccaactcttgttatctaaccctgtttccctggaatagatatcattagcagctgtataaacttccggacctttttctattttttgtttttgttttttgagacggagtctcactctgtcaccaggctggagtgcagtggcgcgatctcagctcactgcaacctccgactccctggttcaagcaattctcctgcctcagcttcctgagtagctgggattacaggcacgtgccaccatgcccagataatttttgtatttttagtagagatggggtttcaccgtgttggccaggatgatctcaatctcctgacctcaggtgatccacatggctcartctcccaaagtgctgggattacaggtgtaagccactgcgcccggccttccagacctttttatatgcacatatgaacatatatttatatttctatgcacatataagcacatttatataaacatatgtaacaaatgcataaatataaaatgtctgtgtataggcatttatttaccattaatttagttattttaatctgcatccttttatgtgtatttttatgaacttgtgataatatttctgattgacaatttactagaagtagaattgatagactaaaggttattcacattttaaacagtacagggaaattgcccacctaaatggtttacactcttttcaactgtgaatgtgagtatcctttttctccacaccattgccaacatgggtattaccgatctttttaattcttgccaagctgaaaagtggtatcttcctgtttgcaatttccttatacctaatgagatggagcctctggcatttcttctgcaaattgcctatgtatatccttgctgttttttttttctgtgtgtgtgttgtttgtatttttcatattgatnttgggagcatttttggattattggggtactaacattttgttaaatacttgtcataaaattttcttcagtcttatgtttattttttttaactttcttccaaaaaattatttt

SEQ ID NO: 40387 - DNA, 1747 bp, Homo sapiens
  misc_feature (1)...(1747): n = A,T,C or G
ggaattttttctgattgtattgtttctaaacagtgttataattctgtattttaaatctagaattaccacatttccttatgtcaagcataggaagcttgaaacaacttttaaaaaattttccttgactcaaataattttaaataagaaattctgacaagaaatagtaacacttcatactgtgtatcaccttaattttttttttttggttgataaggtgtattttagaataatattatgcttttttttaataattggcaaaacttttaaatgttaagaaggaagttcatgttggttggggaaaattacgggagatatatatatatatatatatttaagtaaatattttccccataattgagaatgggacagcgattgcatataactatagtaaggtcatggtggtggtaaggagagagggcatagaggagggagaaatgggcatggaaagcaactgcgccaagtcttttattagtttgcttccaaaatccctatcaagaggtttctgcttcaactggccagtaacttacactgcttatgagttagaatcctaaccaatattacattataaggtagtgttttattttataagaggattaaactatgcatagtgttctgtatcttgctttctttatttgatgattactccctcacacaaatgttacttctttgttagatttcagattggctaggaggtacatggcagtttatatatttaaataaaatacataaagtacaagttcctcctaccccaactcttgttatctaaccctgtttccctggaatagatatcattagcagctgtataaacttccggacctttttctattttttgtttttgttttttgagacggagtctcactctgtcaccaggctggagtgcagtggcgcgatctcagctcactgcaacctccgactccctggttcaagcaattctcctgcctcagcttcctgagtagctgggattacaggcacgtgccaccatgcccagataatttttgtatttttagtagagatggggtttcaccgtgttggccaggatgatctcaatctcctgacctcaggtgatccacatggctcaatctcccaaagtgctgggattacaggtgtaagccactgcgcccggccttccagacctttttatatgcacatatgaacatatatttatatttctatgcacatataagcacatttatataaacatatgtaacaaatgcataaatataaaatgtctgtgtataggcatttatttaccattaatttagttattttaatctgcatccttttatgtgtatttttatgaacttgtgataatatttctgattgacaatttactagaagtagaattgatagactaaaggttattcacattttaaacagtacagggaaattgcccacctaaatggtttacactcttttcaactgtgaatgtgagtatcctttttctccacaccattgccaacatgggtattaccgatctttttaattcttgccaagctgaaaagtggtatcttcctgtttgcaatttccttatmcctaatgagatggagcctctggcatttcttctgcaaattgcctatgtatatccttgctgttttttttttctgtgtgtgtgttgtttgtatttttcatattgatnttgggagcatttttggattattggggtactaacattttgttaaatacttgtcataaaattttcttcagtcttatgtttattttttttaactttcttccaaaaaattatttt

SEQ ID NO: 40388 - DNA, 649 bp, Homo sapiens
agccacagtgcccatcacctattttcttactattacagaaataactggtttctgctttttttttttttttttttttgacggagtctcattttgtcacccaggctggcgcaatctcagctcactgtaagctccgcctcccaggttcatgccattctcctgcctcagcctcccaagtagctgggactacaggcacccgccaccacgcctggctaattttttgtatttttagtggagacagggttttaccatgttagccaggatggtctcgatctcctgacctcgtgatccacccacctcagcctcccaaagtgctgagattacaggtgtgagccaccacgtcaagcccagtttctgcttttatggaaggaaccactcttatttaaaactacaatttttgtatttgtgttaggtttttgtctggtttgtgttgkacaaaaagagtgtcccacgtgtgtgttttatggtttcacagactttattcatcttcgtggacaaaggcaggtaaaacacatgtttttcattttattttttttctgtaaactgtactttcaataaatgactgattcttaaatagatgataatactttttctagtgcagaaataaagtccatgcaatttttataaaacttggaccatacttttcaaagtt

SEQ ID NO: 40389 - DNA, 632 bp, Homo sapiens
tctacaagagctacaccacataagtgggtctagttcagccacataagatgatctattccctttccactcgatgagacttagatcaagccagttttttgtttgtttgtttgtttgtttgttttgagacggagtcttgctctgtcgtccaggctggagtgcagtggcatgatctcggctcactgcaagctccgcctcctgggttcacaccattctcctgcctcagcctcctgagtagctgggactgcaggcacccgccaccatacccggctattttattcttatttttttagtagagatggggtttcacgtattggccaggatggtctcgatctcttgaccttgtgatccgcccaccttggcctcccaaagtgctgggattacaggcgtgagccaccgtgcctggccgatcaagccagtttttgaagccagtttttgcatcttctcttcttcatctcttttcttctgtaagcaaacatcccatctttcctttcayattttgtcatgaaagccattcacttgttctagttgttctctactttgccccaatcttaaacctgaaccattacatctgaacataattctcaaggcagaatagagtagaactatctatccccttccttatgtggaactta

SEQ ID NO: 40390 - DNA, 588 bp, Homo sapiens
tgtctttttgtctgttctccctgatgtcaaaaaattgattacaaattttataaactggtttttctcactgaggaaatttcttgtctaattttagcaccccccaaccattcctaaaaccatcgtcccatggatctccatgaatcgaactgcatacgtgcacatctctcatttgcatcttttcctgatattcataaaacctcccacaagtgaaaggaaggaaagtgatrctcatggattggtttcctgcccaccatcaaggcctgggatcataaataaagtctggggctccacttgctgcagagacacagtagatggcagtgtgcaacacagaagtgtgagattcccgaccgtctcagccttggatgggcaactgactgggaggaggttgaatctctgggcacggatgctgtttttccagcctagtcagagagagaggttgtcttcctaggaaatgctttttctgcataaacttggttttgctgattcagtcaactgcagttatttgggctactttggcaccaaagaatgttaagcttctttaagcctgaaaaatgtctgtacttcaaaactctacttaaatgcataaaa

SEQ ID NO: 40391 - DNA, 1074 bp, Homo sapiens
tgttgtctagtgttttcatcatcataaatgtaaacagttagaagtaatttagttgttggcctatttcaagtattgaccttttaatatcttaaaataaaactgttatattactcttttaagtgtatccaatggaatgaaaaaaccatcaggattttacatctatcatcagccacttaaaaaatacatgaactgtccatcttgaacagtcaaaattttattttttttttctcctttatttcatatttccaatctacttcttcacatactttttactacctgaaatctaatttatgctttaatatatttataggtttttttggtcacacattatatttctctgtagccaaatttcatatgtaggttaaaacattaaaacatattttaattttatgattatatgtttccaagcattaaaataaatcttaatgacatttgttgttaataaarctcaattggttaaaataatccaattgcacaattctgataaacaattattaaacataaaaataaatgtaatgaatgtatatacttaggtgctagaataaaacagatcatttaaatgtacaaccagggctaataaccagtgtttatagaagagcctaaggagtcaacttctaggtgttacaaagggcccatccagctgcagccatgcttctcaaagtgtaattgcagatgaaaatgcagattctgacctgacatggtaggtgtggggcctgaggttctgtgttcctggcaagctgccaggtgattgatgctgatgttactggtctaggggtcatactttcagtaacaagaagaagtagcagtgaagtagtggttcttaacataatctacactttggaatcccctgggaatctttaacatgtcccacccactttcagacattttgacaactgatctcacagtttggactgtggcctgggcacaagggcagatcatcgtgtagtgtagaattcaccactgaggttaaggagctagtgctaaatgcattgtgaatgtttactcaggatccttctttttactaaacctcataccctaaaatgcctgctactctaaagacaaatgggtgtaaat

SEQ ID NO: 40392 - DNA, 1293 bp, Homo sapiens
ttttgtgcattcaatccaatcaaagtttaattaaaccagatgctaacctaattcctttaccttcatggaactatgaatctatgctattttgacagtcatagcaactcatcagacttcatccatgaacctggaaatccagaatcacaaatcccatcttcattttctactgtagtcttttttttttttttttttttgacagggtctctctctttgttgcccaggctggaatgcagtggcgcaatctcagctcactgcagcctcgatcacccgggctcaatatatcccccacctcagcctcccaagtagctgggaccacagttgtgtgccaccacacccagctagtttttacttattttctgtggagacagagtcttacccaggctggtctcaaactcctaggctcaagcaatcctctcacctcagcttctccaggtactgggattataggcatgagccaccatgcctggttcatatcttatattttactgatagtttacatcctaactgaagagacagatatgattcattagaactaccatactattattattaattttttttttgagacagagtctcactctgtcacccaggctggagtgcagtggcgcaatctcggctcactgccaccactgcctctcaggttcaagtgattctcctgcttcagcctccaaaatagctgggactacaggcacgtgccaccacacccagctaatatctgtatttttagtagagacagggtttccccatgttggccgggctggtctcaaactcctgacgtcaagtaatctgcctgccttggcctcccaaagtgctgggattacagcacgatgagccactgtgcctgatcttttgctatacttttaaatgtccttgtcagtacttggctgtctgactagctcttcagcttttaaaarattctattagtgggttccctagcatggtattattgcaaaacaagaaaagataataactaattagcagagtcagcacagtcctgtgaactcagtagagagagtcaaatctttcaattatgcagtgaaatctttcaattaactgtcatctaaacacaacacatgatcttagtagcatgttgcccattgtcaggacgttaggcaaaataaactaatcaaaataaatattcttcttcagaagttaccaggaaagccagcaacacccaagagcacatgaacatctattgagcgtctactatctttgaggtactccgttaagtactaggatcccttccagaaaaaaatcatggaatggcacagccgatgtcctttgtgttatagc

SEQ ID NO: 40393 - DNA, 1293 bp, Homo sapiens
ttttgtgcattcaatccaatcaaagtttaattaaaccagatgctaacctaattcctttaccttcatggaactatgaatctatgctattttgacagtcatagcaactcatcagacttcatccatgaacctggaaatccagaatcacaaatcccatcttcattttctactgtagtcttttttttttttttttttttgacagggtctctctctttgttgcccaggctggaatgcagtggcgcaatctcagctcactgcagcctcgatcacccgggctcaatatatcccccacctcagcctcccaagtagctgggaccacagttgtgtgccaccacacccagctagtttttacttattttctgtggagacagagtcttacccaggctggtctcaaactcctaggctcaagcaatcctctcacctcagcttctccaggtactgggattataggcatgagccaccatgcctggttcatatcttatattttactgatagtttacatcctaactgaagagacagatatgattcattagaactaccatactattattattaattttttttttgagacagagtctcactctgtcacccaggctggagtgcagtggcgcaatctcggctcactgccaccactgcctctcaggttcaagtgattctcctgcttcagcctccaaaatagctgggactacaggcacgtgccaccacacccagctaatatctgtatttttagtagagacagggtttccccatgttggccgggctggtctcaaactcctgacgtcaagtaatctgcctgccttggcctcccaaagtgctgggattacagcacgatgagccactgtgcctgatcttttgctatacttttaaatgtccttgtcagtacttggctgtctgactagctcttcagcttttaaaaaattctattagtgggttccctagcatggtattattgcaaaacaagaaaagataataactaattagcagagtcagcacagtcctgtgaactcagtagagagagtcaaatctttcaattatgcagtgaaatctttcaattaactgtcatctaaacacaacacatgatcttagtagcatgttgcccattgtcaggacgttaggcaaaataaactaatcaaaataaatattcttcttcagaagttaccaggaaagccagcaacacccaagagcacatgaacatctattgagcgtctactatctttgaggtactccgttaagtactaggatcccttccagamaaaaatcatggaatggcacagccgatgtcctttgtgttatagc

SEQ ID NO: 40394 - DNA, 502 bp, Homo sapiens
cttcatatactgagtctttaattttattatcttttaaaattttctgtttgtatttttattcagcttcctgggagatttgttggaattatcttttgattcttctactatattttaaagaatgattaccttttttctatctataagagctctatcttattctgattggtgaaacttgttttattgacacgcagtagtttcttatgttattgcattgtagtgtgtggttaagaggtagaccwgcagtcagaccacctacgttcaaatcccagctctgtcatttaatggctgtgcaaactcagacaaattactaaattttctcatctgtaaaataggataaggccttcatcataggactgttgtgattattcaatgaatgaatacacttaaagcacttagaacactgcttgacctgtaacaagagctccataagcatttgctgcattctttaactctctgaggttattagttacaggataaaaaaaagattttctggtttgtctcc

SEQ ID NO: 40395 - DNA, 544 bp, Homo sapiens
ttatttctacatagctattagttttgttaatattatcaatgagattttctaaattacattttttaattggttgtggctgatatctagaaattttataatttgcataatttaaaattattatttaattttaaaattattcaataataaactgcataattttaaaattattaaattttaaaattatccaataattatttaataattaataataataaataattattaataataattattatttaataattttaaaattattttrtaatttgcataattattataaattttataattttgcatacatgtaactttagtccaaagatctagctatcctcttattagttttaatatgttgtctatagattctctttgatctttctgtgtaaacttctgcaaatgttagttctttatgctttcagtcataatacagaatttcattttcttgcatccttttgctagctagggccaccatcgaatattgaacagaaggaatgatagcatcttgtttctgacctggatgtgactatgacattttattattaaa

SEQ ID NO: 40396 - DNA, 456 bp, Homo sapiens
atttcacatgctaatatgagactctgaaagctattccctgaattaaggataaagtatatcagataactaagacattttttgtgattaatggagagaacaattaccagaggtatatattaaaaatattttttaatctctgatgcagagaatggactaatctatctaatgacaagttcaattagagccaacatctgtttgactttaagatacattcctagagtaaataaatagccaaattgcgggataygtggcaatccttggtacaaatgacattggaagaagagacgttttttctgttctttttgaaatatgtaaaaagagtgggtgaaacattaaaataggcattatatttaccccttaggatgtcaactatgaaaaagtaacacatgttatttaaaactcagtttatacataaaatgtaaagagataaattttaaactttctattctaatagag

SEQ ID NO: 40397 - DNA, 541 bp, Homo sapiens
aattgtattaaatcaataatacatttctccaatgaatctatggacatatttgaataagtaaaatcattgataattgacatagtccacatgattctgccaatacaaagtgaggaattctggtaacacttagttattaatggacaatttgtatttttattttttttcaggccattattgagtaataaatttcataattccatcctaggagtattctgatgtaatttataaacccctcaatatatcagtattacttatttttaagctacttgattctagaaagcaaaaaataactcaataactttcaataagaatagggatttcccactaaaggataagttcgactgtaatagacattaattgtactacttgagaggaaatgtgattgttaaacataaacctaaaactgataactttggggakactcaaaacatcattacaatccccagggaaaatctttgaaaggtagaaccaaagtgggatgataacttgcttaactgaacctgatattttcttctctgagaaaagattgcaaagtgaatga

SEQ ID NO: 40398 - DNA, 568 bp, Homo sapiens
ttatatcagtgctctaaaattatcctatgtgcaggaatgggtaaaggccactttaaacaaaaatgaagtaagttacattcgttttttttgctgttccactgtaacaacaggaaatactgttaaagtccatttgggccaggtggggtggccgtaattccagctactcaggaggctgaggcaggaggatcacttgaggctaggagtctgagactaacctgggcaacacagcgagactccatctctaaaaatatatatagagagagagacatagtctcgttgtgttgcccaggctggagtgcaatggcatgatctcagctcattgcatcctccaccttccaagttaaaacaattcttatgccttagccaccccagtagccgggactacggrcgtctgccaccataccaggctaatttttgtatttttaaaggagaaaaggtttcaccatattgttcaggttggtcttgaactcctggacttaagtgatccacctgcctgggctcccaaagtgctgagattataggcatgagccaccatgcccagccaaaatattaaaaaattagaaaaatg

SEQ ID NO: 40399 - DNA, 1188 bp, Homo sapiens
atataaagtttttggatatcactgtctaccaaatgttttcatggaccatcagtggtgactcttgcatttttaggtgtctaggtgattgcccacattacaagccctggtttaccaaccaataaaatgtgtggcggttcaacctcataattcagtcctgtcacgccttatagaccttttycccatcaattttatgtatctcatcctaaattaacttgaagacacaggtgtaagataaatatgaggggctggcgaaatctcttcttgtagagtgtggaaaaacttctcctaaggaatgctcagtatattgacggatgctcagtggtgccccagggatacacagagttgaagtttctgatgtcattcacctcaaaaccagctttctgccactgctttagtggcatctgtgtgtcatttaaatgtagaattgcggctttttcacacctgcttttcccattttcaagaagtcttggttataaaactagagaatcagctggcccttccatatgtaagtgaaagttttcatcttttactaattagaagataacctagattcattacttttttattcatctttctttttagttattaaaaattgatctttttatttatagctgcatgaaaaattcttttgcagtttcttcaaaggttttctctcccccatttctttatctttctttcattcctaaaatgtaacttgagatgtgcacgtggaaaaatctgtttggttggaaataaaatgtggaagggaaaaaccagctatcaatggcacagccatattttatatttggactctaccaagccatcatagatcaggaatataccacttcatttaaattggctttttgtctacaggtaccatacttaagtatccatcacctctggagaggttgtcagaaatgaggctgcatcataaattgtcctaatggctcttaggtcctgtgcctcagtgtgctagccagccttggcccctttgatttctgtgtcagagtagcatcccttaggcatttcttattacttgcagggctgaagtcagcactttcctagagtggggagctcaggcttctttcctgggagttgcatgaaaaacttaaatagttatggctgagaatttgtgcatgctacatttctccaggtcagctgaaaattagcaatgagccctgaaatttctcttcagactaatcagtaagg

SEQ ID NO: 40400 - DNA, 1045 bp, Homo sapiens
  misc_feature (1)...(1045): n = A,T,C or G
ggtccttaccgctgaacaaagctactgggaagtttcctcgccagggtcgccgcctctgccgacttccttgctctcctccttgcagttacccgttggacccacccagtgccccgctcccgccctagtgccccaggcacccacccaaaaacagcgcagctgagcccccgcagctccatcgcgcagaaggtttactggaggcctcagcccgttgtcygccccacgggatgccaggaaatccatcggaataaacgctttttaaaaagaatttaccgccgggcgcggtggctcacgcctgtaatcccagcactttgggaggccgaggcaggcggatcacgaggtcaggagatcgagaccatcctggccaacacggtgaaaccccgtatctactaaaaagaaagaaagaaagaaagaaagtaagaaagaaagaaagaaagaaagagaaaaaaaattagccgggagttgtggcgggcgcctgtagtcccagctactggggaggctgagccaggaaatggcgtgaaccccggaggcggagcttgcagtgggccgagttcgcgccactgcactccagcctgggcgacagagcgagaccctgtatcaaaaaaaaaaaaaaaaaaaacttactttcccttcgcgaccagcctgggcaacacggtgaaatcccgtctctacaaaaaatacaaaaattagcccatcgtgtggcgcacgcctgtagtcccagctccttggggcgctgaggcaagaaaatcgctcggccccaggaggtcgaggctgcagtgagccgtgtttgcatcactgcactccagcctgggctaccaagtgagaccctgtctcacaaacagagcataacanaacttccccatgggaaaacagttcatgatttctattttcagagctcttcaaaagactaaaaactgaatgcgacgatggattaattcaagtcctagtcgtgcgctctggtgagtgccataccctgtttcccgcgaggggacccacgagcgaccctcaccatcatccctgccctggtggagcccccgtgcgggacaca

SEQ ID NO: 40401 - DNA, 1045 bp, Homo sapiens
  misc_feature (1)...(1045): n = A,T,C or G
ggtccttaccgctgaacaaagctactgggaagtttcctcgccagggtcgccgcctctgccgacttccttgctctcctccttgcagttacccgttggacccacccagtgccccgctcccgccctagtgccccaggcacccacccaaaaacagcgcagctgagcccccgcagctccatcgcgcagaaggtttactggaggcctcagcccgttgtccgccccacgggatgccaggaaatccatcggaataaacgctttttaaaaagaatttaccgccgggcgcggtggctcacgcctgtaatcccagcactttgggaggccgaggcaggcggatcacgaggtcaggagatcgagaccatcctggccaacacggtgaaaccccgtatctactaaaaagaaagaaagaaagaaagaaagwaagaaagaaagaaagaaagaaagagaaaaaaaattagccgggagttgtggcgggcgcctgtagtcccagctactggggaggctgagccaggaaatggcgtgaaccccggaggcggagcttgcagtgggccgagttcgcgccactgcactccagcctgggcgacagagcgagaccctgtatcaaaaaaaaaaaaaaaaaaaacttactttcccttcgcgaccagcctgggcaacacggtgaaatcccgtctctacaaaaaatacaaaaattagcccatcgtgtggcgcacgcctgtagtcccagctccttggggcgctgaggcaagaaaatcgctcggccccaggaggtcgaggctgcagtgagccgtgtttgcatcactgcactccagcctgggctaccaagtgagaccctgtctcacaaacagagcataacanaacttccccatgggaaaacagttcatgatttctattttcagagctcttcaaaagactaaaaactgaatgcgacgatggattaattcaagtcctagtcgtgcgctctggtgagtgccataccctgtttcccgcgaggggacccacgagcgaccctcaccatcatccctgccctggtggagcccccgtgcgggacaca

SEQ ID NO: 40402 - DNA, 1045 bp, Homo sapiens
  misc_feature (1)...(1045): n = A,T,C or G
ggtccttaccgctgaacaaagctactgggaagtttcctcgccagggtcgccgcctctgccgacttccttgctctcctccttgcagttacccgttggacccacccagtgccccgctcccgccctagtgccccaggcacccacccaaaaacagcgcagctgagcccccgcagctccatcgcgcagaaggtttactggaggcctcagcccgttgtccgccccacgggatgccaggaaatccatcggaataaacgctttttaaaaagaatttaccgccgggcgcggtggctcacgcctgtaatcccagcactttgggaggccgaggcaggcggatcacgaggtcaggagatcgagaccatcctggccaacacggtgaaaccccgtatctactaaaaagaaagaaagaaagaaagaaagtaagaaagaaagaaagaaagaaagagaaaaaaaattagccgggagttgtggcgggcgcctgtagtcccagctactggggaggctgagccaggaaatggcgtgaaccccggaggcggagcttgcagtgrgccgagttcgcgccactgcactccagcctgggcgacagagcgagaccctgtatcaaaaaaaaaaaaaaaaaaaacttactttcccttcgcgaccagcctgggcaacacggtgaaatcccgtctctacaaaaaatacaaaaattagcccatcgtgtggcgcacgcctgtagtcccagctccttggggcgctgaggcaagaaaatcgctcggccccaggaggtcgaggctgcagtgagccgtgtttgcatcactgcactccagcctgggctaccaagtgagaccctgtctcacaaacagagcataacanaacttccccatgggaaaacagttcatgatttctattttcagagctcttcaaaagactaaaaactgaatgcgacgatggattaattcaagtcctagtcgtgcgctctggtgagtgccataccctgtttcccgcgaggggacccacgagcgaccctcaccatcatccctgccctggtggagcccccgtgcgggacaca

SEQ ID NO: 40403 - DNA, 616 bp, Homo sapiens
aaaaataatgtaattactggaacagcatagataagacttttaagtaagagaaaaaactttaaaggtaagaaaaagttttggccgggcatagtggttcacacctgtaatcccagcastttgggaggccgacgcgggcgaattacctgaggtcaggagttcaagaccagcccagccaacatggtgaaaccctgtctctactaaaaatacaaaaatcaaccggccgtggtggcacatacctgtaatcccagctactctggaggctgaggcaggagaattgcttgagcccgggagacggaggttgcagtgagccaagatcatgccactccagcctggctgacacagtgagactctgtctcaaaaaaaaaaaaaaagagctttaatgaacaacattttatttctaatctttctggctgataaaaaacataactacaataaaatgacaattgttaaaagtaaaatcataaagcattctcaaatgcataccaacgtaaagaaaattacattggtatgtaattaccaattcaaattcaagggaaaatataatcaatgattcagtgcatttttaaggacaactgtatacaataaaagggtgggattcttcatataatatttaaga

SEQ ID NO: 40404 - DNA, 616 bp, Homo sapiens
aaaaataatgtaattactggaacagcatagataagacttttaagtaagagaaaaaactttaaaggtaagaaaaagttttggccgggcatagtggttcacacctgtaatcccagcactttgggaggccgacgcgggcgaattacctgaggtcaggagttcaagaccagcccagccaacatggtgaaaccctgtctctactaaaaatacaaaaatcaaccggccgtggtggcacatacctgtaatcccagctactctggaggctgaggcaggagaattgcttgagcccgggagacggaggttgcagtgagccragatcatgccactccagcctggctgacacagtgagactctgtctcaaaaaaaaaaaaaaagagctttaatgaacaacattttatttctaatctttctggctgataaaaaacataactacaataaaatgacaattgttaaaagtaaaatcataaagcattctcaaatgcataccaacgtaaagaaaattacattggtatgtaattaccaattcaaattcaagggaaaatataatcaatgattcagtgcatttttaaggacaactgtatacaataaaagggtgggattcttcatataatatttaaga

SEQ ID NO: 40405 - DNA, 1227 bp, Homo sapiens
tgcatgaattccttctggtgcactgaaaacatgttttgatttcttgaaataatttttctttctttctttcttcttcttctttttttttttttttaagagacagtgtcttgctctgtcatccagtctagagtgtagaggcaccatcatagctcactgtagcctccatttcctgggcttaagcaatccttctgcctcagcctcttcagtagctgagactacaggtgtgtgccactatgcccacctattttttaaaattctgtagagataaggtcatgctatcttgcccaggatggtctcaagctcctggcttcaagtgatcctcctgtctcatcctcccaaagtgctgggattacaggcatgagccactgtgcccagcctgaaactatttccccaaactaaatttagtttccaaaaaacattcatcataaaaatgaatgaaagacttgctaaaggrgattcatagacccttcaatggcagaccttgaaaacaggtaactctttgaaaatccttcaggaatttcctgctattggattgttgtcaaaatattcaaaccaaattatagcacagacatccagtttcttcttttctttttattaagttggctcttaatctcttactggaaaattaggctgtcctcaaacctgggcaagacattattatataagctgaacagctggggccaaaaacctttttttgattttgttttcagattcagtaatggaaaaagatccttggggagaggagcaaacctggagaagcaggaagagtccacctctgggaggatagcaaaggtggcattctaaagtggcctattcaatggagccacttctatttgtctgaggatgtgttcaaatgcctgccagagcttattgttagttccagatgaacaataagagctataacttctactgacttaactttgaggattctcccaaagctggaggtactctatttaaatcttcaaatcttttaattaacaaactttcctaagcaggctagggtttctcctgactgaacactcttaatataccaaatggaagtgcaatatactctactagataattatttaaatgagatgccaagtagttggttgaacagacatcttaattagcaaaacagatatattcatattttgcatttgaaatacttaataataccactcttcaggatttataaagactgtcttctctgagaaggtcaaggaagcccctacattgctcatttac

SEQ ID NO: 40406 - DNA, 973 bp, Homo sapiens
tatagggttctatctgcagttttgggcatctactggggggcttacctacccaaggaaggtaacccccrtggatgaggggggactactgtacttgcacatgaattttcatctcaggggccacctctggaaattcaacctaagacacaaagatccctgatagaataggtattaataggaatttaaaaatcatttaaaactcaatccattttgatgtttcttgtacatttgaggcttcagtaggaaaaaaggtatgaaatcctcatcactcttcatatatcccaactgatagcctaggaattttttgacagttcaatcataatttgatagttcaaataaatatacatttatttgtttaaatataccacaaatcaggctgggtgcagtgactcaggcctctaatcttaccactttgggaggctgaggcaggacgattgcttgagaccaggggttcaagaccaacctgggcaacatagtaagacccctctctacaaaaaaaagaaaactgttttaattagccaggtatggtgccacacacttgtagtcttacctacttggaaggctgagacaggaagatcccttgagctcaggagttcaaggctgcagttagctatgatcacaatgctgcactccagcctaggcaacagagtgaaagaccctgtctctttaaaatacagatagatagatagatagatagatagatagatagatagatagataactcaaatataattgccataagaagagaatgtcactatttttatgccaacaagatgaataaaacacacacaaaaaaaataaaatatgtatctgtcaaacttttttagggctctgagaacagctttagtggaaaaaacaccccggcatggggctggctccatggggaccatagtttgtcactctgagcctcctcattacctcctaagactatagtttcctaatcctaaaatcccggtaattttgctgatcttttctg

SEQ ID NO: 40407 - DNA, 973 bp, Homo sapiens
tatagggttctatctgcagttttgggcatctactggggggcttacctacccaaggaaggtaacccccgtggatgaggggggactactgtacttgcacatgaattttcatctcaggggccacctctggaaattcaacctaagacacaaagatccctgatagaataggtattaataggaatttaaaaatcatttaaaactcaatccattttgatgtttcttgtacatttgaggcttcagtaggaaaaaaggtatgaaatcctcatcactcttcatatatcccaactgatagcctaggaattttttgacagttcaatcataatttgatagttcaaataaatatacatttatttgtttaaatataccacaaatcaggctgggtgcagtgactcaggcctctaatcttaccacttygggaggctgaggcaggacgattgcttgagaccaggggttcaagaccaacctgggcaacatagtaagacccctctctacaaaaaaaagaaaactgttttaattagccaggtatggtgccacacacttgtagtcttacctacttggaaggctgagacaggaagatcccttgagctcaggagttcaaggctgcagttagctatgatcacaatgctgcactccagcctaggcaacagagtgaaagaccctgtctctttaaaatacagatagatagatagatagatagatagatagatagatagatagataactcaaatataattgccataagaagagaatgtcactatttttatgccaacaagatgaataaaacacacacaaaaaaaataaaatatgtatctgtcaaacttttttagggctctgagaacagctttagtggaaaaaacaccccggcatggggctggctccatggggaccatagtttgtcactctgagcctcctcattacctcctaagactatagtttcctaatcctaaaatcccggtaattttgctgatcttttctg

SEQ ID NO: 40408 - DNA, 633 bp, Homo sapiens
tttctgtattaaataaaatatgcatcttttcttggaaaacattctgaataatagttgttcttcaaaaacaaaatattagcaagatattttgttagcaaaattagctagaagagcaatgaatggatttgcctctttccctacaaacatgtctcataacaccagcttctaagtttctgaaactcttactttagacaatagttttaaattcagggcattcactctatctaccaaaatgtagtatttcaagaaaattattgctcaaaatttcagaagacaaaaaataatttattaaaggcraaacggttctagtcttcaataccaaaacacttatcttttgtcaaatcacacacacacacacacacacacacacacacaaccctgacattcacagattttgaaattggtaaataatactgaagtaatccataaaaacaagattctctttcaacatactcccaaaacactaagtccccccaaaaattacaaagcacttaggggttacatagtaaagactctgtatgaaactatcacttgagaagattaggcactgacttcataagtcagacacttgaatgaatttagaagatttgttttgtcgccagtttacataaattagcagaaaaaaaatcacaa

SEQ ID NO: 40409 - DNA, 633 bp, Homo sapiens
tcttctaattattttaattataggctcttaatgacaagaagccgtagaaataaaaacacattaaaattacatttttaatgaagtggcacctggaaacctcaacttctccaaagcaagtgagggtactctattgttacctagaaacaatgcacacatatggaggggttaagatgtttgtttaagggacagacttacgaccttgtttctctctgaatgcaggtaggatacaggagacatgaagtatggtagaaagaacactaggctcagagtcaagagacgatttctggtcctggctctgttacattgcttgactgtgtatccacttcacctttcttggcctcagtttttcacaggtaaaatgtagaaggtgaagttaataagctctaaacaccccttttaactttataattccatgatttcattcttctattataaagaacgataaacttttgggggaaatagattgagcacatctgtcattacatattaattcatatgcacatgtagtaayggcaacttttaggacatagatcgagattttcattgaatttagcaaaactaaattagatgtatatccatgtacccaccactgtaccagatatgtgagggcgggtgaggttttgaggtggagaa

SEQ ID NO: 40410 - DNA, 569 bp, Homo sapiens
tcttctttgagatggaggaagattttaccttgggatgcaaaggctgtttttaaatcttaatttaaatattacataaggtcgcaaggtcatttattggttccccaccccaggattcactctcccttctcatggtgttatagtgtacttcaattctgcacagagacagctacccctcctctccaggaagccagtgcacttacagcgagatgctggttccccagggcaggcacacgacctagattaagccgccaccggcacattttagctgcccgaggggcacgtgaccccactgaagccaatgaaatgcgataggcttctgggactgaggcagacacttctgctctactggaagctgagggctggcaccgccattttctaccggggcacttagattctgcaatgaaagccaaaaatatggtgaaagacarccatataaggtgaaacatagagctctgaatccagccacatctgaaactatacttaccgccctggacgtttcatctacacaggccaataaatttaatttttttgcttaaattgattggtgttctgttttctgtcacgtgcta

SEQ ID NO: 40411 - DNA, 592 bp, Homo sapiens
tagtagaatgctggtgaactgtggactagcactctattagacttttctaatgtactagatagatgtaccaaataaaatgacctggctttgaaagaagtgcaagcttccttgagaagcagcagttctaatgtactagagttttctaattagtacattaactaatgttcacacattagttaatgttcatacacagwgaaacagacactgcagcattcagtttgtaaaacagatattccttttgtttgccacgagttgacactgaaaggaaatgtaagagttacacctatatctttagttaatccttaattttctgttttatatttttattttgtttacattaaataaaatctttattttgtttacattaaaaaccttgttgtgagggctgtttagggggtagaaaagccaaggatttcctttgctttgattctaggtattgaggaaaaagtgctttaacattgagttttttatatgtacatgtgtgcatttaaataaatggatggagctgagggcatatagatttgaagtgttttttcatgagttgtttgtcacgaagaaggtttagagatgactaggaataaggtggggtgtg

SEQ ID NO: 40412 - DNA, 685 bp, Homo sapiens
tagatttaaggattttcttgaatccaagggtttggcctcaggttattcctaacatggacagactcagaattactttcagggattccaatctattattttctgacctatttgaggtaccttgtcatcccaaactggaaatctggcccttaaattaaagtaacctccggatgggcacagtggctygtgcctgtaatcccagctctttgggaggccaaggcgggcaaatcacctgaggtcaggagtttgagaccagtctggccaacatgatgaaactccatctctactaaaaatacaaaaattagctgggcatgatggcacatgcctgtaatcccagctacttgggaggctgaggcaggagaatcgcttgaacctgggaggcagaggttgcagtgagctgagatcgtgccactgcaccccagcctgggcaacaaaagcaaaactctgtctcaaaaaaataaattaataaaataaaataaattaaaaaaataaaagtacctccaaattcctttttaattaattgtttaaaatagagacagcatctccctatgttgcccaggctagtctcgaactcctttgctcaagtaatcctcctgcttcgccctccccaaagtgctgggattataggtgtgagccaccgtgcctttcagaacactgtttcctcacaaaccataaaatttaaaatgca

SEQ ID NO: 40413 - DNA, 1223 bp, Homo sapiens
tgcataagacgccttgggaagagaccctcaggctcttctggaaatccataggccctgcaacatcagcaacaccgaggcccaaataaatgcagagagggaacagtcccamctgggagatgctgcaaaaatacgagcaattttgcaaaaattattgtgggaagaacatttaacatgagatctatcctcaacaaatttcaagtgctcaacaaaataccattggctggatgttctgcagtggatcttcagaatctattcaccatttttttttttttttagatggagtcttactctgtcacccaggctggagtgcagtggcataatctcggcttactgcatccttcgcctcccaggttcaagtgattctcccgcctcaacctcctgagtagctaaggactacaggtgcctgacaccacgcctggttaattttgttttttttttttttaattgagatggtgttttaccatgttttggccagggtggtcttgaactcctgggctcaagtgatccatccacctccacctcccaaagtgctgggattacaggcatgcgccactgtgcccagccagaacttattcatcttgtataattgaaactttatatcccttgaatagtgacttcccatttcccctgccccagccccaggcaaccacctaccatatgatccagcaatcccacttctgggtatttatccaaaagaactgaaatcagatctcaaagagacctccgcatgcccgtgctcattgcagcattattcagcaaagccaagatacggaagccttgatgagcccacaaggtggacggatgaatgaggctgcacatgtgatgcactcttaacagtgcgatctagccctgcttcccggtggagcataacagggaatttttaatcgatgaattctctgacctgggaaatgttagcaatcccagtgtgtccttttggccctacacacgtcaccttcctgagcctcagtttccccacctgtaaaatggggataataatgcacctgcttattgtattattatatattataatatttattataacatgttatatgttatatttttatatgttatattattatgcttattgtaatactacagagagggctgagctaaggaccatgaggtgagcgtctttggcagctacagggcaagcgctcagtgctgtcacctgttaagatcgtggaaactaagtcatctgtttatcacggcatcatgtgacatgc

SEQ ID NO: 40414 - DNA, 1223 bp, Homo sapiens
tgcataagacgccttgggaagagaccctcaggctcttctggaaatccataggccctgcaacatcagcaacaccgaggcccaaataaatgcagagagggaacagtcccacctgggagatgctgcaaaaatacgagcaattttgcaaaaattattgtgggaagaacatttaacatgagatctatcctcaacaaatttcaagtgctcaacaaaataccattggctggatgttctgcagtggatcttcagaatctattcaccatttttttttttttttagatggagtcttactctgtcacccaggctggagtgcagtggcataatctcggcttactgcatccttcgcctcccaggttcaagtgattctcccgcctcaacctcctgagtagctaaggactacaggtgcctgacaccacgcctggttaattttgttttttttttttttaattgagatggtgttttaccatgttttggccagggtggtcttgaactcctgggctcaagtgatccatccacctccacctcccaaagtgctgggattacaggcatgcgccactgtgcccagccagaacttattcatcttgtataattgaaactttatatcccttgaatagtgacttcccatttcccctgccccagccccaggcaaccacctaccatatgatccagcaatcccacttctgggtatttatccaaaagaactgaaatcagatctcaaagagacctccgcatgcccgtgctcattgcagcattattcagcaaagccaagatacggaagccttgatgagcccacaaggtggacggatgaatgaggctgcacatgtgatgcactcttaacagtgcgatctagccctgcttcccggtggagcataacagggaatttttaatcgatgaattctctgacctgggaaatgttagcaatcccagtgtgtccttttggccctacacacgtcaccttcctgagcctcagtttccccacctgtaaaatggggataataatgcacctgcttattgtattattatatattataatatttattataacatgttatatgttatatttttatatgttatatkattatgcttattgtaatactacagagagggctgagctaaggaccatgaggtgagcgtctttggcagctacagggcaagcgctcagtgctgtcacctgttaagatcgtggaaactaagtcatctgtttatcacggcatcatgtgacatgc

SEQ ID NO: 40415 - DNA, 1223 bp, Homo sapiens
tgcataagacgccttgggaagagaccctcaggctcttctggaaatccataggccctgcaacatcagcaacaccgaggcccaaataaatgcagagagggaacagtcccacctgggagatgctgcaaaaatacgagcaattttgcaaaaattattgtgggaagaacatttaacatgagatctatcctcaacaaatttcaagtgctcaacaaaataccattggctggatgttctgcagtggatcttcagaatctattcaccatttttttttttttttagatggagtcttactctgtcacccaggctggagtgcagtggcataatctcggcttactgcatccttcgcctcccaggttcaagtgattctcccgcctcaacctcctgagtagctaaggactacaggtgcctgacaccacgcctggttaattttgttttttttttttttaattgagatggtgttttaccatgttttggccagggtggtcttgaactcctgggctcaagtgatccatccacctccacctcccaaagtgctgggattacaggcatgcgccactgtgcccagccagaacttattcatcttgtataattgaaactttatatcccttgaatagtgacttcccatttcccctgccccagccccaggcaaccacctaccatatgatccagcaatcccacttctgggtatttatccaaaagaactgaaatcagatctcaaagagacctccgcatgcccgtgctcattgcagcattattcagcaaagccaagatacggaagccttgatgagcccacaaggtggacggatgaatgaggctgcacatgtgatgcactcttaacagtgcgatctagccctgcttcccggtggagcataacagggaatttttaatcgatgaattctctgacctgggaaatgttagcaatcccagtgtgtccttttggccctacacacgtcaccttcctgagcctcagtttccccacctgtaaaatggggataataatgcacctgcttattgtattattatatattataatatttattataacatgttatatgttatatttttatatgttatattattatgcttattgtaakactacagagagggctgagctaaggaccatgaggtgagcgtctttggcagctacagggcaagcgctcagtgctgtcacctgttaagatcgtggaaactaagtcatctgtttatcacggcatcatgtgacatgc

SEQ ID NO: 40416 - DNA, 607 bp, Homo sapiens
agtccctccctaatagcccagggaactcctgagtttgcattatggcatttgtgactttgggcaatagagctggtgtcaaaaggaacatatatctgtagtactcctaggcatccattttactttcctttagatggagtcttaaaataaaaaggaattttctgttctaagcataggttctgctccagatatgcagaacccctttaattattcacagtggctgcaccaagaacgcttcctggtgactccagaccccctggggtagcagcgtgggtgggagctcaccgttcctccctgtgtcccgcaggccccttcccctgctgccgtgggctcctcctccggggtagtcttagctccctktgctcaccttgcacagagcgaagtactttcagctcaggtcactgaacagaaacccgcaggagccggtgcacaccgaggcgactcttctaaatcaatacaaaaatgatggcggtgacatttcaccttcacagggtgcagctcaaacagagccgggctggagcagtaaaattgaaactaaatggaatttcaggggtgacggcggcgggggctgaggtggcgaggttgcctttgtagcataaattcatatgca

SEQ ID NO: 40417 - DNA, 1573 bp, Homo sapiens
aagtgtgaggggtgtgtatgatggaaatggggagagagaaaactacctcagtgcactcacatgaagccttcttcccaggagggaatcttcataatgaaaaggagaggagccttctcccacctcgtggagggggtggcagtggtggaaggctggaactgacaagcaaggaaatatgaaaggattataattggaaaaagatgggcataaaatgaaaaagccaaagtatgttttattttgcacctgtgtattcgggcttgctcggtttatttattaagccgttatcaaagtaaagtaagacaagtgagtcttagtctaatgaaattgcccctctgtgggccatgttggcatcaggtatccagagcataattggataacaatgacaattactgtgtcgggagtttcagcactggacggcctccgctttcctgtgctttctgtgcggtgtagctcatgagcgttctgatggagcaggggagggccggcttttccagctctggttccgacttggaactgcagggtgggtgccgatcgggcctaatgggccctcacatctcagcccctggcgttgatctcagattcagagcctgcgttatggcccaggtgaaaagcacgtctgttgccatttgataaactttcactcagtggcagtttgcctgctccgggcatctgtgagccaggcaattgtctgtcttggggtcagggggccaaggagccccacctgtgactcctgcttcattttttaaagtatggactcattgcttctcctgccagccatccttccctgagtaactccattgcctgtatcatttcactgctgagaattgggcacctctgtaaaaattatattgacctgcaggaactaagatctgcaagtgcctgtgtgcttaaatgtgcaggaatcaaactgcttggctgataaccttttattgattcatctcctttcactgctttgatgagcctgaggcctcctcagataaggaatggatgtgctggtgttgtggccaggcatggaagttctgactctagatgttaaaatgatgtgtttgcagactgaggacatgcacctttatcacggtccgtggcgacctcaggctgtggcccatctggctgcatggtgcagctgccccttctgctctgagaggcagaggccctcttacgcctggtgctcagcccttgggaagtggctcagcttccctttagagtctccctgaagtgtctacaataattgttctgagaatgttcaaaatgcaagggaaatagaggccatttggcagggactttgggagagaaggggagtggtccatgcaggatcttttctcccctcgagaacaaggagctgagactttgctggctccccctccccagtctgtgggagcccagtggatagaggaagagcagcctcacagcagtcaggcctgcctgggctggccgtgccacttacctgggaggagttgatttgagggacttctcttcrtaggtggcaatggcaagtattcttactggggagattcatgattgacttctggaggctttgccatagcagggttcattatgagcagctgaaagtggatgc

SEQ ID NO: 40418 - DNA, 716 bp, Homo sapiens
agtgtcacctccatcctcaggaccctccatgagtgtcacctccatcctcactcaggaccctccatggtgtcacctccatcctcactcaggaccctccatggtgtcacctccatcctcactcaggaccctccatggtgtcacctccatcctcactcaggacmctccatggtgtcacctccatccttactcaggaccctccatggtgtcaccgccatcctcactcaggaccctccatgagtgtcacctccatcctcaggaccctccatgagtgtcacctccatcctcactcaggaccctccatggtgtcacctccatcctcactcaggaccctccatggtgtcacctccatcctcactcaggaccctccatggtgtcacctccatcctcactcaggacactccatggtgtcacctccatccttactcaggaccctccatggtgtcaccgccatcctcactcaggaccctccatgagtgccacctccatcctcaccaggatcccctgtaagtgtcacctccatcctcaccaggaccctccatgagtgtcacctccatcctcactcaggaccctccatggtgtcacctccatcctcactcaggaccctccgtgagtgccagctctgtctaccctcgggaccctccatgagtgtctcctctatctaccctcaggaccctctgtgaatgtcctcgccatccatactcccccctcttagaccc

SEQ ID NO: 40419 - DNA, 716 bp, Homo sapiens
agtgtcacctccatcctcaggaccctccatgagtgtcacctccatcctcactcaggaccctccatggtgtcacctccatcctcactcaggaccctccatggtgtcacctccatcctcactcaggaccctccatggtgtcacctccatcctcactcaggacactccatggtgtcacctccatccttactcaggaccctccatggtgtcacckccatcctcactcaggaccctccatgagtgtcacctccatcctcaggaccctccatgagtgtcacctccatcctcactcaggaccctccatggtgtcacctccatcctcactcaggaccctccatggtgtcacctccatcctcactcaggaccctccatggtgtcacctccatcctcactcaggacactccatggtgtcacctccatccttactcaggaccctccatggtgtcaccgccatcctcactcaggaccctccatgagtgccacctccatcctcaccaggatcccctgtaagtgtcacctccatcctcaccaggaccctccatgagtgtcacctccatcctcactcaggaccctccatggtgtcacctccatcctcactcaggaccctccgtgagtgccagctctgtctaccctcgggaccctccatgagtgtctcctctatctaccctcaggaccctctgtgaatgtcctcgccatccatactcccccctcttagaccc

SEQ ID NO: 40420 - DNA, 726 bp, Homo sapiens
atgatctgaggtggagcagtttcaaccagacaccaacccccacccaacccaggtccataaaatagttatcctccacgaaactggtccctggtgccaaaaacgttggggaccactggttgaagccacctggtttgtggtacttagtatggcagcatgagctgagtaggacatggagccttgccctcccrtcctggcttgtgcaagacgaacccccatcacccactctagcaaagacccccaaccagacagtgggctgaagacactcagcctacccaccccagctggctctgggctggttccaggtggcaccatcttgcagcccacattcccatgggctttggaggggggcaggtgacctaagccatccaactggcacgaactttggaattttacaaggccacccatttctgtaagccgcaggagagctgtcctgcaaacaaattcatcttgcaggggacaggggagcagagagagcaatggagaggccaccctagcttctgccacacctggccagcccctgccacacttctgctccatgtccttcttctctttaatagatttttcaaatccctaaggctcccaagtaatgcattcaataggacgaaactgtcctaactctttctgaaacattgcttagttcaccacttagacagggcctggcacttgctatatgttcatgaagcttttgtggaattaaaggacaagggaatctacaaattagtcttt

SEQ ID NO: 40421 - DNA, 726 bp, Homo sapiens
atgatctgaggtggagcagtttcaaccagacaccaacccccacccaacccaggtccataaaatagttatcctccacgaaactggtccctggtgccaaaaacgttggggaccactggttgaagccacctggtttgtggtacttagtatggcagcatgagctgagtaggacatggagccttgccctcccgtcctggcttgtgcaagacgaacccccatcacccactctagcaaagacccccaaccagacagtgggctgaagacactcagcctacccaccccagctggctctgggctggttccaggtggcaccatcttgcagcccacattcccatgggctttggaggggggcaggtgacctaagccatccaactggcacgaactttggaattttacaaggccacccatttctgtaagccgcaggagagcygtcctgcaaacaaattcatcttgcaggggacaggggagcagagagagcaatggagaggccaccctagcttctgccacacctggccagcccctgccacacttctgctccatgtccttcttctctttaatagatttttcaaatccctaaggctcccaagtaatgcattcaataggacgaaactgtcctaactctttctgaaacattgcttagttcaccacttagacagggcctggcacttgctatatgttcatgaagcttttgtggaattaaaggacaagggaatctacaaattagtcttt

SEQ ID NO: 40422 - DNA, 578 bp, Homo sapiens
acttatgttaccaaaagccacttataccccaataatttatggagaaaaataaaatttaaaattattttttaaatttttcgtgggtacacatagtagttatgtatgtttataaggtatatgagatgttttgatacaaacatgcagtgtgaagtaagcacatcatggagaatggggtatccatctcctcaagtatttatcctttgagtcacaaacaatccaattacactctttaagttactttaaaatatacaattattaactatagtcaccatattgtgctattgaatagtaggtcttattctttttttttttcagtacccattaaccatccccacttcccccacgaagggatttaatataggtatttgggacttacacaatcattacaccataagaagaatggggggaaggaagggcaagctacttctgaatggttttatccattaaaggaattggttgtatgcaacagaaatggactgtggctggttgaagcagaaaaagactttawtgtgtacagtgtcgaagtaataggaggatcttctggatatcattactgagccaaggattgttcagatgca

SEQ ID NO: 40423 - DNA, 1381 bp, Homo sapiens
  misc_feature (1)...(1381): n = A,T,C or G
tgcaatgttcttgaaatatctatgccagattgtgatgctgaataatgactctygcattttggtaaaaaatttacagcagatgtccctaaagtttgaaagtaaatattcttttgataggcagcttttgccttgcttctaagctccaataaaaatggaatgcttaacttctaggagagaatcatgaacctgaactacctttattaactgggtattatcttatcaagcctcacaactgtgatgtccccaacagcatacaaagtgaatgtagtgtatatgagagtgagtataggtaggtgctaaatgcacaagggagtttcataagcaggtttctcctgtgaatgttgagcataaacttccactgccaacccagtcttgacccctactttgggtttgatggggttgccctatgatcagataattgagaagaaaacattttagccagtggggattatctcnaacccggaangngggtantccacatcagggnnnnnnnnnnnnnnnnnnnnnnnnnnnnnnnnnnnnnnnnnnnnnnnnnnnnnnnnnnnnnnnnnnnnnnnnnnnnnnnnnnnnnnnnnnnnnnnnnnnnggaaaaactccccctgcaccttcacttttattttgggtaggcctggcagacgcctggccgtggaattgaggggacactatacaaggatccccggaattccaataacagggcttagttatctacagtgtaattgtgtacaaaatgctgtttgacctcagtcttttctacaatgaatccaagaaggatgtatgtacctgtagaatgagattgatctcgaatgcaaatatagagattagataaagctcaaattttaaataagggaaaaataattgctatgctcctacgtgctgaaaacatcttgtctattgaaatatatgaccacatgagcttcatcaaattacttacccaagcaaagtggaagaaattgcttgaaatggaataatcatgcctctgttctccacagtcagaagctaagttttaaggagcgagtgcgcatggctagccccaggggccagagtattaagagccgacaagcctcagtaggtgacaggaggtccccaagcaccgacatcacagccgagggcagtcccaccaaagtgcagaagagctggagcttcaacgaccgaacccgcttccggccctcgctgcgcctcaaaagttctcagccaaaaccagtgatagatggtaagccctgtttttccataaccatttttaattggataggctatagtgagtgagattatgaagtaattaattctccatagtgccacttgaagaaagaagaaaacaaccccagagaaagaattgtttgtttgttttattggaagtttattcattgccttgggcaaatgtaca

SEQ ID NO: 40424 - DNA, 1381 bp, Homo sapiens
  misc_feature (1)...(1381): n = A,T,C or G
tgcaatgttcttgaaatatctatgccagattgtgatgctgaataatgactcttgcattttggtaaaaaatttacagcagatgtccctaaagyttgaaagtaaatattcttttgataggcagcttttgccttgcttctaagctccaataaaaatggaatgcttaacttctaggagagaatcatgaacctgaactacctttattaactgggtattatcttatcaagcctcacaactgtgatgtccccaacagcatacaaagtgaatgtagtgtatatgagagtgagtataggtaggtgctaaatgcacaagggagtttcataagcaggtttctcctgtgaatgttgagcataaacttccactgccaacccagtcttgacccctactttgggtttgatggggttgccctatgatcagataattgagaagaaaacattttagccagtggggattatctcnaacccggaangngggtantccacatcagggnnnnnnnnnnnnnnnnnnnnnnnnnnnnnnnnnnnnnnnnnnnnnnnnnnnnnnnnnnnnnnnnnnnnnnnnnnnnnnnnnnnnnnnnnnnnnnnnnnnnggaaaaactccccctgcaccttcacttttattttgggtaggcctggcagacgcctggccgtggaattgaggggacactatacaaggatccccggaattccaataacagggcttagttatctacagtgtaattgtgtacaaaatgctgtttgacctcagtcttttctacaatgaatccaagaaggatgtatgtacctgtagaatgagattgatctcgaatgcaaatatagagattagataaagctcaaattttaaataagggaaaaataattgctatgctcctacgtgctgaaaacatcttgtctattgaaatatatgaccacatgagcttcatcaaattacttacccaagcaaagtggaagaaattgcttgaaatggaataatcatgcctctgttctccacagtcagaagctaagttttaaggagcgagtgcgcatggctagccccaggggccagagtattaagagccgacaagcctcagtaggtgacaggaggtccccaagcaccgacatcacagccgagggcagtcccaccaaagtgcagaagagctggagcttcaacgaccgaacccgcttccggccctcgctgcgcctcaaaagttctcagccaaaaccagtgatagatggtaagccctgtttttccataaccatttttaattggataggctatagtgagtgagattatgaagtaattaattctccatagtgccacttgaagaaagaagaaaacaaccccagagaaagaattgtttgtttgttttattggaagtttattcattgccttgggcaaatgtaca

SEQ ID NO: 40425 - DNA, 506 bp, Homo sapiens
gtcaccctatctctagtgaacctagaagtcttgggtgatgtataagcccagataacccagaatatgtagtgaaatgatgtctgaagccttcagttaaagggatagaggatttagaactgcactgtccaatatgataaccactggctacttgaggctactgaggctatttaaatttgaattaattaaaatgaaatacattttaaaatttagtkgatcagtcgcaccattcatatttcaactgttcgatagccacaggtggccagtggctacttcattagacaaagaaacgaaagatttcccatgtcacagaaaattttattgaacattactggtctagaagtcaccttgaaattttcacatgttgagtatatccataaaagaccctaaagtaaaggtgggacaattcagtccacgaattaatctgacttgcaacaagtatggaaaatcttatctagtgagagcagattaggcttcctaaaagtcatacttaacccagtttatgtcat

SEQ ID NO: 40426 - DNA, 539 bp, Homo sapiens
tagtcattacatatatatacatgaatcttgggcaaagttttacacaaaaattaatatatgctgtttaaatttaaaataacagggcaggcatggtggcttatacctgtaaacccagcagtttgggaggctgagttgggcagatcactttagctcaggaattcaagaccagcctgggcaacatggtgaaaccctgtctctaaaggraaaaaaaaaaaagaatgacactaaaataacaaatatttgaaagtcatatacaactgcatatttatggaagagccccagaataataacttttttaaatataacagaaattgtatttatgtactgaacaggcaggtaatttatcagatatgcacaccaatgcaacgtataagtactgtgtaaaggattcaccatttggggaaagagctttgttaaaacagtgcaatgcaaagcttacctgcttcttaccggtattgttttcaatgaattactacatctaggatcaaggctactcttttttttttttttcaatttttaaaactatttcaacagatata

SEQ ID NO: 40427 - DNA, 539 bp, Homo sapiens
tagtcattacatatatatacatgaatcttgggcaaagttttacacaaaaattaatatatgctgtttaaatttaaaataacagggcaggcatggtggcttatacctgtaaacccagcagtttgggaggctgagttgggcagatcactttagctcaggaattcaagaccagcctgggcaacatggtgaaaccctgtctctaaagggaaaaaaaaaaaagaatgacactaaaataacaaatatttgaaagtcatatacaactgcatatttatggaagagccccagaataataacttttttaaatataacagaaattgtatttatgtactgaacaggcaggtaatttatcagatatgcacaccaatgcaacgtataagtactgtgtaaaggattcaccatttggggaaagagctttgttaaaacagtgcaatgcaaagcttacctgcttcttaccrgtattgttttcaatgaattactacatctaggatcaaggctactcttttttttttttttcaatttttaaaactatttcaacagatata

SEQ ID NO: 40428 - DNA, 539 bp, Homo sapiens
tagtcattacatatatatacatgaatcttgggcaaagttttacacaaaaattaatatatgctgtttaaatttaaaataacagggcaggcatggtggcttatacctgtaaacccagcagtttgggaggctgagttgggcagatcactttagctcaggaattcaagaccagcctgggcaacatggtgaaaccctgtctctaaagggaaaaaaaaaaaagaatgacactaaaataacaaatatttgaaagtcatatacaactgcatatttatggaagagccccagaataataacttttttaaatataacagaaattgtatttatgtactgaacaggcaggtaatttatcagatatgcacaccaatgcaacgtataagtactgtgtaaaggattcaccatttggggaaagagctttgttaaaacagtgcaatgcaaagcttacctgcttcttaccggtattgttttcaatgaattactacatstaggatcaaggctactcttttttttttttttcaatttttaaaactatttcaacagatata

SEQ ID NO: 40429 - DNA, 552 bp, Homo sapiens
tttttttttagagaaatctaattatgtgccaagaactttaattaattgtatcaaaaccccatgaagcrgttttttttttttattttgagacagagtctcactctgtcacccaggctcaagtgcagtggcatgatctcggctcactgcaagctctgcctcccaggttcacgccattgtcctgcctcagcctcccaagtagctgggactacaggtgcccgccaccatgcccagctactttttttgtattttttttagtagtgtcggggtttcaccatgttagccaggatggtctcgatctcctgacctcgtgatctacctgccttggcctcccaaagtgctgggattacaggcgtgagccaccacgcccggcctgagtgtgttttaccattacctcttgttttatagattatgaaagtgaggaacagaaggctaagaaacttgccgagcgacacctggagaataaatgacagaatgagaactttaaccccagcagttgggttctggagctgtctgaccctgagcctcacctctgaccacttccagatttgccct

SEQ ID NO: 40430 - DNA, 552 bp, Homo sapiens
tttttttttagagaaatctaattatgtgccaagaactttaattaattgtatcaaaaccccatgaagcggttttttttttttattttgagacagagtctcactctgtcacccaggctcaagtgcagtggcatgatctcggctcactgcaagctctgcctcccaggttcacgccattgtcctgcctcagcctcccaagtagctgggactacaggtgcccgccaccaygcccagctactttttttgtattttttttagtagtgtcggggtttcaccatgttagccaggatggtctcgatctcctgacctcgtgatctacctgccttggcctcccaaagtgctgggattacaggcgtgagccaccacgcccggcctgagtgtgttttaccattacctcttgttttatagattatgaaagtgaggaacagaaggctaagaaacttgccgagcgacacctggagaataaatgacagaatgagaactttaaccccagcagttgggttctggagctgtctgaccctgagcctcacctctgaccacttccagatttgccct

SEQ ID NO: 40431 - DNA, 552 bp, Homo sapiens
tttttttttagagaaatctaattatgtgccaagaactttaattaattgtatcaaaaccccatgaagcggttttttttttttattttgagacagagtctcactctgtcacccaggctcaagtgcagtggcatgatctcggctcactgcaagctctgcctcccaggttcacgccattgtcctgcctcagcctcccaagtagctgggactacaggtgcccgccaccatgcccagctactttttttgtattttttttagtagtgtcggggtttcaccatgttagccaggatggtctcgatctcctgacctcgtgatcyacctgccttggcctcccaaagtgctgggattacaggcgtgagccaccacgcccggcctgagtgtgttttaccattacctcttgttttatagattatgaaagtgaggaacagaaggctaagaaacttgccgagcgacacctggagaataaatgacagaatgagaactttaaccccagcagttgggttctggagctgtctgaccctgagcctcacctctgaccacttccagatttgccct

SEQ ID NO: 40432 - DNA, 552 bp, Homo sapiens
tttttttttagagaaatctaattatgtgccaagaactttaattaattgtatcaaaaccccatgaagcggttttttttttttattttgagacagagtctcactctgtcacccaggctcaagtgcagtggcatgatctcggctcactgcaagctctgcctcccaggttcacgccattgtcctgcctcagcctcccaagtagctgggactacaggtgcccgccaccatgcccagctactttttttgtattttttttagtagtgtcggggtttcaccatgttagccaggatggtctcgatctcctgacctcgtgatctacctgccttggcctcccaaagtgctgggattacaggcgtgagccaccacgcccggcctgagtgtgttttaccattacctcttgttttatagattatgaaagtgaggracagaaggctaagaaacttgccgagcgacacctggagaataaatgacagaatgagaactttaaccccagcagttgggttctggagctgtctgaccctgagcctcacctctgaccacttccagatttgccct

SEQ ID NO: 40433 - DNA, 1301 bp, Homo sapiens
aataaaactgcagccttttatttattgaagtattgtactatttagtacgcagataggactaagcctttttcatgcctgttttttgtagagtttgtagtttaggaatcattttaaaatttttacatggtttaacccaggaggcagaggttgcagtgagctgagattttgcgactacactccaacctgggcaacagagcgggactccattccaaaaaaataagaaaaacagaaaaataataattacatctgcaaagaccttatttccaggtaagtccacattcacaagtatcaggaattagaacttggacatatctttttgaggtattcaatttaacccactacacccagttgacaatatatatcaacaccctcttcacttagtgtcctgaaggaattgatcctatagtggaaaagtttttgtttctattttttcttttttttttttctgaaatcgagttttgctcttgtcgcccaggctagagtgcagtggcgtgatctcagctcactgcaacctccacctcccaggttcaagtgattctcctgcctcagcctcccgagtagctgggactacaggcgcgtgccaccacgcctggctaattttttgtatttttagtagagacggggttttaccatcttggccaggctggtctcgatctcctgacctcatgatccacccacatcggcctctcaaagtgctgggattacaagcgtgagccaccgcgcccggcctgttgctctttttctttgtacattctgttaatattttcatcgttaattagtaaatgatggcagtgtttttcagactgcaagttgtcacccattagagaatggtgaaattagcttagtcggtcacaatcaataccctttataatataaaagaatgtagcaaagtctattaatttctttttgaaatatatagacatgatgtaaaatgttttggtttttttttgttgttgttgttgggggggacagaatctcactctgacgcccaggctggagtgcagtggcacaatctcagctcactgcaaccacctccgccctctgggtccaagtgattttctgcctcagcctcctcagtagctgggattacaggcacccgtcaccacacctggctaattttgtatttttagtagacacagggtttcactatsttggccaggctggtcttgaactcctgacctcgtgatccacctgccttggcctcccaaagtgctgggattacaggcgtaatccaccgtgcctggtgtaaaatatattttttattatgagtctaagtcaaaaaagcataagaaacatgtatg

SEQ ID NO: 40434 - DNA, 564 bp, Homo sapiens
catcataaacttgttactcttctatcatgcaagaataggctgagcttagttggagrcctgtagtttaaaattcatcatttcgctgtacagttatgactgtgcaaaagaagtgtttgcatatcgtgggtattttttccattgttttgcaaaaattcttaaccaagttataaggagatgaaaagctattttggtctgtatttgaaaatctgtatattagagcacatttattatatatgtaaataataataaaataaatttcattgtttctgttttttactttttcctcatactaccattttcttacaacagagcctaacataattatggctgttcatttaaaaaggtttggagatggtaatatctagtgaagtgagatagacctcagcaaaaaaaaaaatccacatctgcaaataactggtaggatacatgttaatgagttgtttctgtggtcccagtgccttaagtgtgttcaggatccaaatctaaatgcaatgtgcttttgaacactaaaagtgacagggcaaaatctgggtggcttatcactggtgaaaacaggtgcacacc

SEQ ID NO: 40435 - DNA, 1101 bp, Homo sapiens
gggagtatgtgataaatctgtaccttctgctcaattgtactgtgaacctaaaaaaagtttaaaaagttaagtaaatttttaaaagttaaaaacttatgcccagaggggtgggaagatttaaaggaaactagcaacagcctggacagcatagtgagaacctatctctaaaaaaaaaattaaaaaaattagactagcttggtggcacatacctgaaatcctagctacctgggagactgaggtgggaggattgcttgagcccggcatgttgagactgttgtgagctatgatcacaacactgcactctagcctgggtaacagagtgacatcctgtctcataaacaacaacaacaacaacaacaaaaacaacaacaacaaaggaaactagcaatcaatcatttaagttagtgaaagggggtatttaaacctttttgtggttgcagagtgaccttgtcatattctgagtattgctcctgttctgtcaggtatatcatggtctgaatgtcagcaagggtgcccttcattttctctaattgtcagaaaggtatattttcaaattatcacactgtaatgtcattcttcaaattaggctatagaactttattataggagaagacaacactttatcccaatttttcattaagataaaatctctttgtagtatccagtatgagtttatataacatcaaatttcttattactttttaattcctttatttattcttatcacgttccaagtacttgttttaacctaaagaagtataataagtcaggaaacaacaggtgctggagaggatgtggagaaataggaacacttttacactgttggtgggackgtaaactagttcaaccattgtggaagacagtgtggtgattcctcaaggatctagaactagaaataccatttgacccagccatcccattactgggtatataacccaaaggattataaatcatgctgctataaagacacatgcacacgcatgtttattgtggcactattcacaatagcaaagacttggaaccaacgcaaatgtccatcaacaatagactggattaagaaaatgtggcacatatactccatggagtactatgcagccataa

SEQ ID NO: 40436 - DNA, 1101 bp, Homo sapiens
gggagtatgtgataaatctgtaccttctgctcaattgtactgtgaacctaaaaaaagtttaaaaagttaagtaaatttttaaaagttaaaaacttatgcccagaggggtgggaagatttaaaggaaactagcaacagcctggacagcatagtgagaacctatctctaaaaaaaaaattaaaaaaattagactagcttggtggcacatacctgaaatcctagctacctgggagactgaggtgggaggattgcttgagcccggcatgttgagactgttgtgagctatgatcacaacactgcactctagcctgggtaacagagtgacatcctgtctcataaacaacaacaacaacaacaacaaaaacaacaacaacaaaggaaactagcaatcaatcatttaagttagtgaaagggggtatttaaacctttttgtggttgcagagtgaccttgtcatattctgagtattgctcctgttctgtcaggtatatcatggtctgaatgtcagcaagggtgcccttcattttctctaattgtcagaaaggtatattttcaaattatcacactgtaatgtcattcttcaaattaggctatagaactttattataggagaagacaacactttatcccaatttttcattaagataaaatctctttgtagtatccagtatgagtttatataacatcaaatttcttattactttttaattcctttatttattcttatcacgttccaagtacttgttttaacctaaagaagtataataagtcaggaaacaacaggtgctggagaggatgtggagaaataggaacacttttacactgttggtgggacggtaaactagttcaaccattgtggaagacagtgtggtgattcctcaaggatctagaactagaaataccatttgacccagccatcccattactgggtatatamcccaaaggattataaatcatgctgctataaagacacatgcacacgcatgtttattgtggcactattcacaatagcaaagacttggaaccaacgcaaatgtccatcaacaatagactggattaagaaaatgtggcacatatactccatggagtactatgcagccataa

SEQ ID NO: 40437 - DNA, 1266 bp, Homo sapiens
agttcctcgcaacgccacaaagtgtggtcaggaatgtcttttcagtggctctattgttactaacgtttacgacaagtcaatgtctctcgatttttctctggaaaacacacacacatacacacacacattttttctctggaacacacacacacacgcgcgctttgacttacggttggcactaccatttaaaatatttttatttgtatgtttaaagtcttttctagcaccaccacctttccctgtatttatatgtgctgttgcattgccccatcattgtttaatatgtatcaccctctctctccaccccataaatagcaaattcctcaaggacagcgatgatgccagctcctcattctgcaacccctgttgcacaaggctgtataaacaggaaatgtgagtgctttgacgattaataatttggtccatatgttccctgaaacatttacaacccaggaacactggaaataagtgaccaactacaggaaaaaactttggtaaattaccgtccttgaaaaaacataacrgttattaaaaatgagacttgggaatctacaataatgtggggaaacacttatgctacaatgttacgtgaaaggaggattaaaatataagtagcctatgattctaactatatgcatatattattattttgctatttatttaaacccagtcttgttccaaaaggaatttaagacaaatggtacaaatatgtatatagtcacagacatctgaaaaaatactaaacaaaaaaccatgattgttcccttccttcccaagtagcatgtgggaaaagtcagtatcattcttttaggtgaggtcttgactgtccacagcaatgagaggattctgggcgtcctttgcctcccctagagacctggacgtgaagacagggtttgaaattcattgtctgctgagatgagaaaccacaaacatctctactctgggttcttgtggtgaacagggcctgtgcccacatgtacatcaccaagaacctgtagaggaacctggcccctgcccaacgatgcccatggatgctgtaccagagagaagaggctcataatgccccacacccagcgggttcggccagggcatctaattcttggccaggccgcctggcagcaagtgtggccccactcccgttagagtggaagatagcaggagacctgctgcaggatcctctcccaaggctacttcttcttccagtcatatagctggagtgcagtgacgtgcagtgacgtgatcttggctcactgcaaccttcacctt

SEQ ID NO: 40438 - DNA, 532 bp, Homo sapiens
tggacaaatsagtgaagttctgacatgtgttgattgtcttttgtcttatttgttaatgtaaataaaaatatcaaccaacattcatgccagattacacttgtgaaccaattgcaatcacaggatggctagagatagaagaatttgggaaaaataaaaagatactttgtgaataaattggttatgtggaattagcaataaggagtattatctattttatttatattagctacatttattatacacttatgtatgtgtgtggattttgtgccagttgttaaacatttaccagctcacccctggaaacatggcatgtaataaatgttagttgtttttattagtagtatggcaataacacgatgctggtccctgcgaagggataatgtttctaaagaccaaatgtttggcaggaaagtaaactgatcaagatgacttaaattttaaagatgagttaaattatatatgccaagaaaggccatcactgaactgaaagaacttatgtaacagaagcactatgcaatacacagaagtcatc

SEQ ID NO: 40439 - DNA, 532 bp, Homo sapiens
tggacaaatcagtraagttctgacatgtgttgattgtcttttgtcttatttgttaatgtaaataaaaatatcaaccaacattcatgccagattacacttgtgaaccaattgcaatcacaggatggctagagatagaagaatttgggaaaaataaaaagatactttgtgaataaattggttatgtggaattagcaataaggagtattatctattttatttatattagctacatttattatacacttatgtatgtgtgtggattttgtgccagttgttaaacatttaccagctcacccctggaaacatggcatgtaataaatgttagttgtttttattagtagtatggcaataacacgatgctggtccctgcgaagggataatgtttctaaagaccaaatgtttggcaggaaagtaaactgatcaagatgacttaaattttaaagatgagttaaattatatatgccaagaaaggccatcactgaactgaaagaacttatgtaacagaagcactatgcaatacacagaagtcatc

SEQ ID NO: 40440 - DNA, 699 bp, Homo sapiens
gctgaagtgaagacaaatggaagatgtaggctcttggcacattttctgacatattataaataccaaataaatagtttctattactatttatgtagaacatctaactggaagcctaatcagagaaaataaattgaaaaataaggtcctgtaaccatgacattatagctttagctcattaactaggaactttaagcaataaaaacaagtctttatgaaattcactgaattaatactctgactaaatatacttatacacttactaaagttgttaatcacaattacaagagtatcaacacgtatggtggaaaaatggtaaaatgaaaccaggatttggcagttacagatacatttgacccttagtcaacagatctttccattataaaaactgcttctttttaattgatttgagtttacaaggttttctttaaaattaaaatgttcccttaaaaaatacataataaaaaataaaaataaaaataaatgtttccctgaaggctatcagttgttcacacctcactgttaattaatcagatacayactttaagtaacaccggtgtacttaaaaggaattgttagttgaaaagtggtgagaagaggggtaatcttagtggagcaggcctatataatgctcattgtgagaatttttaccagtcaccaggcagcatgatgataatggcacctacaaggtgacagcagagg

SEQ ID NO: 40441 - DNA, 619 bp, Homo sapiens
ctttaaaaaaaagcatttctttttttggaagcttttcttataagatatgaatctggaaacataggaagtgacaagacatataaattaacatgcaaatatacatttttttagcctttccgctattaacttgtttcaatgggaataatctgggctcagatgacttcctccctcttaaaacaattaatgtcaagaagcatactatttttactcacttaccctgcccaccatgatgtcaaacacactgaagaaaataattctattacataatttccctctttccctaatattctttagaatttctcttaggtgtaaaagttaaatattgactcagttttacttctgtgaaattcaaacggcctttcacaataatacaaatatacatggcattattttaaactttttgagaaggagatagtaaagggtgggtaagcraagtaaaaaggaattctttccaaagttaagtttcagaagaaaaatataaaactcatgcctctaagatacctagaaacaaaatcaccaccgttattaaaattgctttttacctaatctcctgagcaaagtagtcgttgataaatactttagcacacacataaaagtaccctctaattggataccgttt

SEQ ID NO: 40442 - DNA, 1028 bp, Homo sapiens
attacaggtgcataccaccacacccggctaatttttgtattttttggtagagacagggcttcaccacgttggccaggctggtctcaaactcctgacctcaagtgatctgcccaccttggcctcccaaagtactgggattacaggtgtgagccactgcacctagcagagaattgcttttcttgagctttggtgcagttacccctaatgagttccatcccagtgcctacagtaaagagttgttactgaagacccttttcatgatattacacaagatcttccttatggcgtgtcttaagataattttctttctggttttaatattaggaataagttgttttgctggttttcacctcgtgacccctgtggcttgggcacttaataagctcccaccttttcaagtgatctccgggaagcttggcatcaattggtggcccaccagtaatcaagagttggaatcattagggatacatttttgtatcccccttgttcctygtccttgtttttcctttcttttattcatctacctttaatttaatcttgattaactatatctgtatacgcactttaaatttttttaaagctatcccttacaggaaggaaaatcttttctagaataaggaagaggaggaaagaagaaaaaaaggagaaggtaaagaaggtcagagactactaaaagtccaaggaaaccacgaaggcctaagtcagatagaatggccagttcttcataagcatggggtaatgtataatgcatagcaaaacaaacatcaagaatagaaacctgtcagatcagagcatcagagctagtcggttgcaggagtcatgaagcatgatatgctgttaggaggagctccagagagcagagccccatatgaaccataagcaaggactgtttgatcctcacccagatttccaagctcagcaagagaaaaggaaggaaaatagaggggaaaaaaggtcttttctgtgttgctactcattattaggaatgatttggaaagccagttcataatattgtcctagaattgagc

SEQ ID NO: 40443 - DNA, 731 bp, Homo sapiens
cagttaatgggcccttgaaggtgagtatgggaagcttggacgtcactgaccctgtctaggtttagatgccccaaacattccacctaggctttcgctcagccttattcctggcacccaccttccaccacccaatatgagtccatcctccacrctgatgctgtcatgatcttcctgaaacacaacttggcctatcccagcactccctccttcagctccttcaatgtatccttatggagtaaagtccaaactcctaagcctgcctttcaaagtcctccacaacctccttttgagcatgatccttcatgcacctgtccttctacaggccccacctctctggctgactcgtgttgggccctctacccattctccttcctctctgcaacctcccttgccttctcccagggtcttctgttgaagatctgttattctttaaggcctggttctaatctcatgtccttcaaaactccttttaagatcttctagtttgaaatagtctctcaagccactgtatttgtatatcatgtatctacactagcacttatctgtctgcccagtatcagagttatttataaatgtctgtttctcctattatgttgtatgctcttagaaagcaaaaatagaattgacaaaagaaatatttgatgagtttctcgtatgggagtttataaaaacctttttggaatagttctatagatatctaaacactaagagcaaccatcctgagcctagga

SEQ ID NO: 40444 - DNA, 842 bp, Homo sapiens
cctatgaataggaaagtgaggtttccagtctattccagaggagccaatttaattcataatgtaactaactatagtatcttaacattatagaactcaagaagcttttaaaatctgattccaacagaaaaagtcattttgcattccagtatgaatgccatttcctccaagtacagccctggccacacgcttgaaggtcctctcccctgcacagggcccatgtagtggcagaatgtgccctcagccagtataaatggcagggaaggagagttcctkaagtgtctagtgtttgaagtgggtgcctaagtgtccccagcagcaaggaggagaggagagtttgaatgcttccttgcttcagggatgcgagtccttggctggaatggtcatttgtgtggaatgggcattcactgagcatgatttgtatgctgggaagggtctatttacttaatttgttgaattggagaatataagagctgaaaagatcatttaaggtgaactaatcgaaggtgcacactttatagaggaggagacagacactaaagacttgcctctggctatacaaaaattgtggcaagaccaggctatgaacccagatcttccatggagcagttcacttcatctgagttcagtttcttcatttgtttagtgggaatgatcatgtctccccagctcccagggttgttgggaggttcaaatgaggacatgcttatggaatctttataaattgcaaaaagccatgcaaatggaagttacttctgcttcttctgttcccaactgcttcttactcccgtcttcaaacttagtagtataatgaagtaatacaggagccaggatgtgtgatagca

SEQ ID NO: 40445 - DNA, 842 bp, Homo sapiens
cctatgaataggaaagtgaggtttccagtctattccagaggagccaatttaattcataatgtaactaactatagtatcttaacattatagaactcaagaagcttttaaaatctgattccaacagaaaaagtcattttgcattccagtatgaatgccatttcctccaagtacagccctggccacacgcttgaaggtcctctcccctgcacagggcccatgtagtggcagaatgtgccctcagccagtataaatggcagggaaggagagttcctgaagtgtctagtgtttgaagtgggtgcctaagtgtccccagcagcaaggaggagaggagagtttgaatgcttccttgcttcagggatgcgagtccttggctggaatggtcatttgtgtggaatgggcattcactgagcatgatttgtatgctgggaagggtctatttacttaatttgttgaattggagaatataagagctgaaaagatcatttaaggtgaactaatcgaaggtgcacactttatagaggaggagacagacactaaagacttgcctctggctatacaaaaattgtggcaagaccaggctatgaacccagatcttccatggagcagktcacttcatctgagttcagtttcttcatttgtttagtgggaatgatcatgtctccccagctcccagggttgttgggaggttcaaatgaggacatgcttatggaatctttataaattgcaaaaagccatgcaaatggaagttacttctgcttcttctgttcccaactgcttcttactcccgtcttcaaacttagtagtataatgaagtaatacaggagccaggatgtgtgatagca

SEQ ID NO: 40446 - DNA, 1188 bp, Homo sapiens
tgtgagctattttcattacctttgtatttataatatgcacaggaattaacataggataagctaaaatcagctttaattctttaatatagtaatgatttgtggtttccaccaactatatccatctgcatatgatacattactaactcaacagtcagccagaaatcatccccatcttctaagacaggaagcataggtaaattaatagtcatccatggaatacaccacacatgcacacatgtagagttatctacaggtctgaaagccccactcgactcatgataaaggcccagtctatgccttttctcttttaccttggtttttcccatagcacgaatgctgtgataagcactatagcagactggtcagaagcacagactctgtcaaagctaatttttaaagataggtctagaagcagagggccagttttcaggcctgctcacccatgataggtcaggcagagggggatgagcgggcactcacatccagtgtgtgtgtacgagcaattgccaaagttaaggacgacaaggggtaaatttttttttttttttttgagaccaagtctcgctctgtggcccaggctgcagtggtgcagtggcgcaatcttggctcactgcaacctccacctcccaggttcaggcaattcttctggctcagcctcccgagtagctgggattacaggcatgtaccaccatgcccggctaattttttgtattttttgtagagacggggtttcaccatgttggccaggctggtctygaactcctgacctcaggtgatccgccccccctaggcctttcaaagtgctgggattacaggcgtgagccaccgcgcccagccaaacaaggggtacatttttaagatagaaggaaaagtcatcagggaaggtgggttagatcagctgtgaaagtcccctcaaatatgcaagtactcacagatgattttcaggaaatactgttcgttttactgtgataatggtatatttgttgttaaaagaaaaaagagtccttatcttttaagagatacttactgatgtcttcatggatgaaatgatgtgatgtttgggatttgcttcaaaaagtcttaaggggtagtgagaaagacaggataagaaaataaatgaaatgtacttattggtgttgtgtatatttgaatccatttcactattctcttggcttttggagatgtttt

SEQ ID NO: 40447 - DNA, 1188 bp, Homo sapiens
tgtgagctattttcattacctttgtatttataatatgcacaggaattaacataggataagctaaaatcagctttaattctttaatatagtaatgatttgtggtttccaccaactatatccatctgcatatgatacattactaactcaacagtcagccagaaatcatccccatcttctaagacaggaagcataggtaaattaatagtcatccatggaatacaccacacatgcacacatgtagagttatctacaggtctgaaagccccactcgactcatgataaaggcccagtctatgccttttctcttttaccttggtttttcccatagcacgaatgctgtgataagcactatagcagactggtcagaagcacagactctgtcaaagctaatttttaaagataggtctagaagcagagggccagttttcaggcctgctcacccatgataggtcaggcagagggggatgagcgggcactcacatccagtgtgtgtgtacgagcaattgccaaagttaaggacgacaaggggtaaatttttttttttttttttgagaccaagtctcgctctgtggcccaggctgcagtggtgcagtggcgcaatcttggctcactgcaacctccacctcccaggttcaggcaattcttctggctcagcctcccgagtagctgggattacaggcatgtaccaccatgcccggctaattttttgtattttttgtagagacggggtttcaccatgttggccaggctggtctcgaactcctgacctcaggtgatccgccccccctaggcctttcaaagtgctgggattacaggcgtgagccaccgcgcccagccaracaaggggtacatttttaagatagaaggaaaagtcatcagggaaggtgggttagatcagctgtgaaagtcccctcaaatatgcaagtactcacagatgattttcaggaaatactgttcgttttactgtgataatggtatatttgttgttaaaagaaaaaagagtccttatcttttaagagatacttactgatgtcttcatggatgaaatgatgtgatgtttgggatttgcttcaaaaagtcttaaggggtagtgagaaagacaggataagaaaataaatgaaatgtacttattggtgttgtgtatatttgaatccatttcactattctcttggcttttggagatgtttt

SEQ ID NO: 40448 - DNA, 1188 bp, Homo sapiens
tgtgagctattttcattacctttgtatttataatatgcacaggaattaacataggataagctaaaatcagctttaattctttaatatagtaatgatttgtggtttccaccaactatatccatctgcatatgatacattactaactcaacagtcagccagaaatcatccccatcttctaagacaggaagcataggtaaattaatagtcatccatggaatacaccacacatgcacacatgtagagttatctacaggtctgaaagccccactcgactcatgataaaggcccagtctatgccttttctcttttaccttggtttttcccatagcacgaatgctgtgataagcactatagcagactggtcagaagcacagactctgtcaaagctaatttttaaagataggtctagaagcagagggccagttttcaggcctgctcacccatgataggtcaggcagagggggatgagcgggcactcacatccagtgtgtgtgtacgagcaattgccaaagttaaggacgacaaggggtaaatttttttttttttttttgagaccaagtctcgctctgtggcccaggctgcagtggtgcagtggcgcaatcttggctcactgcaacctccacctcccaggttcaggcaattcttctggctcagcctcccgagtagctgggattacaggcatgtaccaccatgcccggctaattttttgtattttttgtagagacggggtttcaccatgttggccaggctggtctcgaactcctgacctcaggtgatccgccccccctaggcctttcaaagtgctgggattacaggcgtgagccaccgcgcccagccaaacaaggggtacatttttaagatagaaggaaaagtcatcagggaaggtgggttagatcagctgtgaaagtcccctcaaatatgcaagtrctcacagatgattttcaggaaatactgttcgttttactgtgataatggtatatttgttgttaaaagaaaaaagagtccttatcttttaagagatacttactgatgtcttcatggatgaaatgatgtgatgtttgggatttgcttcaaaaagtcttaaggggtagtgagaaagacaggataagaaaataaatgaaatgtacttattggtgttgtgtatatttgaatccatttcactattctcttggcttttggagatgtttt

SEQ ID NO: 40449 - DNA, 593 bp, Homo sapiens
gcacaactggctactctccccattgcagccccaccattccatatcaggccctctgtatcatcctgcctagaacactctgttgccgttttcctttttctttcttttctttcctttccttttctttccttcctttccttcctttctttcttcctttcttcccttccttccttccttctttctttcttttcttttctttctgacagagtcttgctctgtcaccaggctggaatacagtggcatgatctcgtcgcactgcaacctctgcctcctgggttcacgccattctcctgcctcagcctcctgagtagctgggattacaggcacgtgccaccacacccagctaatttttgtatttttagtacagacagggtttcaccatgttggccaggatggtctccatctcctgaccttgtgatccgcctgcctcagcctcccaaagtgctgggattacaggtgtgarccactgcacccggccctattgcagttttctgtgtacatgtttgtcttccccacctggatgcagaaacctgagctgagtcttctgctacagtggcccacagttaggtgccacaaaaatccaaaagatacatttt

SEQ ID NO: 40450 - DNA, 629 bp, Homo sapiens
cgatctcctgaccttgtgatccgcccgccttggcctcccaaagtgctgggattacaagtgtgagccaccgcgcctggctttttttttttttttttttgagacggagtctcgctctgtygcccaggctggagcacagtggcgcgatctcggctcactccaagctccgactcccgggttcacaccattctcctgcctcagcctcccgagtagctgggactacaggcgcctgccaccacgcctggctaattttttttatttttatttttagtagagatggggtttcactgtgatagctaggatggtctcgatctcctgacctcgtgatccacctacctcggcctcccaaagtgctgggattacaggcatgagccaccgtgccaggccaacaattgttcatttaagtactgctctcctttcctcctcccctcaaaacttcatttgttccatcaaacaggctgatgtgtctttttcccatgggattttcttctgccttctctctcatggaggagtggttatctgcagacctactctcaactcaactgtgcatgggtaaaccaacccccatctgccaggaaaccacattcaattgtcctcaggaagagattctatttgttccctctataacacaa

SEQ ID NO: 40451 - DNA, 629 bp, Homo sapiens
cgatctcctgaccttgtgatccgcccgccttggcctcccaaagtgctgggattacaagtgtgagccaccgcgcctggctttttttttttttttttttgagacggagtctcgctctgttgcccaggctggagcacagtggcgcgatctcggctcactccaagctccgactcccgggttcacaccattctcctgcctcagcctcccgagtagctgggactacaggcrcctgccaccacgcctggctaattttttttatttttatttttagtagagatggggtttcactgtgatagctaggatggtctcgatctcctgacctcgtgatccacctacctcggcctcccaaagtgctgggattacaggcatgagccaccgtgccaggccaacaattgttcatttaagtactgctctcctttcctcctcccctcaaaacttcatttgttccatcaaacaggctgatgtgtctttttcccatgggattttcttctgccttctctctcatggaggagtggttatctgcagacctactctcaactcaactgtgcatgggtaaaccaacccccatctgccaggaaaccacattcaattgtcctcaggaagagattctatttgttccctctataacacaa

SEQ ID NO: 40452 - DNA, 1237 bp, Homo sapiens
tatgctctcagcaacagaaaattaaccaatatgaaagtagtgagtttgtagagcctgcaagaaatgcaggtgcaaatacacgcatggcactcagatgatataggtctggggttaaggagagaggactgggctggcaatttatgagtaatgttagcatgcggatataggatgagatcatcctgggagatattgccaagaaagaatttgaaggttgagaggaaaggaggccctgggacaaaagctttggaaacaccagtttttgagagctggctagaaatgcaagctggccaccataggaagagggacagaaggtaggaagaaaccaggaggtgctggtgttatagaaaccagaggtagaaagtggtcctttaagaatggattaacctggcaagtgctgctaggaggtcaggcaaactgaggactgaatgtgcctgtggagtctggtctttggtaaccttggaaagagcaggtttggttgcagtgatgacaacagggtcagattayggagatccaggggtgagggagagataagaaaatagataccatgagaggaggcagtcttaaaagaggcttaaccatctctggaagtgacgaaggattaaggaggagagtttataaagaatctttagtcaagctaagccactcctcatcatgaaacgttagtgaggtgttatgtgaggtagtattgcatattttacctaaatgatgaatttttgcatttttttttttttttagacagattctcgctctgtcatccaggacatccaggctggagtgcagtggtgctatcatgattcactggcacctctgcctctgggctcaagtgatcctagcacctcagccccccaagtagttgggaccacaggtgcgtgccaccgtacccagctaacttttgtgttttttgtagagatggggtttcactatgttgcccagccttgtttcaaactcttggactcaagtggttcacctgcctcagcctcccaaagtgctgggatgataggggtgaggcaccacgcttggttaatttttttttttatatgggagaaagaagcacatgtttgaatggttaggaggtgaaattggaagacttagggaagagggaatgcttacacacctcaatggttgtgcaaatgtaggaggtagtgggctccagatgggggagatggttctagagagaagagagaacaactcttccactgcgccgggagggaaggatgaggcagagagagcagatgca

SEQ ID NO: 40453 - DNA, 1237 bp, Homo sapiens
tatgctctcagcaacagaaaattaaccaatatgaaagtagtgagtttgtagagcctgcaagaaatgcaggtgcaaatacacgcatggcactcagatgatataggtctggggttaaggagagaggactgggctggcaatttatgagtaatgttagcatgcggatataggatgagatcatcctgggagatattgccaagaaagaatttgaaggttgagaggaaaggaggccctgggacaaaagctttggaaacaccagtttttgagagctggctagaaatgcaagctggccaccataggaagagggacagaaggtaggaagaaaccaggaggtgctggtgttatagaaaccagaggtagaaagtggtcctttaagaatggattaacctggcaagtgctgctaggaggtcaggcaaactgaggactgaatgtgcctgtggagtctggtctttggtaaccttggaaagagcaggtttggttgcagtgatgacaacagggtcagattatggagatccaggggtgagggagagataagaaaatagataccatgagaggaggcagtcttaaaagaggcttaaccatctctggaagtgacgaaggattaaggaggagagtttataaagaatctttagtcaagctaagccactcctcatcatgaaacgttagtgaggtgttatgtgaggtagtattgcatattttacctaaatgatgaatttttgcatttttttttttttttagacagattctcgctctgtcatccaggacatccaggctggagtgcagtggtgctatcaygattcactggcacctctgcctctgggctcaagtgatcctagcacctcagccccccaagtagttgggaccacaggtgcgtgccaccgtacccagctaacttttgtgttttttgtagagatggggtttcactatgttgcccagccttgtttcaaactcttggactcaagtggttcacctgcctcagcctcccaaagtgctgggatgataggggtgaggcaccacgcttggttaatttttttttttatatgggagaaagaagcacatgtttgaatggttaggaggtgaaattggaagacttagggaagagggaatgcttacacacctcaatggttgtgcaaatgtaggaggtagtgggctccagatgggggagatggttctagagagaagagagaacaactcttccactgcgccgggagggaaggatgaggcagagagagcagatgca

SEQ ID NO: 40454 - DNA, 1048 bp, Homo sapiens
cgtgtcttctcagccagggaaaggaagcaacttgcttttccttttgaacaaagcctgtgcctgaatgaacatctctggagagaaatgtgtttgtacattaaactggtaattaaaggtccccaaaaaaccaagtctcattactcagcttaaggagctgcctagatagcgtctggcatagtgtcaagtgtctgcttggtgcaaagctgagcctggagtcgtcccataggctgggggaccttggagacctgcctcctggggctctcctgcaccagactcatgtttacattgggctgatcataaaccaagcaggtcctcacacttctcaggtttcattgttctcctttctaaatatttaaacaggctgttaagaagagggccgtgtcaactgcctgattcagtgaacattacaatggttaattgtcgggatcacaacagacgtcacaaactccaggcaggttaaaatctctcagccttgaggaaagctgctgccagtcattcttctctagactgaaagagtctgttagaatcaagttcagataaggtaacactgatcacgtcaatttctyctgcacaaaatagagcatgtggtttgtactttacaaatatttgtctaattaatcactttcactgaggcagggagataataataccttatctttgtaaaatgcttcctatttgcaaagcactttcacccatatcatctaatttgctctttattgttgggtgttatttcttagccagactagggatgatcctagttattaatattaatattaaaagcaaccaccaccccaaccatagcagctgatttactgacagctttctatgttccatgcactgttttaagtacattacaagtaggatgatcagtgggaacagacaccaaaagaataaaaaagatcatgcatttgctttgcacatattgaattttatgcacttgctgggaggatgctatacttggaatatttttcccctccaaacctcatgttgaaatttgatccccattgttggaggtggggcctaacaggaggtgtttgggtcaaggtgt

SEQ ID NO: 40455 - DNA, 609 bp, Homo sapiens
tccaatcatccacagctaaactcctcttggccttcagacatgtcttttcttctctctgctgcactgttctgctcttctgttcatttgcttgtctccttctcttcttctggggtctgggctttatatagatacaggatagggggaatggtgggccaaaaggcagcttttgggcacaaaagcaggaatgcctgtcctcatttggggctgygggtattcaggcttgagggtgggggctttgctggagaatcgcccacttctgcccagtatttccctgtctcatgttcatataaccaacattagaagagagggacaatatgcatcagaaaaaagttccgtgtcattaaaagaccacttagccactaggccttaagaccaccaggtttgaggttgcaactatttttccccactccacgctgcatgaaactggatatatagggtcttcagttgctatgccaagttttaggggtcctgtattgtgctgaggaaccagcacccaagatctgagccgggccttttcaagcctcagcagacccattggtttctgggtggcatctctccttttttctcctaacagagactccttagtgtttcctggtaattaggaaaatg

SEQ ID NO: 40456 - DNA, 535 bp, Homo sapiens
aggtggtagaagttaaaaaatgtcatctttccagaatcctatcctttttgctacaaatgtaactctgtctattaaagagttatggtgaatcttcataattcattctttctctgtcagtcttgaatcagagcaaactacttagtatgcataagaaagacatgaagtttgtggaacagtgacaagattagtctactcttcctcttattgtaaatatctacctgtttttcaggactcagtttgtacaacaagtcttcagaaatcctttccactctctttatkaatccactcatggtgagattagtctttgttttaaactgggacatgcaaaagatgtgatgtctcctgaagttctatagcatttactgtgcacaagtcacttgacacataatggtaacatcaacagtaaaaaagctaacatttattagtttagcactatgttagcatttttatatatgtcactcatcctatgagtaagacagttttattgttctttttaatatacatttttatttacctttaaagatgtctagtttcc

SEQ ID NO: 40457 - DNA, 535 bp, Homo sapiens
aggtggtagaagttaaaaaatgtcatctttccagaatcctatcctttttgctacaaatgtaactctgtctattaaagagttatggtgaatcttcataattcattctttctctgtcagtcttgaatcagagcaaactacttagtatgcataagaaagacatgaagtttgtggaacagtgacaagattagtctactcttcctcttattgtaaatatctacctgtttttcaggactcagtttgtacaacaagtcttcagaaatcctttccactctctttattaatccactcatggtgagattagtctttgttttaaactgggacatgcaaaagatgtgatgtytcctgaagttctatagcatttactgtgcacaagtcacttgacacataatggtaacatcaacagtaaaaaagctaacatttattagtttagcactatgttagcatttttatatatgtcactcatcctatgagtaagacagttttattgttctttttaatatacatttttatttacctttaaagatgtctagtttcc

SEQ ID NO: 40458 - DNA, 535 bp, Homo sapiens
aggtggtagaagttaaaaaatgtcatctttccagaatcctatcctttttgctacaaatgtaactctgtctattaaagagttatggtgaatcttcataattcattctttctctgtcagtcttgaatcagagcaaactacttagtatgcataagaaagacatgaagtttgtggaacagtgacaagattagtctactcttcctcttattgtaaatatctacctgtttttcaggactcagtttgtacaacaagtcttcagaaatcctttccactctctttattaatccactcatggtgagattagtctttgttttaaactgggacatgcaaaagatgtgatgtctcctgaagttctatagcatttactgtgcacaagtcacttgacacataatggtaacatcaacagtaaaaaagctaacatttattagtttagcactatgttagcatttttatatatgtcactcatcctatgagtaagacagtwttattgttctttttaatatacatttttatttacctttaaagatgtctagtttcc

SEQ ID NO: 40459 - DNA, 649 bp, Homo sapiens
ttttcttcctttagccctttcaacatgtttgcaaccaattccctgttaaaactgtatttcaatgcttttgttaccagtcactcagttggaaataaccagaaagtgttttgttttcctagctggaaactagcgtattcagtctgagacttttagttaaggggcttggttataatgaggttgactgtgttagraaaacagaatatttttttgtaagtttggcaaacagagctgtgggtcttctaagtcatacttgtttgagaattcctctaggagcagattctttttactctagcccagtttaaggtaaacttgttccatggaagcagagttttgcagtttcttcacgttttgcaatttaacagtcccttcatgttgtacctcttccttctgctcccttttccccatttggtaactgatctgactcccatggaggctgacttgcggcaacttgcaccccagcaaattaacacaatagtggaaaacattgtcattagtcatttagactaatgatatagcaatgactttcaatgcatggttatctccactaggcattttcttttgaagcatttaatttctaatttgggatcaatatcctatactcattaaagacattttaggcacctgtaagatatttcttgtcctgctcaca

SEQ ID NO: 40460 - DNA, 649 bp, Homo sapiens
ttttcttcctttagccctttcaacatgtttgcaaccaattccctgttaaaactgtatttcaatgcttttgttaccagtcactcagttggaaataaccagaaagtgttttgttttcctagctggaaactagcgtattcagtctgagacttttagttaaggggcttggttataatgaggttgactgtgttagaaaaacagaatatttttttgtaagtttggcaaacagagctgtgggtcttctaagtcatacttgtttgagaattcctctaggagcagattctttttactctagcccagtttaaggtaaacttgttccatggaagcagagttttgcagtttcttcaygttttgcaatttaacagtcccttcatgttgtacctcttccttctgctcccttttccccatttggtaactgatctgactcccatggaggctgacttgcggcaacttgcaccccagcaaattaacacaatagtggaaaacattgtcattagtcatttagactaatgatatagcaatgactttcaatgcatggttatctccactaggcattttcttttgaagcatttaatttctaatttgggatcaatatcctatactcattaaagacattttaggcacctgtaagatatttcttgtcctgctcaca

SEQ ID NO: 40461 - DNA, 649 bp, Homo sapiens
ttttcttcctttagccctttcaacatgtttgcaaccaattccctgttaaaactgtatttcaatgcttttgttaccagtcactcagttggaaataaccagaaagtgttttgttttcctagctggaaactagcgtattcagtctgagacttttagttaaggggcttggttataatgaggttgactgtgttagaaaaacagaatatttttttgtaagtttggcaaacagagctgtgggtcttctaagtcatacttgtttgagaattcctctaggagcagattctttttactctagcccagtttaaggtaaacttgttccatggaagcagagttttgcagtttcttcacgttttgcaatttaacagtcccttcatgttgtacctcttccttctgctcccttttccccatttggtaactgatctgactcccatggaggctgacttgcggcaacttgcaccccagcaaattaacacaatartggaaaacattgtcattagtcatttagactaatgatatagcaatgactttcaatgcatggttatctccactaggcattttcttttgaagcatttaatttctaatttgggatcaatatcctatactcattaaagacattttaggcacctgtaagatatttcttgtcctgctcaca

SEQ ID NO: 40462 - DNA, 1004 bp, Homo sapiens
tgcattattaattgttctacaatctattattttgcttggcttatcttagcagagaggcagaaatgatctgctgtctcatatgtaggagaaaaattctgagaagcccttgtgactaacacccaggaagagtccacttctgagagcccaggcgctttaatcaaaacagcagtcaacttagaagaattgagyttaagttctgattgtcactcacactagatgtaccttaggtaaatcatctactttttctgagctagatttctaacagttagtatctttctcttgggcttttgtgacaattaaaacagatgacctctgtgaagtacctggcacatcactgtcactcaagaagagtgctctgaatgtgatccttgggaataggaacagctaaggaaagctaaggaaatgtggggttctgttgattccaaaggataattgtttaaatttgactttatagtttatttaaaactctcagcaaaaaaataaagctctgagattggtttgtgatctgagggttaaatccacagtcaaattatgtctttttctggcatggttctaggcactaaatggaaaggaataaaagtagaaagtatgaacatactggattttaggaactgtaatccattaggaatgtaaaactcacctttctgaaaccactagagaaatacatgggaaccaagcactgaaggtgtatacacaagaaatcatcatgggtttaggtggtcacaaaatactccataaaaggacaggctttaaatatcaatatataggaaatttactagctctgtgtgctagaagagtacaattgcatcattcaatgcaacatgtgaacaattaaaacaaatttaaaactcatagaatcttagaagggaatttataataagcaatttgaccatcatatctgaagcaaaaatcccagaagacagtgggaacaaggatgtggaagggaaacatccttttaaactcaataagaactaaagaccaattcgcaaaagttgcatttttta

SEQ ID NO: 40463 - DNA, 1533 bp, Homo sapiens
tgcatttggccctagtttccctatcaacaaaatctaaagatgagcctaaacaattccatcctcagacagttgaaagaattttggggtcatactctgcattttaccaggttttggggaagacatctaaaaggaatttgacttttgtcctttaaaaatctctaaagcaagccagacatggtggctcatgcctgtaatcccagcactttggaaggccaaggccagaggcttgcttgggaagaccagcctgggcaacatggcaagacctcatctctacaaaaaaattttaaaagttagccaggcctagtagcacacatctgtagtcctagctactcaggagactgaggcaggaggatttcttgagtccaggagtttgaggctgcagttagccatgattgcatcaaagcactccagcctgagtgacagagtgagacccagtctcaaaataaataaataaaacaaaaaaactcctaaaacaaattcctattatattacttatcatgttattttcattaatctgcacatagctccatcttctctactcagctacctattcctttaggtaaggggtgtgttcatctttttacccttgtttctaatacaatgatgggcatatcacagtgcttaataaagttgttgatgtataagtacaataaatgtagaaaaaacagtggtcttgatgtataagaaaagattgtccatactttgagaggttatggtttaaattatagaagagaaaattcaaatgaagagaaattaagtggcatctaagaagtgaatttaaaatactttgtaaacatcctgggaacaattgcaaaagagcattgtgctgcatgagagaaaataggaactgtggacttcycttcatagttcttcatcatccagtatgccaacctgggctttttcacacagtaattttatggtcctaagagcagcaaaaggatcatcctcaatgtgcaaacacttttgaagtctctgcaatcatcatatttgctactgtcccatgagccaaaaaagtcatatagccaagctcagagtgagtttacgagcatactcgcaaaaggcctggatacaggaagacaaacacattgggaccctagctgcaatccatttatcatagaagggtaaggattcccaataatagcttctactaattccatatcctgtggttccagttgtacaaaaaataaaaccccgatataactgcatgcatacatgcacacacacacagacacatacacacagatctggaaaatatataaaaatgcattaataatgtttaatatatgcttctgtatttttaaaagattttaaatatgtttgttttcttgtattgcatatgtatcttgttattcagcaaaaacatctggaagataataaaatgtgattttggatgaggtttcaccttttgtgctttttatatttcttctgtgttttccatgttttctacaaagcatatgcactcttttataatcagtcaaatacgtgtgtgtgtgtgtgtgtgtgtgtcaactacactttaaaaatgatatggag

SEQ ID NO: 40464 - DNA, 855 bp, Homo sapiens
attagtagagcatcccattagaaagtattttcttctgatattgtgcaatagtaatctggcccaatgtgtgtgtgtgtgtgkgggggggggggtcattacctagaattgaaataactatgagacagcaaatagcacatgtgtactattgacttcagacaagtggcacaataaagtagtggccagaaaactgtttagaatcagaaggcttaggtttatcccagctgcagcttactgtgtggtcccaataagttatccttttttctctgaatgtcaattttcttacccagtctttattacaaaaatcaggagagaaaatgtacatatggggctttgtaaactataaatcattgcacaaatgctatgcatatttgaatcatttttattgcatgttttcttaaaagcccaatagttttaagaaatgtgttacatgtgaagttgaattgttaagcattaatgatacatactagaagacattcctttgaatacttccattttatgcacttgcttatgccatctacaagaagttctatattccaatccctgaactactgcctacaaacaattttcagagaggaaaacaggagacgacaatatgtctttatcttaaggaatcaaagctgactcctgataatgaggagttttctttaatgtacccacaaattatctcttcaataattcattgtacattgtttgcctgaaattgacataaagcttaccaatttgtccttttttgtcttataaaactttgcactagtcaatttctatatttctggtactttttacattgcccttaatttcttaaaagattgttaaaggttatcctgcaaatatatttgcaagttttataatacatta

SEQ ID NO: 40465 - DNA, 570 bp, Homo sapiens
tgcataaatcccagtgaactcaaaacttccaagagatttctttctttctctttccttctttccttctttcgttctttccttctttcctcctttctctttctttctttcatgtctttctctctttctttgtttctttctctctttcctctttctttctttctgttgacagagtttcgcttttgtcccccaggctcactgcaccstctgcctcccaggttcaagcaattctcctgcctcagcctcctgagtagctgggattacaggtgcataccaccatgcccagctaatttttgtatttttagtagaaacggggtttcaccatgttggccaggctggtctcaaactcctgacctcaggcgatccacccacctcgacctcccaaagtgctggaaccacaggcatgagccaccgcgcctcgcctaaagtatttgtatttttatctctttccagaatctctttttttttttcttaaatctctctcttactctcttcacatgagtgaatgacagagaaaggtatatgagaaagtatcacatcacctataggcattctcattcacatatctgtaag

SEQ ID NO: 40466 - DNA, 570 bp, Homo sapiens
tgcataaatcccagtgaactcaaaacttccaagagatttctttctttctctttccttctttccttctttcgttctttccttctttcctcctttctctttctttctttcatgtctttctctctttctttgtttctttctctctttcctctttctttctttctgttgacagagtttcgcttttgtcccccaggctcactgcaccgtctgcctcccaggttcaagcaattctcctgcctcagcctcctgagtagctgggattacaggtgcataccaccatgcccagctaatttttgtatttttagtagaaacggggtttcaccatgttggccaggctggtctcaaactcctgacctcaggcgatccacccacctcgacctcccaaagtgctggaaccacaggcatgagccaccgcgcctcgcctaaagtatttgtatttttatctctttccagaatctctttttttttttcttaaatctctctcttactctcttcacatgagtsaatgacagagaaaggtatatgagaaagtatcacatcacctataggcattctcattcacatatctgtaag

SEQ ID NO: 40467 - DNA, 1110 bp, Homo sapiens
aatgcaaaaattagccaggcayagtggcgcatgcctgtaatcacagctactcgggaggctgaggcaggagaagcacttgaaccggggaggcggaggttgcatgagccgagatcacatcactgcactccaacctgggcaagagtgtgagactgtaaaaaaaataaataaataaaaagaactttccattggttggagttaccaaaatgggaatgacactattgcctactactcaaggaataataattccccctaatcagaggtcttcgggtaaataatttgggttgttgtaaatacaatttgttatcacgtgcaaataagtatttaatagttatctgcacattagtgcacatgaatcatatgcttgatgctgtttccaaggcaatcttagctttcctcaaatgaacttttcctttccttaccatgtaaacatttttcacaagttgtaataatttggggctctcgtcagagaaaccagtaggatatgtgaccaaaggcatttcaggatattgtttgcaaagttctgttaaattggctcaataatcaacttgcgccctttttttttttttttaaatttctccattacatctacaatcccactggtaagctacaaaacctatctttctttagttttgaatcatattttaaatcaccaatagatttacactcagcgcctagatgtcagaactataggttgtcacagtactttgagctacatcgcttatgaaagagaagagggtgtgtggctaatagattatttgatacagacattactcacaatgtattccatcctaaaccctgaaccatttgccattttgttgcaaatcccctttgctgagattttggtaaaaggagttccttttcccgaaccatattcacatatttttacatataacttcatcccatataactctggtcaagtgcttgaaacaaaccagaaagccggcggtggattatatgttatatgctccaggccgtcgtcagaagggtgataaaagaaaatgaacggccgggcgcggtggctcacgcctgtaatctcagctctttgggaggctaaggcaggcaatcacgaggtcaggagatcgagaccatcccggctaacacggtgaaacc

SEQ ID NO: 40468 - DNA, 1110 bp, Homo sapiens
aatgcaaaaattagccaggcacrgtggcgcatgcctgtaatcacagctactcgggaggctgaggcaggagaagcacttgaaccggggaggcggaggttgcatgagccgagatcacatcactgcactccaacctgggcaagagtgtgagactgtaaaaaaaataaataaataaaaagaactttccattggttggagttaccaaaatgggaatgacactattgcctactactcaaggaataataattccccctaatcagaggtcttcgggtaaataatttgggttgttgtaaatacaatttgttatcacgtgcaaataagtatttaatagttatctgcacattagtgcacatgaatcatatgcttgatgctgtttccaaggcaatcttagctttcctcaaatgaacttttcctttccttaccatgtaaacatttttcacaagttgtaataatttggggctctcgtcagagaaaccagtaggatatgtgaccaaaggcatttcaggatattgtttgcaaagttctgttaaattggctcaataatcaacttgcgccctttttttttttttttaaatttctccattacatctacaatcccactggtaagctacaaaacctatctttctttagttttgaatcatattttaaatcaccaatagatttacactcagcgcctagatgtcagaactataggttgtcacagtactttgagctacatcgcttatgaaagagaagagggtgtgtggctaatagattatttgatacagacattactcacaatgtattccatcctaaaccctgaaccatttgccattttgttgcaaatcccctttgctgagattttggtaaaaggagttccttttcccgaaccatattcacatatttttacatataacttcatcccatataactctggtcaagtgcttgaaacaaaccagaaagccggcggtggattatatgttatatgctccaggccgtcgtcagaagggtgataaaagaaaatgaacggccgggcgcggtggctcacgcctgtaatctcagctctttgggaggctaaggcaggcaatcacgaggtcaggagatcgagaccatcccggctaacacggtgaaacc

SEQ ID NO: 40469 - DNA, 1110 bp, Homo sapiens
aatgcaaaaattagccaggcacagtggcgcatgcctgtaatcacagctactcgggaggctgaggcaggagaagcacttgaaccggggaggcggaggttgcatgagccgagatcacatcactgcactccaacctgggcaagagtgtgagactgtaaaaaaaataaataaataaaaagaactttccattggttggagttaccaaaatgggaatgacactattgcctactactcaaggaataataattccccctaatcagaggtcttcgggtaaataatttgggttgttgtaaatacaatttgttatcacgtgcaaataagtatttaatagttatctgcacattagtgcacatgaatcatatgcttgatgctgtttccaaggcaatcttagctttcctcaaatgaacttttcctttccttaccatgtaaacatttttcacaagttgtaataatttggggctctcgtcagagaaaccagtaggatatgtgaccaaaggcatttcaggatattgtttgcaaagttctgttaaattggctcaataatcaacttgcgccctttttttttttttttaaatttctccattacatctacaatcccactggtaagctacaaaacctatctttctttagttttgaatcatattttaaatcaccaatagatttacactcagcgcctagatgtcagaactataggttgtcacagtactttgagctacatcgcttatgaaagagaagagggtgtgtggctaatagattatttgatacagacattactcacaatgtattccatcctaaaccctgaaccatttgccattttgttgcaaatcccctttgctgagattttggtaaaaggagttccttttcccgaaccatattcacatatttttacatataacttcatcccatataactctggtcaagtgcttgaaacaaaccagaaagccggcggtggattatatgttatatgctccaggccgtcgtcagaagggtgataaaagaaaatgaacggccgggcrcggtggctcacgcctgtaatctcagctctttgggaggctaaggcaggcaatcacgaggtcaggagatcgagaccatcccggctaacacggtgaaacc

SEQ ID NO: 40470 - DNA, 517 bp, Homo sapiens
ccactgctgactagtttttgtgctttttgtagagacagggttttgccatgttgccccggctggtcttgaactactgggctcaagcaatctgcctgccttggcctcccaaagtgctgggattaccactatgagccaatgagcctggctgaagccagtttctttgtgtttgatttccagatctgcagtttgttagttatgggaacttagsagaatctcattactctgttaagtcttagttacttcatctgtaaaagaataatagaatgaataaggtcttagggattaaataagagaatgcatagtaacattgaatagacactagctattattattactactatgataaagatcatttgttcattgtacccatgacatgtttcatgcttactctagtcacagacttgggcatatacaaaaattaaacaataaaacaaaacaaaacaaaaaattgccatgactgaggttgttggcagttgcatctcaagcagtttatagtattagaaaaggaacagacatc

SEQ ID NO: 40471 - DNA, 600 bp, Homo sapiens
cgtggtggcgtgtgcctgtagtctcagctacttgggaggctgagacaggggaatcacttgaacccaggaggtggaggttacagtgagtcaagatcgctgccactgcactctagcctggcgacagagtgagactccgtctcaaaaaaaaaaaggaaagttgaacacatcccattgtttgtgataactgatgtttgcttatttccctgataccttatagtgagttctatttgttatgtttttttaaaaaaatctagttttggagtcgtatatatttttcttttgctagtagttactcayattttaagcaataacacttaaacttacatttttaaaaattaatgttgagaaaatttcaatatctagaacctatcaccatgcccttatgacttttctccccttaagattccccccacttaccatcatccatgttttgtttagaataatctgaattttacctctggagtgttatgtaaacaaaattatggttattctttattaggaattagtattatcaatattacttatacttaaccataacttttactgctttctttatcactgttattatgttctttgttgaattcatttttattttaatgg

SEQ ID NO: 40472 - DNA, 980 bp, Homo sapiens
ctttgccccctaaccacatcagttaaaatttcccctcggactattattagctgtgtgrccttaaccaaatgacctccttccacagatggaagatgcagaaaccaatatcatggaatttttgtaaagattacatgagacaacacacattacaatgtttggcacataataaatgatcaatgttagctattattattagcacttcccagctattattattaggcttccccactagaccgtgagcaaactgtttatccaaggatctgtgtggcatgggaacttacaaatggtagacacacaataatatttgtcaaaatggtttgaaggtatgccaggaagaggaaagggagggtgctggaaaaaaccatagcgtactttatgatttttcccagggccaacttctgtagtgtttgtttttatttcattaccagagtacattatctcagacagcaaggttgctataaagtagggctagaaagacactatttatggaaccagatgttctgttcagagaaagcaaagttggctatgaggcatctgaaatctccagtttggcccttggctgagcagggagtaggggctgaagttcagccagagcttcacttgcccaacagggtgccctggcatggggttacattagctctgaaaatcatccacccagagggatgcattttgtttttcagtgtatccacatagagggacgtctttacagattgtgccaaagatctatatgtaccagtggggaaccctactgcaaactcaaaggtccccttttaaacaagcctcttgaaggtctcaaatgagcatcagctaaaataataatacttcacttactaaatatttattgagttcccattagggaactcaaggtgctaatggctgacaaggaccttttggacttgcacaagagcctggtgtgtaccaccttctaaggaaagcttgggatgttctctgagaggaacaccaaattcaagaacctgtcc

SEQ ID NO: 40473 - DNA, 567 bp, Homo sapiens
ccgggcgcagtggcaggcgcctgtagtcccagctacttgggaggctgaggcaggagaatgacttgaacccgggaggcggagcttgcaccgagccgagatcgtgccactgcactctagcctgggtaacagagtgagtgagactccgtctcaaaaaaaaaaaaaaaaaaaaatcatgtccagagtaaaaaccatgttaaagcaatttttccatttaaattagcaatataaatttaaaatatcattttgtatttttggaaggtaaaaawatgaggtgactgaaaatgaaattacattttcattttcccccatattaggagggaggggtatgtaggtttttccaatggtgtatcaacataaaatttcaatgaacttctgaaaaatgagcctatgttgtaaataattttgccaaatatatcctaggaaataggattaaaaagatataagggtgtctcttcttcctttccccctaatataaaaccagattattattaaatccttaatttctagtgattatgtcatatttatttctggcttccaaattatatggtcagtcaagttagtgttggc

SEQ ID NO: 40474 - DNA, 522 bp, Homo sapiens
ttttttgtagagatgaaatctcactatgttgcccagactggtcttgaactcttggctcaccttgctgggatcatagacatgagccaatagtgattttctttctttttcattttttgagacagggtctcacttggtcacctaggctgcagtgcagtgacgcaacttcaacctcccagggctcaagggatcctcccacctcagcctgtcaagtagctgggactacagtcatgtacagtcatgtaccaccacacctggctattttttttgtattttttgtagagatggggtcttgccatcttgtccaggctggaatagygattttctatttccttctttccttctacatttattaactggaattcttttgaaaggaagacttgtcctttcttctacagttatttatttatttaaatatttattttaagacagagtcttgctctgttgcccaggctggagtgcaatgacatgatcttggctcactgcaacctccgcttcctgggttcaagttattgtcctgcctca

SEQ ID NO: 40475 - DNA, 706 bp, Homo sapiens
gatttttaaaaagtgattcaaccattcttttccttgttttattttctgctgcaaaacactttaaagatacacgataacaaaacagagtaatggaaaagacataatggagacctagaaatggcctaccaaacacactagacagaatcacctcccagtttctaacattgttttcaaccacacctttacttgttatccttgggcttggaatttcttgagatcctgtttcccaggtgttaccttcttggtcaggtcttccacttcccctttatcctaagggcagagaagaccatctcctctgtgattcttccctacatctctgcaccctgcgtgcacatctccagtacagcacgagcccattgtccaatagtttattcatgtgtctgtctcccaatctctctgggcacttctgagcacagggaatggggtctttagcctggcagagktgcctgttacatacagggaaccaatagcagtttgctgaatgaaccttaatcttacctgaatatgtataaacactgctacccattggactaagatattgtctgactggtccaaaatgtatcaaaaaaagctgtcttcttcttcctctccacacttttccaatgttgtccgcacccacccagatgcaagtgttaaaacaatgcttaaagacaaagttttaaacttcctaagttaattacattgtttttgtgaatgtggaaaacgt

SEQ ID NO: 40476 - DNA, 1285 bp, Homo sapiens
actcagctcctctaagcaggagaaagtaaaatgtagattttgtgcaagaaaaatgaaaacttctgttatttttatatttttaaattattgtggtggctaaagctaggatccacatatagggttttcttttaacattctagaaaactcaaatgttctaataccagagcagaaaaatttatatgtccattgaaacagtaagctgatccttgtttgattacttaactcttagcagttgatacaggataactttataaagttgagtttccttccttcctcccttccccttcccctcccttcccttcctttctttctcctttctttgatgaggtctcgctctgtggcccaggctgaagtgtgatcatgaagtgtgatcatggctcactgaggccttgaactcctaggctctagtagtctttctactgtttcttactccactgtaccccagtacataaacttcaggaagtggtggaactcaacttgttcttcgctttcaggtgctatttccagtgcctcagcctctagagtagctaggactacgggtgtgtactattacaattggctgaatttaaaaatttttttatagagccagagtgctcactatgtcgtctaggctagtcttgagcacctggtctcaacggattctcctgctttggcctcctagcatgttcggattacaggtgtgagcactagctttgcttatagtctgcattttctggtgatgctgatgttgctagtaaatggaccaccaaggccatataggtctcaaaatctgtacataaattgcaagcgcaaataataacaaacactaaaaatacagtgaagttaaaagggaattgttttcaatatcacctctgagatcttctggcaactaagtaattgaaggatgtacatggagaggagtgtgtgttatgtgtttgctgggggtagggaagattggcaaatctgcatgttttaagtatctttttcaaaaattttcatatataattttgaggtttcactgagaatcaaagctttttaactttaggtagttttatttcttatattacttttaktactctataaaatgataatgttctgtagcattggcgtgtataattttagtgtctacggttccagagaaaaacaaaaaatgttattccctcgttgtgtgttgggacaaggccttatatgggcttgttatatgcactctgatctttgattgattaacattttataatgaattggtaatactaataagaatagaactagtagagtagtatatagcttgggaaatagctcagaaacc

SEQ ID NO: 40477 - DNA, 651 bp, Homo sapiens
cagcccagcaggaagttaaaaacactggtaaatcaacaaatgtttctacctcttgtagtttcctgacatgtaatcctggaacttttcccactagctttcttcaaacacagctgctcagaaaggtgggacttctcagaaggattacctacttggaactggggagactttaaagactttaggttctctatctcagaccacaccctaaccacataaaattaatgcttaacttttatcgttaggtagccaacctagaactgaaatagagttcaggaagagcctctggagtaattttattaagaaatacttcctygacttcttaggtcctgcacatggtataatttgaaggaaggttttgaagttacagtggaccagcgttcaacttctgtttatggaatttatttgccataatcatataataattacttactgaacaaggaactatagttggcactacaagtaacatagaaaaatgatacaggcacagttactgtgctcatgaagcttacacttcagcagaaatgacagatattaaatgagtaatcgcattgttatttgtgctattgagatcagtgcactttgatcagtgaagtgtaacagggaatcaagcctttgatcagtttaatagggaaacaaacctaggggactgggaag

SEQ ID NO: 40478 - DNA, 1658 bp, Homo sapiens
aaaaaagaaaggaaaagtgaaagaagaatatgtatacaaattatacaaactcaaagcaaaaaatggcatttttgaacttatatgtaatatagctgtagagataattatgaaatgtagaccctatttttcctaatttgtaagtgtgctgaattatgaaatggcatctttcactcttacactgatttttatatcccatggcaattagtcctaaattgatccccttctgacttatttctgtcccacctgaaacatttccctgaaaatttaattagaggtaagttgcggaaattgaagttacttcataacattggaagagtgactgttctttcctctgggagttgttaaagtaaatatatgtgcctattattaatgacaataataattactagtacattagaattataatttaaaaggcagagaatatttgcctatcagcattgcaattgtaggtactttaaaatgtttaattatttttctgatctctcaaattttaagagaattggttcacagactatacagaaatgcataacatttttagatacacttctatttttcctccagaagcaggacacacctactttcaataattattttctatttaatccacaaacccctcccacccccatctctgactttaccatcaaccacactattccaaaaggtttatcttaagtaatatgcacacctgtcattctctataacatattatcacagcaaacatgatatagcctaccaaatgactacagtgaacaagcttcctacttaagtatgaaacatttatttttgccttaactatccttcaagaatcagctcaaatgtttcctctttcactaaatcttccttgatcacttccaacctggaggcatctcctacacttgaaattctttatctttcatatgacattgatcacatttgctttgttataataaatataggcaaaaataaagatttgtacacatcctatatctctactactagacaagaagcttcttacaggcaagaattgtgtcttatacatcctttttatcccaacatcctctagcacattgttctatatttagtatgtgcttaggatttattgaatgatgggtgttaaaaatacaaggagtagaactgtagtctattgaatctaaatgagtagagtcattaaaaaattattgaccttgcttggtctaagtatcacagagtcatcaaatttctttggttcagatgttccaccccattccagtgatgttccaatttttaccttcacagctgaggataaggatttgggaacatttggtgagaattctcctggaagaaagtgaatatagttcggttcttaggaatagtattcttttagacatcaaatgttgctcagcaaataatacataaaacatygaaaggacctgagaagtaatctagttaattcacacttcattttattttttgagacagggtcttgctctgtcacccagactggagtgcagtggcacaatcatggcttactgcagcccccaactcctgggctcaagtgatcctctcacctccaccatccaaatagttgggactacacatgcatgctgctattgctctgctaaattaaaaaaaaaaaattagagatgaggtctcactatgttgcgcaggctagtcttgaactcctggcctcaatgaactcc

SEQ ID NO: 40479 - DNA, 626 bp, Homo sapiens
ataactacatgcattgatctcaccatttacaacatggatttacaaaactaacacattacaatttactgagtagaccctatcatattttttggcttcttattaagaaaggcactggataaaaataggagttttagtcatggctatgaatccttagaacagtcagttatcttctccagactcagtaatttagagataagaagagctggacctagaatattcagyaagctgagactcaatattctctgggtctatgatattgtctttcccaatcctgaacttgccatagaaaattttcccattttattttcatttccctctgcaatatttgctagcaaccagagaactgcaggaaagttgaatgaagaaatcctccttccaaagaaaatagactttattattattaatatactttaagttctgggatacatgtgcagaatgtgacttttaaaataaaaatagatatatatgctttaaagaattttctcctgtaattttttcccactcttccttgtacttccaggcacacagttaagtgtcaggtcatgtgggtcattacatgaagaatagggtgatgaatgggagatcaaagacctaactaactgttggtagcccaaagaggacatttc

SEQ ID NO: 40480 - DNA, 677 bp, Homo sapiens
tgggcttgcccccgcccctgcaatttggatagagcaattttgggttgagaattttttttcccctttcttaaaagtcagtttctattcacttcctgtttgtattgagaaatcatcaatatgatttattgtcattatgtccctttgaatgactataattttgttttcctttgccttaaattaaaacccctaagagataatttattttcaaaattaaatrtgtctgtgtatgcaaaagatgattaaatacacacacatacatatttagtagttttttaaagggtcttggcatttgctacttaagttactttttatttctttttcacattggtaaatttgtcaactatttctgctgtaaatatacttaataagaaggctaactaggcaacctaaaatttaaatgaagatacttttaataatgaaggtgaacatgtctttgcacttccctgtttctggatttactgtctcagctttcttcaagtgcaaaggacaccatatttcattcatgtgtttcataattataaaagactctgggttaatccttgcaataaactttggggataacttttgccttttaaatctctctctggaaagtgatgtgagacttaaaaagactctgtataagaaaataatttagttgtagaacatcaaacttttcacttaaatcccttgttaagaca

SEQ ID NO: 40481 - DNA, 1171 bp, Homo sapiens
cagtgatagggccaatgaatggtgactggtgtaggcaaggtcatggagccagcagtgtggccatagctagttgcggttagccctggagagccctagaatggaagcttgtaaacatccagggggtttcaaaagcatttgactcaacaaggacgtgacctgccatggccctgaggagggcaccagggccttataatcatcaaaagcctcatgtgccaggcattgggttgtgcatcttaaaaaccttatcttattttgttctcaccgtaagtctgagcaaaaggcactattactttcactttagtggtaagagagrcccagaagcattaagaaacatggctcaatgagtaagtggtagaacttggatttgaatgctggtctgtgtgattccaaacagcattttagcagggtctttatgaaagggtaggattttgctatcttgagaggggacatgtagtgaagagcctatgattccagcccttaggtatttgaaaagagcctcctgaagctactgtgaatgctggtgacgttaccagggccgaggccaacagtttaacatgggcagagatgggggctggagaatcctgagctctccagatggccttgcagtccaaagcctgctcctggggcaggcatcccgtctccagcttcggagggagcccaggggcagcccacctcctgtgggcccactccatttgctgctcctgccttgggagtcccaatcactgactctgagaggggctacatcccccctcccagggtctgagactcctcctcaaggactgacactgtgccacttttcaacaatagccatggtacctgtagaagtggctgtgggaggcaaagaaggaggagcatgtgagataaagaactcagacttaaccaagacctaagttacctcacccacattctcatcctgttgcccaagacgctcagcccagccatgtcaagattccctgttgctatcctctctccccttcccgtcttaggcactgactgacacgcctctagaactatgctgggtaggtagatactagcaactgtgtggttgaggaggaggccaccatgagggagcagtgtggagcaaaatccccacctgccatctcacaaagagcttttctttttctcctccaaagtcccgggacaaaacagccacccgtaaacatattctaag

SEQ ID NO: 40482 - DNA, 600 bp, Homo sapiens
ccactgcactctagcctgggagacagagcaagaccttgcctcaattaaaaaaaaaaagagagaaaagaaagaaaaagaaagaaagaaagaaagaaagaaagaaagaaagaaagaaagaaagaaagaaagamagacagacactaatttatatggtctaaatagctcttaatatccaccccctataccttccctctcactttcccctaaaacgatggcaaacacatagagctaaatacacaaaagaaaatgacttttggtaggagcagttgttttctggatgcactgtaacataagaggaaattgcatagagaaaatatgttcttttcttcttaaaatgtgggaggctgtatgagtttcagagatatatgagtaacttaagtactctattaatgacttgcactgaaatcccattactaatttttacaaccaacgagacatttccaactaaacaaacacttgttcagtgattagactgcagctattatttttaatggagcatgaagattattggttttggatgctgttatgctctttgacagctatagatgtcttaacacagagaaatcaggattgctgctcctgaactcccagaaactcaca

SEQ ID NO: 40483 - DNA, 533 bp, Homo sapiens
gaaacccaataagacagacaacaccaacatttactgtagcactgattttgtgcattatcacaaaatactggcaatctaaatgtccatcaacaagagaataaagatatacactgcacagtttatgaatgacagtgatccacttcatcatgtctaaagtcaaaaacaatgttggaggaaaaagctagttgcagaatagcatgaacaaagtgatgccctgaatataagcttgaaaaaacataagataatgttacatatcatttatggagagagatacagacatacttttttagtataaaaaacattcaaagtaatgacaaaaaattcaggagagtggttacctttgggaaaagtaggattagaacacatcaggaaagcggggtcgggggctaggggagggatagcattcggagaaatacctaatgtacatgacgggtcgatgggtgcagcaaaccaccaaggcatgtgtatacctattcacaaacctgcamgttctgcacatgtatcccagaacttaaagtataataaaaagttca

SEQ ID NO: 40484 - DNA, 746 bp, Homo sapiens
ccgaaagataaaaggaacctcaagaatcaaagctgccataatgaatgagttactgatactatcttgtaaaaatttaagtcactgttagaagttgggctttttcaaaacaaagttactcaaaatgatagagtagaaggataatctaaccatctgttaacaggatggttaaaggttaggaaaacaagaccagaaagaaaaaaaagcatcttattccaagaataacaaaccatatgcaaagatactcccttgccaatttataagaaacacaaagaatgtgaaaaagaaatgggaaaaataatgagacagtatttaaagaatgtcttttctaagttgtcagtgaaaacaaggtaaaaatcattrccaattagaccacagaagatctgaaatacaacctaagaacagcaccatgtgtttacttcctccgaaattaaaagcatgtccacttaaaggcatattctcttgtgaaatcattctaatcaatgcaaacagtcaccagataaagttaaacctcccttaaaactataattagctactagttaggttattttcaataaaggcatttgatataatgctgaactattttaaacttaaacatataagtggtgtccattcttatttcccactgtcctttactgacaatatttgaagatgctggcattcagtattgcaaatccacactggcttctctgccacatacgtttgcttttcaacttcttaaagattaatgagccttcacttaaatgcat

SEQ ID NO: 40485 - DNA, 1274 bp, Homo sapiens
cccaggctcatacagcaccttggctagaacctgagtcccacccttactgtggctgtataaatttacatgtgattttaataaaaaatagatgcacaagccccactccttgcccaggcttgctttgtatggcgcccagaacaatgcgttcccagtgtggatgttgaataaagcaccatttgatgatgatcttccttcaaggctcagagcccccactttcctctttaacaataaaagcctttggctgttcagcttccttcttaccccaaagcagagatcccggctgaagatcacattccagagctttctgtgcccactgccccttggcctcccctgcaagggtcctcagtgtaattgcaggctcaggtttgacttccttgggaaatgtctttaaaatcagagaaatctaagcggagttcggaatcattctgaaaattgtcgccgaccccaacccccagcgtatcttcatgccctgcatgggggaacccatggtacatttgaaggccccaggctgggctagcctgtgttcaccgcaacggccttgatccaatcacttgctgaggaagaactcccggggagatgaatgccattacaaatcttaccctcaacatgaaacgccagtgattgtttattaaattgctcttcaaagagaaaacactggcaggcatgtatcattaaaatggaagcaaagggaaacgctgtaaccttcaacaccgagtttttctccattaaccccagaccaatacaactgaaatagccgggaggaacttctggccctgagccccatcaattaccttaatctcagcccagggaggggtaatacaatccatccaatttaagtatttccaaacactgccataagaaagaaagaaaagaaaagacaaagaaaagccctcaaccctaactccactgtctcaagtccagttcaggacaaattgcaatacacatgagtaacatgaaaacataaaagacataccctccagtgaaaaccttgcacaactttcccaagtaagcagaattaatcacagggaacaattaccatttccagtctgaatatttatgacataacagaaaacccctttaaaatactcagtggctcataatttttttttccactctttaaatttttttttaaattgtggtaaaatacacggaacattaacgttgccatcttaacctttttttctcacactgtcgcccgggctggagtgcratggcgcgatctcggctcactgcaacctccgcctcccgggttcaagcgattctcctgcctcagc

SEQ ID NO: 40486 - DNA, 548 bp, Homo sapiens
acacatgcatgtgaaagaggtgaaaaatgaatattttgttctcaagaaatgtataatctaatttcagataacagcccttcatgaaatagtgacatgaaatgccaggcagggtgtagttacactgaataggaaatttgtattagattattcacaaatagtctagaagattcaaggatcacttgacgatcaggtgggattgcttgggaatggatggaaagtgccccccactttcctgctaccctcacatagtagaaaacatgctttaaaaaggtatgaggatgaggccagtcacagtggctcactttgggagtaatcctaacactttgggaggccaagatggraggatccattgaacccaggagttggagagcagcctgagccacacagtaaaaccctgtctgtacaaaaaatacaaaaattagccaggtgtggtggtgcatacctgtagtcttagctactccagagactgaggtgggaggatcacttgagcacgagaggtcaaggctgcagtgaactgtgatcatgtcactgcacctccagcctgggtg

SEQ ID NO: 40487 - DNA, 1504 bp, Homo sapiens
accacttaggagattcatttcagtaaactgttgtattgaaatgtatgcagttttatctcgaactccattacatgtcagttctgctttgtgtttctttacacagggcaaactgaaaagacaaaggggaagtacttttatattttagggtaagaaaggtacagatacaggttaaaaggtaggaagttacatgtatacctgcaggaatatcgcatacaacgtggacatctgtactttgcttcttctgtaccacaagtctcacacctacaaaagcccacatgtaacattaaattatcaaatattaattgtatttatttataaacttagaattcccaatcaatttataaactcagtgacaagtaactgataaaatatttgatagctgttgaacatcatttgaaaattcttctctatgaaaccttcccaaaacaactacatttccaatgttgttagtgatatgtaactcaggaaaatgtattaaaatttttaaaacccatctcgcttttgacttctttttctactataatcagggaatgagattattcactgatattttaacttgtgattcctggaaatgtggtaatgattgtatgtgtgtgtatccagaagtccaattcatgagctatgtttagatatttttaaagcacacaccagacaaagaatataaggccaagtgaaatttagagagtagtagtagcaccctttttcctgaactccacgcctaatctagaatgagcatcgaaataatctagaaatgccatgtaacccatcatctgtcctcaactgctcttctatgctcctgggatactgacaaccaaactacagttacttctatttagcccactgtgttctagacgggaatattctcaagaatctgactactcttatttcctttgtcacatgatccacacactaaggaaattcaatcaaaagcaataaatattcacagcacccatgaagaagcttgataattgaggtcaagtgtatttttgcctagttttaacttaatctactttgtcattgttagttttattagactttctcatctctactctctctcaaaggaataccgagtaaagagcatattaagtcaagccagatccagttccaactgatcttttggtccccagaatttccactttcctaacttgaccattacccatgggacactaccaatttcatgtattttcactgaatttgttgtgttgtcatgtacaacaccctccacttcccaacccacccccgcgaacgccgtctgactccagaaacccaaacttgtgctcatttttcattattccaccttctcctgatagtgtggtttccttcactctagacatgaggactccacagctttattcccctaaatggaatyccccatgccctaccttgacatggccagtttccgcttgcagcccaccgggtgatttatcggaggctcttctttcacctttgtatcatccacgatttctttcttcaggaaatccttctcttcttttacacactctcc

SEQ ID NO: 40488 - DNA, 795 bp, Homo sapiens
gggagggcgctgagtgagccagcagtggagaggggctggacaagatccgctgatcacagaagaggagagggaggttctgagtgacccacagcacactccacacccttggaagatggagaacccttcctagccccccactgagtcctggaggcagccagtagaatgttctgggtctgagacccaagtcatttttcaccctgatcctgccctctccttggyagctctcagaactgactcctgagggaaggcaagtgtttgaattgactttctccaaggttctcactcttaggaagatgcaggtggagttatctgtgattctccctgtaggtcaggtgagtcctcaaactgcttccctcatggtgataaagtggctgccaacaccttccaggccacatgtgtcttcgttcatatctaggagggagatggcttcacatcccccagacatagaacaaagcccccaaagaagaggacttgctggttttccattctttgctttcctagttccttaagtcctggaggtagtgggttagagtcagaatggacaagtaattcgttgtccagatcaggccctttccagagtgatgggatgggtggtgcatgtgataatggtgctgggatggcagagggagccggtcaccttggcccttgtgggggacccaggagagctgagtggaggtccagctctgccactggacttctggggctcagtttcctcctctgtcaaatggtgtcatttgattgtgatactttttgtctctagtttcctaatgaatgccagctgcttgacagaatgca

SEQ ID NO: 40489 - DNA, 554 bp, Homo sapiens
caaggaaaaaaaatatggatctttatttttctatgtagaaactcccacttacaagtctgggctcagtgttttgttgctacagtgatatttttcaaccatgtctttttaaatgttttcattatgaatccccaaaatatagtttgtcggtaaacttgaggtcaaacagcagactgattttaagatgtgttcartgaagcaaaaatgccagtatttgccttcttagagggacaaaatggtcaaaactcagtaagagtggagaaaagaaagggaaagaataaatgaaagcagaagacaaggagaaaagaggtgaaaataggtgggctaaggagtaaaggaactgggagaaaggaccgaaggtgtcaggagagcttggtgaataacaggcatttccttccacctgcaggacgctaaaaccacactggattcgctgcattatccttcaatgtctcctcccctgactccctcatcactcacccaattatctgctaccccgactcctcccttgcccctggtccaccccaaaggctatggcccagggagcatggggagggtcc

SEQ ID NO: 40490 - DNA, 589 bp, Homo sapiens
acgaggtccacgctcgctccttgatcatgattttggttttgttttgaaagccagtcttcccatttcactgccttatgtaactgcatgggcttgttttgaagctggatttaattttaggtgaagttatacatatttagacttattaggcctcatgaggagtgaaactcagtctggctggtgcttgccctgggaattaatgtggtgttttcatccgagttctggaaatcaactgctgcaggaatatgtcttggatcccatactggtgtgatcccacccacccgggacgctgtgcagagctggccccgagcctgcacctgtctttcgttttcctacactcgatgtgtcctcaagagtgtatttggactcaagtctgactccagaggcggtccttccagagctactgtttctcctttttcaaagaaaaggtggctctttcaggaaagccccttccccccaccaactacttctcaaacctactccttttgctgggcccaaactaactttttcyttccttccttccttccttccttccttccttccttccttccttccttccttccttccttccttccttctctttctttcttgc

SEQ ID NO: 40491 - DNA, 813 bp, Homo sapiens
tgaggtcaagagattgagactatcctggccaacatggtgaaaccccacctctactaaaaatacaaaatttagctgggcgtggtggcacgcacctgtagtcccagctactcaggaggctgaggcaggagaatcgcttgaacccaggaggccgaggttgcagtgagccgagatagcatcactgcactccagcttggtgacagagcaagactccatctcaaaaaacaaaaaacaaacaagcaaaaaaaggaatgaagttctgacacaggctacgacatggatgaacattgattggaaacatgctgctaagcgaaagaagccagacccaaaaaagaaacactgaatgattctgctcatacaaggaacctagaattggcaacttcatagaggcagaaggttgaagagacgttaccagggactgaggggagagagagctgctgtttackggatatggagcttctgtttgggatgatgaaaataatgaaaacatttttggaaatagatggtggcatggttgcacagcattgtgaatgtaatcaatgccagtgtaccggcctcctaaaagtggttcaaatggcaaattttatgtctatttcatcacaataaaaagtacaaatatgaaaataaatgacgacttggaaccccttgagccacagagttccgcctgggggtctttggctgaaaggacagactagactgtgttcccacggcttttccatcccagagcactcacaagcccatctcctccatctccacggcccctccccaccattctgctggcctgacggctctgcttccgatctcagccccaccagg

SEQ ID NO: 40492 - DNA, 946 bp, Homo sapiens
taggtgtccagccccctgttctatggattttcatttggagaagtcagtcatgtacctgcctcagggcctttgcacctcttttctctttgcccagatcattcttcccctaaatagccacatggctttcttcctcatctccttcaagtttttgcttaaatttcagtttgtcagtgaggtcttctctgaccatttagaccagaatatgccatcttaaaatatgagtatggaagacaagaatatgccaccccaaaatatgcttcttgggcataaggattgatgtttgagctgattattttggagaaactgcagacacaggagttctaatctgaaaacagatccctgtgcaggggaaatctatacctatcacggaagtctctgcttgtaagagtgtctccctctcagtatcagggcaagaaggatgcgtggaagtcactggagactttgtcagtgaagcaggtgctgacttaattctccaaaacaaaccttacccttgtctaccctgagtttcctgttgacttccccacagcactccaaccagcaatgaaggagatctgaggtctcggcatcctcattcacacctggtattgccggttctttctttttaatgttagccattctcataggtgtttgtattttcaacttacacttccttaattactgatgatgttgatcttttcatgtttaatagggtggaaacaaagttaaacagatttctctacggcagcaggactcagagcttttttgaattgcctgacgggcagattgctgggaattctttttctatggtcaagtaaagattacaaggctrgaattccagcgaagctattttggcaaatactgacctacatgattgaaggggtccagaatatgccaccccaaaatatgccactttgacatacggcttattttgggctgcaagcgattgaaaatgagcagatgcaggatg

SEQ ID NO: 40493 - DNA, 946 bp, Homo sapiens
taggtgtccagccccctgttctatggattttcatttggagaagtcagtcatgtacctgcctcagggcctttgcacctcttttctctttgcccagatcattcttcccctaaatagccacatggctttcttcctcatctccttcaagtttttgcttaaatttcagtttgtcagtgaggtcttctctgaccatttagaccagaatatgccatcttaaaatatgagtatggaagacaagaatatgccaccccaaaatatgcttcttgggcataaggattgatgtttgagctgattattttggagaaactgcagacacaggagttctaatctgaaaacagatccctgtgcaggggaaatctatacctatcacggaagtctctgcttgtaagagtgtctccctctcagtatcagggcaagaaggatgcgtggaagtcactggagactttgtcagtgaagcaggtgctgacttaattctccaaaacaaaccttacccttgtctaccctgagtttcctgttgacttccccacagcactccaaccagcaatgaaggagatctgaggtctcggcatcctcattcacacctggtattgccggttctttctttttaatgttagccattctcataggtgtttgtattttcaacttacacttccttaattactgatgatgttgatcttttcatgtttaatagggtggaaacaaagttaaacagatttctctacggcagcaggactcagagcttttttgaattgcctgacgggcagattgctgggaattctttttctatggtcaagtaaagattacaaggctggaattccagcgaagctattttggcaaatactgacctacatgattgaaggggtccagaatatgccaccccaaaatwtgccactttgacatacggcttattttgggctgcaagcgattgaaaatgagcagatgcaggatg

SEQ ID NO: 40494 - DNA, 752 bp, Homo sapiens
cacttgccccacacttttaccttaagcttttgagtctctctttggagaacttctctttaccactctgactcttgtgctccggaggaggaggtgggcctccctgggcacttaagggcagctataggctagcagaatgcatgccactgagtggaggtgtgcaggacactgtgtgcagcacagaggctggggagggatgataggaacccctgtctttgagaaagttattacagtgagccaggagctctggaatattttgtctggctcttgtttgcatgcccaagtcttgcttgtcctcgtagggtctgttcaacatggtcttaccctcctgtgagctcatgcagtgctttaacctgtccctctctttggaacttctcagcactgggactagtaatataatcatatttttgcaaatacttgccttcatctctcatcatttttacttccccaatctgggttccaggcactgactcagagcccttcaaaccatactctttcttgcctccagaaagctcttgctgactattctgtggccatgctcactgccctacttgttcccctgatgagtgaatgctcctatgagagcrctaaccttccttcaatgaggtctttcaaccacttccctttcttctgctctggtctgtaagttatgccaggacaaagatttgtcttgggacctgccacatcctgggcacctgaaaaagagtctggaatataggaggtgctcaaatatgtgtcagttgactatcagctct

SEQ ID NO: 40495 - DNA, 1249 bp, Homo sapiens
agacgtttcaataatggcatcagtacacggtctcttcatgtcaagctctcttttccactgtgccaacttctttctcagccaggctttctcctcgtggtggcaaagctagccactgtctgcaccagcttgcatcattccacagctgctttagagaaaagaacaacaccctttccccctgggcatgcatctcactctcctaaaaggactgtttggatgacatgactacccctgaacctccaaccagattccatgcaggtcacgtgcccagccctgcagcaaggtcttagggccctttgattgacagctccattggaatcaatgcagggggactgttcccataaaacaaagaagtgtgctgttaccagaagaagagagaaggctcgccgggcaggcagattgcaatagctgtcaactagagttaaaaatatgctctaagtaaatccctggatgacctaatgcatcttaatgggctgttgtggggagtgaggatgcttgcaagatttcattctgtcggtcactcagtgcccagccagggaaggattcatggactggatctccattgatctgttttgtcctttgcacacggccagtccccagcttgcctccagaccacacccacagtctcactcccaccttcaaggtagccttggaggccagacttctccccttgagctaaggtggtccaggaagcatgaggatctgagggctgaacattcaatccttgcttaaatgagtgctgggaggggatagagcgaaatacagatggccctgaaaagaaccctggacatggaatcagaagccaggggtctgatgctggccctgttccctgccagctgcatgaccttggaccatgccactgccctcagcatcctcttctgccaaaggaggggctgggctagatggtctctgacgtctcttccagtgctgacattctgggactctgtgaatgttattaaattcatgaatcggcttctttgcctggaacaagtcagcttaaaatacatgcaaattgcactaagtatagctgttcccttgctgaggaggcagcctggcatatttacatagtttgaaattggctgctgcatgcacagggtgggggagcagtgacaggctctgaggctgggccagcagccgccgcctctaatgcaagtggggtcccagacctttctcagcttggagtcctgaaattcattgttagcagggaagaggatgagagctgctctgtactagagcctggataygtcaggat

SEQ ID NO: 40496 - DNA, 538 bp, Homo sapiens
ttttttttttkgcctgctgtttcttttttctctttcacacagaggttggtcctgatgaacatgccagtagctgaggacatgacggtccacttcacctccacacttatggctctgatccggacagctctggacattaaaattgccaaaggtaagcttaggaagggaggtgggaaggaggaattctggaacaactcatgcaggtggcacaggatggagatatttgaactgtcatctatccagttaaggacacaacaatgcagtcatctgaacatcaagtatctgactcaataactaataattgccctttccttctggtacagtgaatggtttgataatctctaggggcttctttcagctttaaaagtatatgatcttcagtgtctggctcacaataggtattctagaaatatttattgaccagaggttaattttgtcctttttttctgtatatggtttattttctctgaagtcttgagaggcttctgtggcagaaggtgctgtcatagaggccatggtagtgttttattcctcttgattt

SEQ ID NO: 40497 - DNA, 1305 bp, Homo sapiens
  misc_feature (1)...(1305): n = A,T,C or G
tgcatgcctacatgcttttactttctgagcacttccttatttcctgacactacaagactctccaggctcatcttgtatttttcgcactcttgccctagaatcagccatgtctccaaaaagccctggcccctttcactgaaaaacaatctttagaaaaagcaagatctgagtgttcagcgtgctcattgctcctggggtggcactggctctagaccaagaaacttccttttaaaccataagcgagagaggcatggtggtgagagatgaggcttgaacacccactgggtttttgttgtgctgatctcagtaaggaccaaagcagtaatttacattctagatcctctgggaaaacagaataaatcccacagatgagttagttgggagaaaaacatgaacataggtgatgcagtgcatgccagaattgagagaactagatgaaaaaggagtgtgcaaggacaggcctggtgtatgcctgtgcccagtgaaattataaatcgcatgctctttgcacccaaaagtgtccccatttggactacaaattacctggtcaacttagaaactgccttgaagatgagatttgtgatagctgagccactgattaagaatattacaatgttttgctgtgtcaaacaatgtaatcattcctttgcacattttatagaaatttttataaagatttaaaccatatttcagtgtttcttggatgtcaaatgtgcctccgttaaatgtgcttcttttctctttggcacctagctgtcctccccaggctaagccctccctccaaagaggaraagagctccatctgaaaaatccatttgctacaagagatagaaagaagttatttaggcagatagtatgggtaagagagtcctcagcagaatttcccttttaatgaaaaacagcctcaaactcgtttcttttctaacaactgcctgaaaaatcgagctgcagacatagatacaagcaagctagaagcttgcacaggtgaatgctggcagctgtgccaataggaaaggccacctgagagccaggcatgttccacatgnaggctctatcttcccttttctttgtcaccacgtgtacagtaaggaaacaggcaacatggcatcagccagatagagaacccatctgcataataaaagattagggtggggtggccagctttttcatgccctatgcaaatggcacatctagccctaaccagtttttcgcaccctatgcaaatgacacacctggtccaaccaatcttttgtgccctatgtaaatccaataccacctcctcaagctcatctataaaacctgatg

SEQ ID NO: 40498 - DNA, 1174 bp, Homo sapiens
  misc_feature (1)...(1174): n = A,T,C or G
tgatttataattttatcttgggaggtggcggagtcccataaactgctttactgcttcgctnatgatcatttgagccaagggaaacaaaggaagaaaagaatgagatttaagcacaagttttaatcacattccacatatagaaatgcaacaagtaagccagcctttggaaatggccattatcacaaatgtattgtgtgtctgaggctttgcaaatgtctctgctaggacagtatgattgcagaggtgcatggaggttaaatacaacttcagagcagcctcacagtgccttgtatggctgacatgcctttagatgccctgtggctttccaggcaggaaaggggacccagtagatgtgctgaggttttcacacctatcgcaggcttcttagtgtgaatgtggagcttaccagggctagctcttgcaggctgcaatttccagataactggaagttacacagtgatggtggccattggttattctgattattacaaagaatcaggaaagatattatttactcttttagtggattttccaacatatggcagggttgggtgtgttgctctctcatctccaataacgaatcggctttctcttggccagcaactcttgtgcgtaggaggctgaatgccttgttctcttgggaaagatagacttagctgccaggatgaggaatccagctacgcctggacagggtggggtctccagagagcaatgtgagggagagggrgggattgaacaagaagacctgggctctggtaaagttaactttttaatatttactagggagcctagagtttcagttgataactgcgtgatgtgtttgcaccaagtgagccaaatgacatcccagaaagctgtgtgagagaaggctttgcagtaattcaaacatagaaaaggacctggagtattcagacaccacatagtgcccagtgctacaggcttgggatagcaaaagaacctgtactgcggattcattcatgacttcatttcagcacaatgacattatcaggaacattaaattagtgtaactgatgtgaattttatttataaagtttattttcatttatagttacatgttttgattaatatatgtacctgtttaggtaaggtcatgataataataatttaagtaaacactaggaaattacaaggttttttttttttaaatgagttc

SEQ ID NO: 40499 - DNA, 1174 bp, Homo sapiens
  misc_feature (1)...(1174): n = A,T,C or G
tgatttataattttatcttgggaggtggcggagtcccataaactgctttactgcttcgctnatgatcatttgagccaagggaaacaaaggaagaaaagaatgagatttaagcacaagttttaatcacattccacatatagaaatgcaacaagtaagccagcctttggaaatggccattatcacaaatgtattgtgtgtctgaggctttgcaaatgtctctgctaggacagtatgattgcagaggtgcatggaggttaaatacaacttcagagcagcctcacagtgccttgtatggctgacatgcctttagatgccctgtggctttccaggcaggaaaggggacccagtagatgtgctgaggttttcacacctatcgcaggcttcttagtgtgaatgtggagcttaccagggctagctcttgcaggctgcaatttccagataactggaagttacacagtgatggtggccattggttattctgattattacaaagaatcaggaaagatattatttactcttttagtggattttccaacatatggcagggttgggtgtgttgctctctcatctccaataacgaatcggctttctcttggccagcaactcttgtgcgtaggaggctgaatgccttgttctcttgggaaagatagacttagctgccaggatgaggaatccagctacgcctggacagggtggggtctccagagagcaatgtgagggagagggagggattgaacaagaagacctgggctctggtaaagttaactttttaatatttactagggagcctagagtttcagttgataactgcgtgatgtgtttgcaccaagtgagccaaatgacatcccagaaagctgtgtgagrgaaggctttgcagtaattcaaacatagaaaaggacctggagtattcagacaccacatagtgcccagtgctacaggcttgggatagcaaaagaacctgtactgcggattcattcatgacttcatttcagcacaatgacattatcaggaacattaaattagtgtaactgatgtgaattttatttataaagtttattttcatttatagttacatgttttgattaatatatgtacctgtttaggtaaggtcatgataataataatttaagtaaacactaggaaattacaaggttttttttttttaaatgagttc

SEQ ID NO: 40500 - DNA, 583 bp, Homo sapiens
agtttctagaaaacagttttagtcctctcaatttggtttctgccttgctacatagcaaattatgtggtccttcttcttctttttttttttgagatggagtttcgctcttgttgcccaggctggagtgcaatggcgcgatcttggctcaccgcaacctctgcctcccggattcaagcgattctcctgcctcagcctccygagtagctgggattacagtcatgcaccaccacgcccggctaactttttttatatttttagcaaagacggagtttcaccatgttgatcaggctggtcttgaactcctgacctcaggtgatccacccgcctcagcctgccatactgctgggattacaggtgtgagccaccgcgcccagcctaattatgtagtccttgattcttttctgagaactttgaagacttgaatggagttttaggatagactcaattttgtaataaactcatgttcttcaatgtgcttgattaggacattactctgaacctaggaccaagtattgaaagataagtgttccactgaatagccacaacaactccaatatgacactggaccttgggtttttcaacc

SEQ ID NO: 40501 - DNA, 583 bp, Homo sapiens
agtttctagaaaacagttttagtcctctcaatttggtttctgccttgctacatagcaaattatgtggtccttcttcttctttttttttttgagatggagtttcgctcttgttgcccaggctggagtgcaatggcgcgatcttggctcaccgcaacctctgcctcccggattcaagcgattctcctgcctcagcctcccgagtagctgggattacagtcatgcaccaccacgcccggctaactttttttatatttttagcaragacggagtttcaccatgttgatcaggctggtcttgaactcctgacctcaggtgatccacccgcctcagcctgccatactgctgggattacaggtgtgagccaccgcgcccagcctaattatgtagtccttgattcttttctgagaactttgaagacttgaatggagttttaggatagactcaattttgtaataaactcatgttcttcaatgtgcttgattaggacattactctgaacctaggaccaagtattgaaagataagtgttccactgaatagccacaacaactccaatatgacactggaccttgggtttttcaacc

SEQ ID NO: 40502 - DNA, 585 bp, Homo sapiens
ttccttgtgaccaacacaagtagaatctgctgtcaaacccaggtcctttgtactccagacgtcttaacgtctccttgacattgactctcagctctaaatttcctgactttgttgggcctcagtttccctatccattaaaggaggaaaacaaatgccaacatcatagcattgttgtgggcactgaatgagatcccacatgcctggcatattgaaggggcccctaagtggttattattagtgtcgccttctctcttgtgctgagagaatatctcagttgttgccgggcacggtggctcacgcctgtaatcccaggactttgggaggccgaggtgggcagatcacgaggtcaggagtttgagaccagcctggccagcatggtgaaaccccgtctctactaaaaatacaaaaattagccaggcatggtggtgggcgccwgtagtcccagctacttaggaggctgaagcaggagaattgcttgaaccccagaggcggaggttgcagtgagccaagatggcgccactgcactccagcctgggtgacagagcgagcccctgtctcaaaaaaaaaaaaaaaaaaaaaaaaaag

SEQ ID NO: 40503 - DNA, 1409 bp, Homo sapiens
tgcatataaaattttgataaaattttataaccttcaaaaaggttttataaattcatattttcaacaaaattacaagaagcccatttgcctaaatattcatcatcccgctttataatctttgccacatgaataagtggtatcctgttatttcaattttcactctcttaatttaaagtaaagctgagtattttttcatgtttatgggccgcctttatttcctttacttaggaactttcttttcataactctcttcatttttatgcaaacttaagtcaatattttagataaattttgctaattgtatataattaacattatgaacctccagtagcatttccccatactcaaaaacatgtgtctgccgggtgtggtgggtcacacctgtaatcccagcacttcgggaggctgaggtgggtggatcgctgaaggtcaggagtttgagatcagcctggccaacatgatgaaaccccatctgtactaaaaatacaaaaattagccaagtgtggtggcaggtgcctgtaatcccagctacttgggaggctgaggcaggagaatcgcttgaacctgggaggggaggttgcagtgactcgagattgcaccactgcactccagcctgggcgacagagcaaaactctgtctcaaaaaaaacaaaaacaggccaggtgtggttgctcacgcctgtaatcccagcactttgggaggccgaggtgggcagatcatgaggtcaggagtttgagaccagcctggctaacatggtgaaaccctgtctctactaaaaatacaaaaattagctgggcatggtggcgcacacctgtaaatcccagctactcaagaggttaaggcaggagaattgcttgaacccaggaggcagaggttgcagtgagccgagattacgccactgcactccagcctgggcaacagagcgaggctctgtctcaaaacaaagaaacaaacaaccatgtgtcttgaatgttttacccattctctgatgggttctatcccatgtaacccctcataaagagagttgcaccatttcataatattaagttgaaccataagaaattgctgagattcaaccactttgacctataacaacagcartttcacatgattgaacctagtactattccctaatagtaaaaacaaaaggtagtttaaactaatttttatttagcagttgtgaataaataaagattagagatttttctgagtgaaatggatctctaagatggtatctaagtaaaggtgtgaatgccatagttaaatgaggaactatattggaccctttgcctcttactgacactatggcttacctctcttctttgtttttatttttgttttgtaagaacggcgataaagcagcatcacccagcgagttgacttgtcctccaggttgggaatgggaagat

SEQ ID NO: 40504 - DNA, 548 bp, Homo sapiens
attatacaccaaggttgtttttaaaaagattatgaatgtaaggtacttggcatgctgcctggttcaaaattaatgatcaaaaatgttagctatttttaataatgcataatgaactaggtagtctttcgtgatatggcatggtaacccacactattgcttctagatcaaaatacatcttgagttcctcaacttgcttgtaatttatggccttcttattcaactaatgccagcacaccttgcttcttccacctctcttttttttcttttttattttttttgaggcagagtctcactctgtcacccaggctggagtacagtggcacgatcttggctcactgcaacctatgcctcctgggtccaagtgattctcgtgcctcagcctcctragtgtctgggactacaggtgtgcaccaccactactggctatttttgttgttgttgtttttgtatttttagtagagacggtgttttgccacgttggccaggctggtctcgaactcctgacctcaggtaatccacctgccttggattacaggcatgagccacca

SEQ ID NO: 40505 - DNA, 608 bp, Homo sapiens
tttcaatagtcctcttactctgggacagtttgttctttccatcagagagggctacacaccggccggttgcaatttgagggctctgtgctctgtacaacttgttctgctctcatgggttttgctcatcctggagcaatgaacattatgatcatagaaagggtaacttcttgaactgaaagtagattgctccccattaacatgcctcttgccctgcctttcacactgtggggcagtttcacttgcaaaatatttatgaggtgcttgttacatctggctaggtgccagggagataaagaggaacagggccgggtgcggtggctcacgcctataatcccagcactttgggaggtcgaggcgggtggatcacctgaggtcaggagttcgagaccagcctgaccaacatggagaaaccmcatctctactaaaaaaatacaaaattagccaggtgtggtggcgcatgcctgtaatcccagctactcgggaggctgagacaggagaatcgcttgaacccgggaggcagaggttgcggtgagccaagatcacaccattgcactccggcctgggcaacaaaagcaaaactctgtcacaaaaaaaaaaaaaaagaaaaa

SEQ ID NO: 40506 - DNA, 452 bp, Homo sapiens
gtaaagatttgcaaaatgaaatgtaaagccatgccacttttcttaccttttggggggatttggaaaatatagctatttattttttaaatgtactatctacattcatgtaataggcttatcattattttaaaatagatattttaaaatgtctatttcaatttctatgatggttaagtgttgacaaatataacctamataaaccaaagtattttggggcctttaataatttctaagagtataaagcattcctgaaaagaaaaagtttgaaaactgctgtcatatggtttaatcctagactttacacaatgtaaaataagaaacgattgtccagcacttacttatttacaaagtgtttcccactcataccgcctcatctatgacaatatttctactaggtaaggtttaatcctatcattccatataattaaaaaaaacttttattaaacagcaca

SEQ ID NO: 40507 - DNA, 452 bp, Homo sapiens
gtaaagatttgcaaaatgaaatgtaaagccatgccacttttcttaccttttggggggatttggaaaatatagctatttattttttaaatgtactatctacattcatgtaataggcttatcattattttaaaatagatattttaaaatgtctatttcaatttctatgatggttaagtgttgacaaatataacctaaataaaccaaagtattttggggcctttaataatttctaagagtataaagcattcctgaaaagaaaaagtttgaaaactgctgtcatatggtttaatcctagactttacacaatgtaaaataagaaaygattgtccagcacttacttatttacaaagtgtttcccactcataccgcctcatctatgacaatatttctactaggtaaggtttaatcctatcattccatataattaaaaaaaacttttattaaacagcaca

SEQ ID NO: 40508 - DNA, 602 bp, Homo sapiens
gcctcggcctcccaatgtaccgggattacaggcgtgagccaacgccctctgccaaagctgattggactcgatcttaaggttagataagggtgttaaacattttaaggagggcagtgccatgatgagattttagttttagcaagattacgcttaaggcgtgccttggacatggtacaggaggaaaaggagatgatcagattttccttttggaaataatcsctggtctgtaaggagctgaaggaggtctacaggtaccgaaggagggtaccattgtagggttttcagtaggacagtgataagatgacatgtgcattttaaaaggatcactcttctagaaagacctgaaaaggtataaaatgataagtaactgggagccagaggaaacttagactcaaggcggcagtcaggcccttagccatgtcttccatccgcttcctgtgccagcgctgccaccaggccctgaagctgagcggctcctcggagtctaggagcctccctgcagccccggcgcccacctctgggcaggctgagcccggagacacccgggagcccggcgtcaccaccagggaggtgacagacgctgaggagcaacaggacggtgc

SEQ ID NO: 40509 - DNA, 602 bp, Homo sapiens
gcctcggcctcccaatgtaccgggattacaggcgtgagccaacgccctctgccaaagctgattggactcgatcttaaggttagataagggtgttaaacattttaaggagggcagtgccatgatgagattttagttttagcaagattacgcttaaggcgtgccttggacatggtacaggaggaaaaggagatgatcagattttccttttggaaataatccctggtctgtaaggagctgaaggaggtctacaggtaccgaaggagggtaccattgtagggttttcagtaggacagtgataagaygacatgtgcattttaaaaggatcactcttctagaaagacctgaaaaggtataaaatgataagtaactgggagccagaggaaacttagactcaaggcggcagtcaggcccttagccatgtcttccatccgcttcctgtgccagcgctgccaccaggccctgaagctgagcggctcctcggagtctaggagcctccctgcagccccggcgcccacctctgggcaggctgagcccggagacacccgggagcccggcgtcaccaccagggaggtgacagacgctgaggagcaacaggacggtgc

SEQ ID NO: 40510 - DNA, 602 bp, Homo sapiens
gcctcggcctcccaatgtaccgggattacaggcgtgagccaacgccctctgccaaagctgattggactcgatcttaaggttagataagggtgttaaacattttaaggagggcagtgccatgatgagattttagttttagcaagattacgcttaaggcgtgccttggacatggtacaggaggaaaaggagatgatcagattttccttttggaaataatccctggtctgtaaggagctgaaggaggtctacaggtaccgaaggagggtaccattgtagggttttcagtaggacagtgataagatgacatgtgcattttaaaaggatcactcttctagaaagacctgaaaaggtataaaatgataagtaactgggagccagaggaaacttagactcaaggcggsagtcaggcccttagccatgtcttccatccgcttcctgtgccagcgctgccaccaggccctgaagctgagcggctcctcggagtctaggagcctccctgcagccccggcgcccacctctgggcaggctgagcccggagacacccgggagcccggcgtcaccaccagggaggtgacagacgctgaggagcaacaggacggtgc

SEQ ID NO: 40511 - DNA, 602 bp, Homo sapiens
gcctcggcctcccaatgtaccgggattacaggcgtgagccaacgccctctgccaaagctgattggactcgatcttaaggttagataagggtgttaaacattttaaggagggcagtgccatgatgagattttagttttagcaagattacgcttaaggcgtgccttggacatggtacaggaggaaaaggagatgatcagattttccttttggaaataatccctggtctgtaaggagctgaaggaggtctacaggtaccgaaggagggtaccattgtagggttttcagtaggacagtgataagatgacatgtgcattttaaaaggatcactcttctagaaagacctgaaaaggtataaaatgataagtaactgggagccagaggaaacttagactcaaggcggcagtcaggcycttagccatgtcttccatccgcttcctgtgccagcgctgccaccaggccctgaagctgagcggctcctcggagtctaggagcctccctgcagccccggcgcccacctctgggcaggctgagcccggagacacccgggagcccggcgtcaccaccagggaggtgacagacgctgaggagcaacaggacggtgc

SEQ ID NO: 40512 - DNA, 885 bp, Homo sapiens
agtgccagttgtgtttggaggaagtaggcttctcccctagctccaagagatgaaccatsttggctcaaaccaatcctcatgtaatctcattcctcatggctgtaatgggtgcaggagttggtacatacagcccagctttggccaatgagatctgaggataaattcctcccaatgctcaattcatgctcttgaactcagtttttgatgtttggctctgtgacagctttttctgggggggaggggaggtgggggatgaccatgagaggaaagccaggataatgaacagctaacagagcactgatgtgaaagaaatgctgaattaaccctggaatcacttacgcctggatttcctgtatgtgagacagtaagtccttattgactaagccactcttaggggttcagctccttgcagccaaaggtatcttagttgatactgacatgttctcccttctcagcttccattctcacccacctgttcttcaggcccctacctgatctctataccctttgcatattagtagtctggagtttcacccttggctttcttcttttattattctattcactttctctttgtgctttctctcttccacttggatgatttcaactatacatatttgtttataggtatatataaatatttattaaggacctactatgagccagatcctgttccatgttctatattctgtggatatactgataaataagaccactgtttccctggacaaaagaacatatgtatatgtatatgtatatgtatatgtatatgtatatgtatgtgtatatgtatatgtatgtgtgtgcatgtgtatatatatgtaaatactcatatgcacatatatgtgtgtatagatatgtaaatactcatatgcacatgtgtgt

SEQ ID NO: 40513 - DNA, 885 bp, Homo sapiens
agtgccagttgtgtttggaggaagtaggcttctcccctagctccaagagatgaaccatgttggctcaaaccaatcctcatgtaatctcattcctcatggctgtaatgggtgcaggarttggtacatacagcccagctttggccaatgagatctgaggataaattcctcccaatgctcaattcatgctcttgaactcagtttttgatgtttggctctgtgacagctttttctgggggggaggggaggtgggggatgaccatgagaggaaagccaggataatgaacagctaacagagcactgatgtgaaagaaatgctgaattaaccctggaatcacttacgcctggatttcctgtatgtgagacagtaagtccttattgactaagccactcttaggggttcagctccttgcagccaaaggtatcttagttgatactgacatgttctcccttctcagcttccattctcacccacctgttcttcaggcccctacctgatctctataccctttgcatattagtagtctggagtttcacccttggctttcttcttttattattctattcactttctctttgtgctttctctcttccacttggatgatttcaactatacatatttgtttataggtatatataaatatttattaaggacctactatgagccagatcctgttccatgttctatattctgtggatatactgataaataagaccactgtttccctggacaaaagaacatatgtatatgtatatgtatatgtatatgtatatgtatatgtatgtgtatatgtatatgtatgtgtgtgcatgtgtatatatatgtaaatactcatatgcacatatatgtgtgtatagatatgtaaatactcatatgcacatgtgtgt

SEQ ID NO: 40514 - DNA, 885 bp, Homo sapiens
agtgccagttgtgtttggaggaagtaggcttctcccctagctccaagagatgaaccatgttggctcaaaccaatcctcatgtaatctcattcctcatggctgtaatgggtgcaggagttggtacatacagcccagctttggccaatgagatctgaggataaattcctcccaatgctcaattcatgctcttgaactcagtttttgatgtttggctctgtgacagctttttctgggggggaggggaggtgggggatgaccatgagaggaaagccaggataatgaacagctaacagagcactgatgtgaaagamatgctgaattaaccctggaatcacttacgcctggatttcctgtatgtgagacagtaagtccttattgactaagccactcttaggggttcagctccttgcagccaaaggtatcttagttgatactgacatgttctcccttctcagcttccattctcacccacctgttcttcaggcccctacctgatctctataccctttgcatattagtagtctggagtttcacccttggctttcttcttttattattctattcactttctctttgtgctttctctcttccacttggatgatttcaactatacatatttgtttataggtatatataaatatttattaaggacctactatgagccagatcctgttccatgttctatattctgtggatatactgataaataagaccactgtttccctggacaaaagaacatatgtatatgtatatgtatatgtatatgtatatgtatatgtatgtgtatatgtatatgtatgtgtgtgcatgtgtatatatatgtaaatactcatatgcacatatatgtgtgtatagatatgtaaatactcatatgcacatgtgtgt

SEQ ID NO: 40515 - DNA, 573 bp, Homo sapiens
atcttctttcataaaatgtctattaatactatttgtaaatgccattcttcaaaacaatccttttgggagactacatttatttcaataagagctacaggaaatcaatttaaaataatgcttggcagattattagtcaatagaagggagaggctatctgttaaaaatgttgatgttggggaagatataaaagctctgaagatgtgtggtggtgatggttgcacaacaatatgaatgtgcatgatgctataaaactgtacacttaatactgstaggaatggcaaattttatggtatgtatattttaccacaataaaaaacaatatggacttaatgacaatagcatgaaaacgtagaacattacaaagagaataaaaattcttgcgtaaacttgccaagaaaatgttaacattgaaatcacctccagatataatgaggaactatggaaagtcattcctttggtcatgctatgccagtaacataatgctcaaacatattagcaattctttatttggaaaagttatgaatcacacaataaaatcagtctactaactttcggtaaccttttaatttctga

SEQ ID NO: 40516 - DNA, 1208 bp, Homo sapiens
tcattagaactattatatagaactattgtatgacacagaaatctcactcctgaatatatatcttcaggaaataaaatcagtatctccaggaaatatctgcacccccatgtttattgcagctttattcactgtagacaagatatgtaatcattctaagtgcccatcagcagatgaatggataaagaaaatgtgtatatacacaatggaaaaaggaaggaaatccataaaatccattaaaaaagaaggaaatcctgtcatttgtggcaaaatgagagaacttggagaacattgtgtttagtaaaataagccagttacagaaaggcaaatactgcatgatttcacttacacatggaatctaaagaagctgaactcgtagaagtagagaagagaatggtggttaccagaggctgggaaggggagggtggaggggtgggtaaggagagattggttaatgagtacaaagtggtctgactttttgaaataaagtctgccttcctatttgtaactatctgtgtcagcgacgctatcatgtggacgatttttacaaaacataggtgtctaggcaacttttgagctgaaatgcttttataaaaagtcttacagaataatcagagaacgtgttctgtcctacttcaccgtcaagtgaaaatattgccccctcacattagaaatatctttcttgttagatatacaataggggaatcaatttcttaatcggtcagtaatcgccttgaaggcagataatccattgacctaaaaatcattgtgattgagaccctgagcatgggtttccaaacagctgacattacacagccatgacaygagaagggcattgtgtgaggcttgtgcataactcaggtttcttttcaccattttctttgcttccgtttaaatgctttaactgtggtcttgctctgtgtagcaggctgaaaaatgatacctttttccccaaaggtatctacatcctaattcctggaaccggtaatcatgaataaagtggctttgcagatgttaaggattttgatatagggagattattctgggtatccttgtgggccctaagtgccattggaagtgtccttacaaaggagaggcagagggagatttgaacacagacagaccaggaggaggccacgtgaacacagaggcagagattgcaatgatacggctgtaagccaaagaacgctgcagccaccagaaactgtaag

SEQ ID NO: 40517 - DNA, 1208 bp, Homo sapiens
tcattagaactattatatagaactattgtatgacacagaaatctcactcctgaatatatatcttcaggaaataaaatcagtatctccaggaaatatctgcacccccatgtttattgcagctttattcactgtagacaagatatgtaatcattctaagtgcccatcagcagatgaatggataaagaaaatgtgtatatacacaatggaaaaaggaaggaaatccataaaatccattaaaaaagaaggaaatcctgtcatttgtggcaaaatgagagaacttggagaacattgtgtttagtaaaataagccagttacagaaaggcaaatactgcatgatttcacttacacatggaatctaaagaagctgaactcgtagaagtagagaagagaatggtggttaccagaggctgggaaggggagggtggaggggtgggtaaggagagattggttaatgagtacaaagtggtctgactttttgaaataaagtctgccttcctatttgtaactatctgtgtcagcgacgctatcatgtggacgatttttacaaaacataggtgtctaggcaacttttgagctgaaatgcttttataaaaagtcttacagaataatcagagaacgtgttctgtcctacttcaccgtcaagtgaaaatattgccccctcacattagaaatatctttcttgttagatatacaataggggaatcaatttcttaatcggtcagtaatcgccttgaaggcagataatccattgacctaaaaatcattgtgattgagaccctgagcatgggtttccaaacagctgacattacacagccatgacacgagaagggcattgtgtgaggcttgtgcataactcaggtttcttttcaccattttctttgcttccgtttaaatgctttaactgtggtcttgctctgtgtagcaggctgaaaaatgatacctttttccccaaaggtatctacatcctaattcctggaaccggtaatcatgaataaagtggctttgcagatgttaaggattttgatatagggagattattctgggtatccttgtgggccctaagtgccatyggaagtgtccttacaaaggagaggcagagggagatttgaacacagacagaccaggaggaggccacgtgaacacagaggcagagattgcaatgatacggctgtaagccaaagaacgctgcagccaccagaaactgtaag

SEQ ID NO: 40518 - DNA, 534 bp, Homo sapiens
atacatgcagaatgttatgtttcagccaatgggacttgacctgtggtgacccaaatctacagaacaacaatcctgttgaaactgctcttgatccttgatctggctcatctatgctcatgaccttgtatttatatcagtcctgtcctctttccgttttctaaacccataacatwttatttttagtatcttagacttcctgcttttagagaagtttatttattgatttgttaatcatccaacagacacatattgaacccctactggttggtgctgcacatggtcagaggctagtcagggagttgaacaaaacaaagggctgtgtcacttagtatgcttctattgccagtgacagaaatcctgattcaaatgatttaagcagaaatagaatgtattccctcacctacctggcaagtctagggacaggtctggtttccttcaggcacaactggattcatggatcgtaatgctgcctttgggacctggcctgtcttcatctctcggctctgctctgctttgtgatggcttcattctcaa

SEQ ID NO: 40519 - DNA, 522 bp, Homo sapiens
tatgtatagtcaataattcaaaatcaattccattataattgtgttgttattgctgccacagtcagaaaaaatagtttccctcggccagaaaaaggaataaattaagggtcaaataagtatataaattatatacatttaacttccctaatttaattaatgttaaactataaatttattttatttatgtatttttttttagacagagtctcgctctgttgtctaggctggagtgcttttgcatgatctcgtttcattgatcctgcacctcccgggttcaagtgattctcgtgcctcagcctcctgagtagctgggattatgggaatgtgccaccaagcccggctaatttttgtatataytttcaaattatactttaagttctgggatacatgtgtagaacatgcaggtttgttacataggtatacatgtgccgtggtggtttgctgcacccatcaacctgtcatctacattaggtatttctcctaatgctatccctcccctagacccacaacccccaacaggcc

SEQ ID NO: 40520 - DNA, 632 bp, Homo sapiens
gtttagagaggggagggggaccctagctgtagcaatcttacagaagtaaaacaggcaaaaaagttaaaaagacaaacggttacaggaaaacaaacagttccaggtgcaggggctttaaattcatcacaaggtgataggtgtgggggctctgggtgatatctgctggacacaaacgcgggggctttagagtactatcacctgagcaaattcctgggcactgtggacatagcttgcttgccacagtaccttatcagttaattgcactctttgatgtgctgggagtcagcttgcacaagttaagtccttgaggaagggggtgggtaaggagcccttaatgtcttgcaaatgaaggagccaaatggaatccatctggctttctcagctaagagagagtcaatcaggttaatacaagttacggtatcacagaactacagtagtagcagtggagatgaagacaggtgaagagatttgaaatatattttgtagctagagatggtagaaactgttgatggattagatgcagggrcatatagaaaatagtcctaagagtgacttgtctctgttcccatgatctccctttccttctggacctcctaacaagattctcttgttcaacattccagttcacaaat

SEQ ID NO: 40521 - DNA, 946 bp, Homo sapiens
cagtgcccttgttctgttgtttcattttttctgaccctccctggatttcttcttggaaatacaccatgttctaaaatgaccttgcagattttctaccctttatctttctttctcatcgtttcccctcaaactcctgttccctttggaacagattaatcagattgtttttctaatgcagaacctgatagtgaggtctcctttcacccatcttgtccaggatcatacttgctttttttaactcaaatgaattccaaatttgtggatttcaggttgtgttagggagatatttttcatcagtgactacttcttattaaattactcaactcagactattctgtgtataggtctggtcctgaaagattgcagaaggaactgtatttatggcctaattagttgacttcctcagttccaaagaatgggaagacaaattggcaagagcaagaggaggtattgaggagcttctagatctatgattttttttttccttctccagtaagaggagtttcatagctcaggtatcccaggcatatcagaagacagctgtgtccatgtgcaagggttccagtgaagcaggcagacattgtgcacagtggtccctctcatcaaagtgactctattttttgactatattaatagattgaacctgaaggttcaagacagcaagctaatagagcaagggacctagaaggtctagcagagataggggctgaaaaagagtaatcttgaraagaaggtggagaaggagctatttaaggttctagaacatgttggccagagatgtgggatagcaaacaccttgaaaggattatcagaggagtttcctgcttcctgctccttatgatttatttatagcacgactacaatttctctatatcctgaaatacaacagagtgattttgctataaatttaaaaaccatattaccaaactaaagtatgcttatgtgg

SEQ ID NO: 40522 - DNA, 1058 bp, Homo sapiens
tgaaaagcccctgaatatatgccttggaatgagcacaataatgcaagcaccagcagtaaagggattattgatattgttggggctcagaaaacaataacctaaaatgaaggcctcataagcaaaagttttttctctgaccttctgactttctgtttctcagtcccattgtaccctgaggctagccatagaaattagactccatctttcctaaggcacatcatagaaaccagaactcctttttcccaaagccagacataaaacataaaaatattactctagctttccttctaccttttcatgtaaaaactggtcattaagaaaaatctgacctaccttgtttgactgtaggtcataaggccctattccagacagggtccttccttcacatgaagaaaggaattcatgctctgagaggtcaagaagaatctaaatactcaggcattgctgggtttccctattccaactcttaccattagatcacaccatttttgtccaatcacatttctacgtgactggtttatactttgttgaacctaagcgtaaaaatggacaatttcccctgtatcagatggtcttcattctgaaggttcctgtgtatatacattacrtacatttgtatgtcttttttcctattaatctgtcttttgcaagttgatttttcagggaacctttatagggtcccccttggcctctacactatttatattgttaagtcaactcactgccctaacattaactcggagaagtacatctaggtgctcgggccatggtggagatgccaggaaaaggggcttgatttagataatcctactcagccacctggaagaaggagttatacagacaagagacctgatattctagtggggatcatcttccagtcctgtgttatacaacaggagcagcaacagtattatcattcaatgccttctttaggcccaaagagtatatcatagacccaggaatagtagcccaaatacaaagtgcaggaatagtgactttaaagaatgagtaagtttataaccatcacttgctatatcatgaatagaaacaatcaaatg

SEQ ID NO: 40523 - DNA, 627 bp, Homo sapiens
gatgcagatagcaggtcccactccagaccctctggacacattgcatgaggctctctgcagggtggacgagctccctgggaatcctgaactgagcaccggctccgcagtgccgtagccattgcgtgaaaatgcctcccagaggcacagatgccagagcagkcctcttgaatagatgggctgagatggggtggacctgatcaaaaccccagcgtggtgcagatggaagaggggaacagggcctgggttccctgagcatgggttattagttgtggggggccatctgatgctcctgccaagttcagtgaggaagagcgagcatcccttgtcctagtcgaagtcattaccctcaagagatggcaaaaacatggaaattgcttcaaattccctgacaccagatccgtggtatatttctaagggaagccggcagccccgacctttggcgataggtcacagatggcggtggtggcatccctcacttgtcatcccgcccagcggccaggtcctgcactgatcctgctggacatgtccttagcatctgaagtgccccacagtgttgagaaaatggcatggcacaagtccacctgattccacaaaagcatctatgggaatgttttcaaatcagtttct

SEQ ID NO: 40524 - DNA, 704 bp, Homo sapiens
tgccctgtggcctggtctccaagcatcccacagaaccatgctgtcccctgctgtgcccctccacaatgccccacctccttgccctttaccccaatcccttgggcagggataggggctgttcttggctgtgttccatggcctggggctctccccgagtgacctcaccaccacgctgctcaccaaccacgtgccccgagtgctcagggggccaggagctgggcctccgcaaggcacatgcctcacrttcgttatggtcgtgttgcgggaggggcggggaaggtggccaggagctgggcctccgcaaggcacatgcctcacgttcgttatggtcgtgttgtgggaggggcagggaggggtctgagctttagacgggtttaaggacttgacttgccccgattccctgaaaggccaagggtagactcagattccaaccaccagctctcacagtctaccctcccgggcgcctggtgcactgcccctggtcagtcgacagccctctgcacacagcagcatccgcgagtgggcatcggtgtgcttggccaacccggagccccctcccctccagggcacagggcagcactgggctggggctggtgatgggagggaagaaggcgaggatgggaggggtcccaggatcccccgtgggggatgcaggtgcagtgtacacagctcagcccaggctaggaaaccgtgcgcccctgcct

SEQ ID NO: 40525 - DNA, 507 bp, Homo sapiens
gcaggcggatctgctgttgaccgtggccccggccccactgcggatgccctccactgyggctgccctcgagagtggcccaggtctcctgcacgggccaggcactcagctgaattgggtctcacagccctgcccacagagggtgctctggctggggcctggcccccggtgtttccagagcaggggacatcggtgagaatgcctccacctttgctacagagacacctcccaacctctgtggggctctttccactcctgatcatacaaagaagcccacgacactgaacggctttcaaaacaagcctcagaaatgaaaaccggcttttcaaggggtgataggtctggaaatggggaaaaaagcagagtcctcataactcagacatcctttggacagggctcaggttggtccctggggtctcaagtcagccgcaggccaggtctgcaggaggggcctgccgcctgttctggacgtggtgggggaccctgtggtttgggtgtgaactggggagg

SEQ ID NO: 40526 - DNA, 507 bp, Homo sapiens
gcaggcggatctgctgttgaccgtggccccggccccactgcggatgccctccactgcggctgccctcgagagtggcccaggtctcctgcacgggccaggcactcagctgaattgggtctcacagccctgcccacagagggtgctctggctggggcctggcccccggtgtttccagagcaggggacatcggtgagaatgcctccacctttgctacagagacasctcccaacctctgtggggctctttccactcctgatcatacaaagaagcccacgacactgaacggctttcaaaacaagcctcagaaatgaaaaccggcttttcaaggggtgataggtctggaaatggggaaaaaagcagagtcctcataactcagacatcctttggacagggctcaggttggtccctggggtctcaagtcagccgcaggccaggtctgcaggaggggcctgccgcctgttctggacgtggtgggggaccctgtggtttgggtgtgaactggggagg

SEQ ID NO: 40527 - DNA, 871 bp, Homo sapiens
tttaatgctttttcctccaataaaaaatgagcaaattcttggtagtctgttggaaaattatccttccctttgaatatttttaataagctcccctggggcataatgggcataagaattggcttcacaggggtgggaaagcaaaagtttatgctttagattattttaaatcaattccagtcatcctacatatctacccttcagttccgaggttcccatgcctctccaatcacggttctttgyaactttaacataacagatctgaaaggaatttaaattcaatcctggggtcaaagcttgttttgaagccctacagctgcaagaggtgaaagatttatttagcacaggctttgaaagtctcacattcattctgtactttgaatgggtaggaattggggcactttaagcaaaccatctctattagtagtaaactcacccacagtctttgaatttttcatgctcttcattcaattatatgcaggcatataggtccaaatgccatttctgcaacacacacttcattctaggtgggcagaggtggaatttctaatgtcaaaattctacccttaatgctgtgtaggtttataaagctttttgtcccagccagtaggaaacaaaccacatatgctctcaattttctttggaagcttttaccaaaccacttctggtatctgtacctgtataagcccagattctttgatgtaaataagacaaacaggctctagctcacttaatcggataaattcagggattttggatgacacaaccaaaatccaaaatcggataaagggattctggatggcacatcaaatcgccaagaaaagtagggaaacctactcatgtgctacacaggaaacagtaaaaaaaaatttca

SEQ ID NO: 40528 - DNA, 645 bp, Homo sapiens
atccacaactaacaagcatattttattgtaaatatcaatattgcrtattttctaattttcaaattatgtagattcaagttttatttactggcaaacttactaaacaaggataaacaataagtaatagaagacgatcttttctttggcataattatactatccaataagaataatttatttcaggataaagtttatataccttcttgagttgattattctattaatttgtttaataagtaacattttcagaactagagtttataatatctaaagacactttatatatatgaaagtccttttgttttcctctcaaataaaatatcaattcactaagcagaaaattcttcagtcatattttttcctctcaaaacaccatgcgttaatctaccataccttgcaattagtgttttagattaaagaaattgttttcattcttacttggttacctttccagtgaggaaaacaaaacaaaacaaaattcttttgctgtcacagtcttggaaagacaagctggaagtcagtttccctctcatggttagattggactgctatatttgcttttataaccatgtactacttgacatcctgacaaactgctttgttcctctggttctccctgagagaagaaagataggaatctgagaa

SEQ ID NO: 40529 - DNA, 645 bp, Homo sapiens
atccacaactaacaagcatattttattgtaaatatcaatattgcgtattttctaattttcaaattatgtagattcaagttttatttactggcaaacttactaaacaaggataaacaataagtaatagaagacgatcttttctttggcataattatactatccaataagaataatttatttcaggataaagtttatataccttcttgagttgattattctattaatttgtttaataagtaacattttcagaactagagwttataatatctaaagacactttatatatatgaaagtccttttgttttcctctcaaataaaatatcaattcactaagcagaaaattcttcagtcatattttttcctctcaaaacaccatgcgttaatctaccataccttgcaattagtgttttagattaaagaaattgttttcattcttacttggttacctttccagtgaggaaaacaaaacaaaacaaaattcttttgctgtcacagtcttggaaagacaagctggaagtcagtttccctctcatggttagattggactgctatatttgcttttataaccatgtactacttgacatcctgacaaactgctttgttcctctggttctccctgagagaagaaagataggaatctgagaa

SEQ ID NO: 40530 - DNA, 759 bp, Homo sapiens
tttaatgtaactgtacttgttaaacacataattatcttttcttaaattgaatttttaaaacttgaaactgtttgaaagaagaattttagaaaataaaatacattgctatgggaagtcaagattcatgccagagggcatcccagaatagaattgtttaattgaggcttattcagagactatagtcaaactcgtgggtccacaaaattgttcttagagttttggatttatcagactctggggaatagacttggaactaaactgattgaattatagataatcaagcagaccaatttaaacgggaatataatattcaagggatttgtgtaattgacaagcactatattcactgaaaaaaaaatatcaaggaatacttctaagatacctactacctgtcatgtacaaggtatactatatatatatatatatatatataaagagagagagagagtcttgctctgtcacccaggctgtagtgcagtggcrtgatctcagctcacagcaacctccgcctctgggttcaagtgactcttctgcctcaaccccctgagtagctgggactacaggcatgtgccaccacacccagctaatttttggtagatgatatttttaaaagacaaagttttcttactttcaaagatatttcaaagtagcaaagataccggcaattatactagagtattttagggaaaatgcagtgtggcattggaaaaaaaatatacatttaatccttagtacaattagttgaaatggcccaatgca

SEQ ID NO: 40531 - DNA, 759 bp, Homo sapiens
tttaatgtaactgtacttgttaaacacataattatcttttcttaaattgaatttttaaaacttgaaactgtttgaaagaagaattttagaaaataaaatacattgctatgggaagtcaagattcatgccagagggcatcccagaatagaattgtttaattgaggcttattcagagactatagtcaaactcgtgggtccacaaaattgttcttagagttttggatttatcagactctggggaatagacttggaactaaactgattgaattatagataatcaagcagaccaatttaaacgggaatataatattcaagggatttgtgtaattgacaagcactatattcactgaaaaaaaaatatcaaggaatacttctaagatacctactacctgtcatgtacaaggtatactatatatatatatatatatatataaagagagagagagagtcttgctctgtcacccaggctgtagtgcagtggcgtgatctcagctcacagcaacctccgcctctgggttcaagtgactcttctgcctcaaccccctgagtagctgggactacaggcatgtgccaccacacccagctaatttttggtagatgatatttttaaaagacaaagttttcttactttcaaagatatttcaaagtagcaaagataccggcaattatactagagtattttagggaaaatgcagtgtggcattggaaaaaawatatacatttaatccttagtacaattagttgaaatggcccaatgca

SEQ ID NO: 40532 - DNA, 574 bp, Homo sapiens
agccaacaagttttacactggttatgtttcaagggttataaagttaaaaataaaattaaactaagaaaaaaaagaaacactgaaaggagtcattaggattttaaaaaggggcattcaaacctacgaaggtggaaaacctggaattaacagatgcaaaatgcaaaatatgtaaattagtgcttaaaagaaaatgaagtgatttagagtatgggaaragtatttgaaagtatgaaaatttactagaaaaattttgagaagaaccaaaaataatgtggaaatgaaaatactataattgataatacaaatgttggggcagatttaaagagcagaatagaaaattattgaactggaagaagagttgaagaaactttgagtgacagtatgaaaagatgagttggagaacactctaacaaagaaattgtaagagacaaaaagtataaagagaccgtcattcattcataaacacacacacacacacacacacacacacatatgtatatacagacacacagatgactcccaatttatttttcaactttataatactgcatttagtatgcagcatcactgacaa

SEQ ID NO: 40533 - DNA, 574 bp, Homo sapiens
agccaacaagttttacactggttatgtttcaagggttataaagttaaaaataaaattaaactaagaaaaaaaagaaacactgaaaggagtcattaggattttaaaaaggggcattcaaacctacgaaggtggaaaacctggaattaacagatgcaaaatgcaaaatatgtaaattagtgcttaaaagaaaatgaagtgatttagagtatgggaagagtatttgaaagtatgaaaatttactagaaaaattttgagaagaaccaaaaataatgtggaaatgaaaatactataattgataatacaaatgttggggcagatttaaagagcagaatagaaaattattgaactggaagaagagttgaagaaactytgagtgacagtatgaaaagatgagttggagaacactctaacaaagaaattgtaagagacaaaaagtataaagagaccgtcattcattcataaacacacacacacacacacacacacacacatatgtatatacagacacacagatgactcccaatttatttttcaactttataatactgcatttagtatgcagcatcactgacaa

SEQ ID NO: 40534 - DNA, 1073 bp, Homo sapiens
aaattggaatgttatttcacacgcactgcagttggcccttcttaactgtgttccacaactgtggatttaaccagctacaggtggaaaatagaaaatttaaaaaatggttgcatctgtactgtacatgtacaaacttttttcttgtcattattcctatacaatagagtataacaattatttacatagcattaggttgtattaagtattataaataatctagagatgatttaaagcttataagaggatttgtgtcagatatatgcaaatattatgccattttatataagagacttaagcatccatgtattttggtacctttcagggtcctggaacccctggataccaagagactgtatttgtatcatattttcattctaaaagatgaaatattataaattatgtaacacatttttcccaagggttttstacgtagtactatggacctataatttctaaatcgtgtagaaagataggatatcatagatgactgctttggtacacaatatgtttctctggatttattatatttatatttttaactcatctccctttcaatatatgttgatttttctttctgaatattagtttatgttgttattattgttagtgttataaacatttgcagtttaaatatacttaaccagtgcaattgtttttgtataagctggttgtaatgccacacacaaataaatgcacctttttgccagtcaaaacttcaatgttttattactgtataggatctagaagagtagagaaagctatctaagaaattaggtaaaaatgttgatgctaaaaacctgaatactggttctatgtatttattgtttgctgatgaagattaatcacatctcagagcatacatgactgttttgccagcagagtgatagaaattgaattccatttttcttacagcctctactcatcacttacataagtacctataaatatacaggcaaccactatagagatgaaaggaaacagacttgctaaaaaagaaatatttaaaaaattgggtgagttaaatgataaaacaatatctcagtaatgaaaaaagtcaagagaaattgaagaac

SEQ ID NO: 40535 - DNA, 729 bp, Homo sapiens
ccccctcccctacttccagtgaggtacctcttatgaccagtccttgaaacccagtgtagactcaaaaactgtcaaagggtttggcacaaggatacgtgggcagaaatgaaaagaaggagaagggaagggtttgggggcagtagggaaaaaagagtttgcagagagaagctgaggtgtattcccgcatgaatcatttggccaggtaaaaagccttttgtatctacgcagaaagcagataagctgtggcatgagggataggattaaacttcatggagttyctcccagtgattcaaacaaaacaacaacaacaacaacaacaacaaaacatgtaggaatcaagacaatgcagaaagtttaggaatttccttccctgaaaagaaacttgaagaaaagactcaaaagaaaatggcaaaaggggccatttctgcatgcacatttcattttcttggctattttcccacctcttcctcgtgttcttaagttcttaccttggtcagctgatgcttgccaccacccaatgatgacttctgggcagctatttgtggaaaccaagtctttaacatcccttctacctgtagcaaggttcctaggtaacgttccctgtgaaaatgacgttgctttaaaaaaccagcaacaggattggagaaatctcctttttatgaagacccaagcaaagaaccagcgggacttaccccatctgtggcttctgcaaaacacctacaatacgct

SEQ ID NO: 40536 - DNA, 1326 bp, Homo sapiens
tgcataagaaaatcatcactcagttaataatattgtctaaaataccttccatacttctccagttgtcctcaaaatgtattttacagcttttgtgtcttgaattacaggatcccaccaaggttcatgctctttcttctcttttaatcaaagagagaacaattcctcacttcttttttgttttgtttttctagtcatttacctttttgaagagcccaagatagttgccctgttgaatgtcctacattctgaatttgtctgaaattggattcagggtaaaatttttggtaagaacataagtgatggtgtgtacggtatttcttgttgcagcacttcaggaaatggataatgtcaagytgtcccacaggaacagactaaacaaacgtattgaatgagtaagataatacatatgtatagaacctcttcaggtgtcatttgctccagtgtgtacagttacagaactggactagacgatgtgaaagcccttctaatggtccaaaagcctatgttctgaagagcttaacaatacccagttatgaaaatggttttgatccagtggatgaaggtagttcaagtaatggcagttcaagtaatggcagttcaatggcagtaatttcaccttttagcttttttccctttgactagcaaaagtcatcggaaaaaatgctcaatacgtgtttttggtgatgatcattcctgaagctagaatgagacaaacagactaagctgcccagctgtaagtaagccacaagaaactgtattgcagtaagatttttaaatatgaggataacgacaaagggaggttttagtttttaaagtaatagggttctacctgcctaactctggcccttcctggtcagggagtggactcaatgaccactcagtgtgttactggccctaaatttctctgattcccaaggaatccatagtgaagatattctgtggcatttgccctttattaggaaactccaaactacaccaagaaaatatttttttcggtacttcttcttgaagtcagaaattgcattttaaaaataattttcctctgctttaataaatggctaaaaaggttaatggattttctatctatgtttgcagtcacagaagcacttatctctcattccaagtagatgttctatgtaattgggtgtgaagtaattccaaagttgcatcaaaatcttttcagagcgttactatgacaatcaaacttccttttaaaaaatcatctcaacgcaaactctccatcatcccaccgtccattgagtgaaatttaatctcatgaagtaaatttggcttttgagaaagttgaggggtgggaggggaaccatt

SEQ ID NO: 40537 - DNA, 1326 bp, Homo sapiens
tgcataagaaaatcatcactcagttaataatattgtctaaaataccttccatacttctccagttgtcctcaaaatgtattttacagcttttgtgtcttgaattacaggatcccaccaaggttcatgctctttcttctcttttaatcaaagagagaacaattcctcacttcttttttgttttgtttttctagtcatttacctttttgaagagcccaagatagttgccctgttgaatgtcctacattctgaatttgtctgaaattggattcagggtaaaatttttggtaagaacataagtgatggtgtgtacggtatttcttgttgcagcacttcaggaaatggataatgtcaagttgtcccacaggaacagactaaacaaacgtattgaatgagtaagataatacatatgtatagaacctcttcaggtgtcatttgctccagtgtgtacagttacagractggactagacgatgtgaaagcccttctaatggtccaaaagcctatgttctgaagagcttaacaatacccagttatgaaaatggttttgatccagtggatgaaggtagttcaagtaatggcagttcaagtaatggcagttcaatggcagtaatttcaccttttagcttttttccctttgactagcaaaagtcatcggaaaaaatgctcaatacgtgtttttggtgatgatcattcctgaagctagaatgagacaaacagactaagctgcccagctgtaagtaagccacaagaaactgtattgcagtaagatttttaaatatgaggataacgacaaagggaggttttagtttttaaagtaatagggttctacctgcctaactctggcccttcctggtcagggagtggactcaatgaccactcagtgtgttactggccctaaatttctctgattcccaaggaatccatagtgaagatattctgtggcatttgccctttattaggaaactccaaactacaccaagaaaatatttttttcggtacttcttcttgaagtcagaaattgcattttaaaaataattttcctctgctttaataaatggctaaaaaggttaatggattttctatctatgtttgcagtcacagaagcacttatctctcattccaagtagatgttctatgtaattgggtgtgaagtaattccaaagttgcatcaaaatcttttcagagcgttactatgacaatcaaacttccttttaaaaaatcatctcaacgcaaactctccatcatcccaccgtccattgagtgaaatttaatctcatgaagtaaatttggcttttgagaaagttgaggggtgggaggggaaccatt

SEQ ID NO: 40538 - DNA, 1326 bp, Homo sapiens
tgcataagaaaatcatcactcagttaataatattgtctaaaataccttccatacttctccagttgtcctcaaaatgtattttacagcttttgtgtcttgaattacaggatcccaccaaggttcatgctctttcttctcttttaatcaaagagagaacaattcctcacttcttttttgttttgtttttctagtcatttacctttttgaagagcccaagatagttgccctgttgaatgtcctacattctgaatttgtctgaaattggattcagggtaaaatttttggtaagaacataagtgatggtgtgtacggtatttcttgttgcagcacttcaggaaatggataatgtcaagttgtcccacaggaacagactaaacaaacgtattgaatgagtaagataatacatatgtatagaacctcttcaggtgtcatttgctccagtgtgtacagttacagaactggmctagacgatgtgaaagcccttctaatggtccaaaagcctatgttctgaagagcttaacaatacccagttatgaaaatggttttgatccagtggatgaaggtagttcaagtaatggcagttcaagtaatggcagttcaatggcagtaatttcaccttttagcttttttccctttgactagcaaaagtcatcggaaaaaatgctcaatacgtgtttttggtgatgatcattcctgaagctagaatgagacaaacagactaagctgcccagctgtaagtaagccacaagaaactgtattgcagtaagatttttaaatatgaggataacgacaaagggaggttttagtttttaaagtaatagggttctacctgcctaactctggcccttcctggtcagggagtggactcaatgaccactcagtgtgttactggccctaaatttctctgattcccaaggaatccatagtgaagatattctgtggcatttgccctttattaggaaactccaaactacaccaagaaaatatttttttcggtacttcttcttgaagtcagaaattgcattttaaaaataattttcctctgctttaataaatggctaaaaaggttaatggattttctatctatgtttgcagtcacagaagcacttatctctcattccaagtagatgttctatgtaattgggtgtgaagtaattccaaagttgcatcaaaatcttttcagagcgttactatgacaatcaaacttccttttaaaaaatcatctcaacgcaaactctccatcatcccaccgtccattgagtgaaatttaatctcatgaagtaaatttggcttttgagaaagttgaggggtgggaggggaaccatt

SEQ ID NO: 40539 - DNA, 1910 bp, Homo sapiens
taaagatttctttcaccccactgattgagtagaaaatagactctgttttaaatatgccctattttacctaagctgaaacagcaggagtgtcttgtcactagagggcagccataatctgctacagtccaaaagatcttcctggatatccaagtccaattgcgaatgtgaaaggcgtgatttggaatcagtgaactatttttcaactatacttattttagaaagggaacatgaccagccatgttcagacaaccaaccagaaatgatctgattaaaagtcaaagcaaacagacaattgcaatactgtttgcttgaattatgggaaatatatacctcagttatcacagaaaaaaacctgattgtaatgttttaaaagaaaaaaatgtgagtttttatgggcacagattggccttgtccccatttctatcggtttgttgttgccaccagggaaccaaagttccaggcaaagaaaaaaagatcactgaacaaataactgtgaaatgcctatgaggctgctcatttcttcaaaatttagttagttcaaatgcatgtagatctattagaaggactgggaaatcagaaacaaatgaacacttcatatcaacagatgttactaggattttgtaactggggtaaatgtattccatgccaacctaaaaatgatccctgccaagtaaaccttacacawggtagagtttaaatctcttgcctttaaagggatctccacgtccagccaatctgaattaaagatgagtacccattagtattatgcagacggttcagcttctgtcctttcccttagaactgtatacctgcttatttaaaaatgattttcaggatcttttgatcccagtagaggtcagtagtgagcagaccttgtagtccatggtattcactgtctctcactggtaaggatacttgataataggtgatttttagcaccttctgtgaaatatacaagaaaagtgatgttatcctgctaaacaagtatgttttctatctttgctctgttccacagaaaattccacagccactctattccactagtcacaaggcagtccagttgaaaaaatatggagagagaaatgaaactatttgtatggtagaaaaataactttaaacacatattttaaataaaaataactttaaacacatgcgttattaatactttgtcttgtaactacaatgagatcagttttccctgaaggaatgaatcaatgatgaatgaataaatgaatgaatggggttaatatcaccttcaagtaagctctgcatttttgaaggaatatgtatatggcagagtaaacacacatactacctttttttcagatgtccatagattcttctgtgctttataatttaaaagtattccagaattcgtagttgcattttgttattttatatgtattccaatcaacattcactgagtgtaaaactacattcatgtgaaggtccacaaagatttaaagaaattggcaagctttctttcaggaatccaagttaaatttcacacagctatgaacaacagaagtattgctcttggtatgacctatctatgggggtttgctgcttttctccactaaccattttgaatttcacaaccactttgtaacatgcatcgaacataagaataatggggtttgaaagttgtaaaattatgtttactttgctaagccaaagttttaattcatcccacatattttacagtgtctagaatgagttttggtatacattatttttatactcttaccttaaagtaaaacatggcaaagcctaacaaaaactaaagttatttaatttcctcaaaaatggtaatgtagtttaaattgaaagaaactgatttgatgttaaaagacttgactttccatactggtagtgtgaccttaaactagacacttttacccttggcctca

SEQ ID NO: 40540 - DNA, 1910 bp, Homo sapiens
taaagatttctttcaccccactgattgagtagaaaatagactctgttttaaatatgccctattttacctaagctgaaacagcaggagtgtcttgtcactagagggcagccataatctgctacagtccaaaagatcttcctggatatccaagtccaattgcgaatgtgaaaggcgtgatttggaatcagtgaactatttttcaactatacttattttagaaagggaacatgaccagccatgttcagacaaccaaccagaaatgatctgattaaaagtcaaagcaaacagacaattgcaatactgtttgcttgaattatgggaaatatatacctcagttatcacagaaaaaaacctgattgtaatgttttaaaagaaaaaaatgtgagtttttatgggcacagattggccttgtccccatttctatcggtttgttgttgccaccagggaaccaaagttccaggcaaagaaaaaaagatcactgaacaaataactgtgaaatgcctatgaggctgctcatttcttcaaaatttagttagttcaaatgcatgtagatctattagaaggactgggaaatcagaaacaaatgaacacttcatatcaacagatgttactaggattttgtaactggggtaaatgtattccatgccaacctaaaaatgatccctgccaagtaaaccttacacaaggtagagtttaaatctcttgcctttaaagggatctccacgtccagccaatctgaattaaagatgagtacccattagtattatgcagacggttcagcttctgtcctttcccttagaactgtatacctgcttatttaaaaatgattttcaggatcttttgatcccagtagaggtcagtagtgagcagaccttgtagtccatggtattcactgtctctcactggtaaggatacttgataataggtgatttttagcaccttctgtgaaatatacaagaaaagtgatgttatcctgctaaacaagtatgttttctatctttgctctgttccacagaaaattccacagccactctattccactagtcacaaggcagtccagttgaaaaaatatggagagagaaatgaaactatttgtatggtagaaaaataactttaaacacatattttaaataaaaataactttaaacacatgcgttattaatactttgtcttgtaactacaatgagatcagttttccctgaaggaatgaatcaatgatgaatgaataaatgaatgaatggggttaatatcaccttcaagtaagctctgcatttttgaaggaatatgtatatggcagagtaaacacacatactacctttttttcagatgtccatagattcttctgtgctttataatttaaaagtattccagaattcgtagttgcattttgttattttatatgtattccaatcaacattcactgagtgtaaaactacattcatgtgaaggtccacaaagatttaaagaaattggcaagctttctttcaggaatccaagttaaatttcacacagctatgaacaacaraagtattgctcttggtatgacctatctatgggggtttgctgcttttctccactaaccattttgaatttcacaaccactttgtaacatgcatcgaacataagaataatggggtttgaaagttgtaaaattatgtttactttgctaagccaaagttttaattcatcccacatattttacagtgtctagaatgagttttggtatacattatttttatactcttaccttaaagtaaaacatggcaaagcctaacaaaaactaaagttatttaatttcctcaaaaatggtaatgtagtttaaattgaaagaaactgatttgatgttaaaagacttgactttccatactggtagtgtgaccttaaactagacacttttacccttggcctca

SEQ ID NO: 40541 - DNA, 890 bp, Homo sapiens
cattagaacagaacttcttatgtgataagtagagaaataattattttctttttagattgagaggttttttgactctttatggctgtcctttgtcatctggcctgggccagaaaaagatgaagtcacagtgaatattattattttggaataaaggctgaggaagaatttcataattctttacattttgttcatgcatttgactgcctccttccagctagaatgtaaaattttggaggatatatatttaaattttatatatccagacccaagaaaagtatctgcatagatattcattaaatattcattgagtaaataaaagaaggagcataggaagaatagattgcaaaaatatagggacaaaataaaaaatatgcacaaaattttggaaggttttcacaaaagtaaacgttgttagaacaacgacctttctaacaaggattttgaaagtcatcattgttraagatctggaagatgatgcccttatttagctttaaagatagcaggctaagtactagaaagtatacagcaattaaaaatttcattttttctcagaactcagaattcttcattcttccacacactttacctttatccaatccacagttttctaagctcatgtcctacaataatcttttcccatggattttaatatcttggcttaattaaataacttaaagttaaaaacatagcacttaaactatgacttacacttaaagactgccgtttctaaatctccagcttcaacttctcaaggactgcagaccagcatcaccaactctttagtaaaagtaattgctttgatgactccccccaaaaatgaaatacatgaaactcttctttttttctttctcacacaagcctatggttccttttctttctcataaaaagat

SEQ ID NO: 40542 - DNA, 890 bp, Homo sapiens
cattagaacagaacttcttatgtgataagtagagaaataattattttctttttagattgagaggttttttgactctttatggctgtcctttgtcatctggcctgggccagaaaaagatgaagtcacagtgaatattattattttggaataaaggctgaggaagaatttcataattctttacattttgttcatgcatttgactgcctccttccagctagaatgtaaaattttggaggatatatatttaaattttatatatccagacccaagaaaagtatctgcatagatattcattaaatattcattgagtaaataaaagaaggagcataggaagaatagattgcaaaaatatagggacaaaataaaaaatatgcacaaaattttggaaggttttcacaaaagtaaacgttgttagaacaacgacctttctaacaaggattttgaaagtcatcattgttgaagatctggaagatgatgcccttatttagctttaaagatagcaggctaagtactagaaagtatacagcaattaaaaatttcattttttctcagaactcagaattcttcattcttccacacactttacctttatccaatccacagttttctaagctcatgtcctacaataatcttttcccatggattttaatatcttggcttaattaaataacttaaagttaaaaacatagcacttaaactatgacttacacttaaagactgccgtttctaaatctccagcttcaacttctcaaggactgcagaccagcatcaccaactctttagtaaaagtaattgctttgatgactccccccaaaaatgaaatacatgaaactcttctttttttctttctcacacaagcctatggttccttttytttctcataaaaagat

SEQ ID NO: 40543 - DNA, 1013 bp, Homo sapiens
aagattagaacagtacaatttgtttgccaaacccacgaatattgtatcttaagagagacaaatgcaatagccttgagacttgtttccttcatttgcttgcagtaacttaataagaagtaggcttgragaagactgagcaattctgattgaattagttggaagaatcggccaataccagaggctgagttctggagggcttcctgtttctaacaaggttgttatttccacacagggcatctctgttgttacacagctgcatagatattccatgacactctgtacctaaaatatgtaagatatttcagaattaagatctttttctactataatgccttcaatgttgtctgtaatgcaaccaattccaatctaggcacgattccctttaggctaatgagaatatgaagaagcatatatttccctctattgattttccttataagtttttggccaaaaaaattcttgctttttgtttttgttttttaatttgtactttgaagtgttagtgtccattatgcctatgtatgagactactcagtgaaggaggagtaggtcaccagacaaattttgagtatatttgtcaggagaaaaggggaatgaacttgagcaaaaaagaaaacaagagattccatctacatttttcttcctaagcagttaaaatttgtgtgagagaatgtcattatatgtgtcaaaagaaaatgctgtaccataatgaataattagtagtaaaatcatgaaattatagcaagtgaaaaaattaaacactattctttaagtaaaacaaaatatgttattatgtacatagaacaagagttcaatattctttttactgaaaaatacaatttagatatttatttatttccaatatatttcattagaagttcttacattttctatcatattcctattctacataggcaatggattttaatggaacacaactttcagaagttatttaaattgtaatctctctgggatttgaaaaggattatgttttcattctagtaattggtatg

SEQ ID NO: 40544 - DNA, 1013 bp, Homo sapiens
aagattagaacagtacaatttgtttgccaaacccacgaatattgtatcttaagagagacaaatgcaatagccttgagacttgtttccttcatttgcttgcagtaacttaataagaagtaggcttgaagaagactgagcaattctgattgaattagttggaagaatcggccaataccagaggctgagttctggagggcttcctgtttctaacaaggttgttatttccacacagggcatctctgttgttacacagctgcatagatattccatgacactctgtacctaaaatatgtaagatatttcagaattaagatctttttctactataatgccttcaatgttgtctgtaatgcaaccaattccaatctaggcacgattccctttaggctaatgagaatatgaagaagcatatatttccctctattgattttccttataagtttttggccaaaaaaattcttgctttttgtttttgttttttaatttgtactttgaagtgttagtgtccattatgcctatgtatgagactactcagtgaaggaggagtaggtcaccagacaaattttgagtatatttgtcaggagaaaaggggaatgaacttgagcaaaaaagaaaacaagagattccatctacatttttcttcctaagcagttaaaatttgtgtgagagaatgtcattatatgtgtcaaaagaaaatgctgtaccataatgaataattagtagtaaaatcatgaaattatagcaagtgaaaaaattaaacactattctttaagtaaaacaaaatatgttattatgtacatagaacaagagttcaatattctttttactgaaaaatacaatwtagatatttatttatttccaatatatttcattagaagttcttacattttctatcatattcctattctacataggcaatggattttaatggaacacaactttcagaagttatttaaattgtaatctctctgggatttgaaaaggattatgttttcattctagtaattggtatg

SEQ ID NO: 40545 - DNA, 1206 bp, Homo sapiens
tgcatagtcaggtgatgacttgagagttttgtttggtgtgtgggacagaagaataatccccgctaatagtggtttgaagtcacttttctgttgtacttactttagtatcaacctttataaattcttgacacatgttgctttctggtatgagcagtgctatgaaaaactaggcggaggactggaattgtcaatgtccatggccagggaagaaaactccatctagcagctgacctgaggtaaatggaggagtctggaggcaaaataagaatatgggagcaagtgtagatttgttctggagcatcagtgaagctttccagggaaaccctggaaatatgtagtgcatttttaagaactcctcatttttgacatacaggatagtgagaattctaactataataatttagatgttcaaaatatgtcagttttacagacatagtctggtgaggctccattattacaacatccaattgtgtctggcacgtggtaggtgctcagcaagttcacctccattaaacttttctctgttttaaagataaaataaatgaagaggtgaaaagttggtaggggagaggttagacttcagtacatgagtctttggtagttattctccaaaggtttttccccarttcctcccatctctgaacagagatgttactcctcacttcaaagaatgaaatgatttatcctctttctaaatttgggctggccatatgtgctgctttaaccaacagaatgtggttgaagtgacatcctgggaattaagtgataacgagatcctaagtggactggtagcttctgcaactttcctctcaatgcttactcttggattatcgtctcttgacacacagcccccatgctgtaagaagtccaagccacatacaaaagaaatgtgaaagaaaatgaagcacttccatgaacacccccagagcagctcccagtcaggaatcagcatcaactgccaagccatgtgagtgtgcaatttcagaaattcagcctgaggctctagatgatggcaaccccatgaaacctcatgtagggtggaagaactgctcagttgagtccagtaacccacagaatcactaaagataataaattgctgttttcaaccactaagttgggcatggcgagaagtatcatttcttacatagcaataaattactgaaacaaatcctaatagccttggaattatgctgccaaagccatcca

SEQ ID NO: 40546 - DNA, 1206 bp, Homo sapiens
tgcatagtcaggtgatgacttgagagttttgtttggtgtgtgggacagaagaataatccccgctaatagtggtttgaagtcacttttctgttgtacttactttagtatcaacctttataaattcttgacacatgttgctttctggtatgagcagtgctatgaaaaactaggcggaggactggaattgtcaatgtccatggccagggaagaaaactccatctagcagctgacctgaggtaaatggaggagtctggaggcaaaataagaatatgggagcaagtgtagatttgttctggagcatcagtgaagctttccagggaaaccctggaaatatgtagtgcatttttaagaactcctcatttttgacatacaggatagtgagaattctaactataataatttagatgttcaaaatatgtcagttttacagacatagtctggtgaggctccattattacaacatccaattgtgtctggcacgtggtaggtgctcagcaagttcacctccattaaacttttctctgttttaaagataaaataaatgaagaggtgaaaagttggtaggggagaggttagacttcagtacatgagtctttggtagttattctccaaaggtttttccccaattcctcccatctctgaacagagatgttactcctcacttcaaagaatgaaatgatttatcctctttctaaatttgggctggccatatgtgctgctttaaccaacagaatgtggttgaagtgacatcctgggaattaagtgataacgagatcctaagtggactggtagcttctgcaactttcctctcaatgcttactcttggattatcgtctcttgacacacagcccccatgctgtaagaagtccaagccacatacaaaagaaatgtgaaagaaaatgaagcacktccatgaacacccccagagcagctcccagtcaggaatcagcatcaactgccaagccatgtgagtgtgcaatttcagaaattcagcctgaggctctagatgatggcaaccccatgaaacctcatgtagggtggaagaactgctcagttgagtccagtaacccacagaatcactaaagataataaattgctgttttcaaccactaagttgggcatggcgagaagtatcatttcttacatagcaataaattactgaaacaaatcctaatagccttggaattatgctgccaaagccatcca

SEQ ID NO: 40547 - DNA, 659 bp, Homo sapiens
agggcatccagtatctccgtgattaccttcatctgccccggagattgtgcctgccactctatgctgcagccgtccagagactggaagtcctcagcctaaaggtctgaagggtgagcgacctgcaagactcacaagagggaaagcggacagagataacctacagacggagtgctgtgccgcctggtgccgacagcaaagctgaggctggggctgggtcagcaaccgaattccagtttagaggtggatttggttgaggatgtggtcagccacctcagtaaaattggagaggattattttgcattgaataaacttacagcaaaaaaacttaaaaaaaaaaaaagaaaacytaagaggggaaggaaatcttgttgtatttacccatcttttttcaactcatgtttctttcttcccattatttcaagtttcctttttttaaaaaataatttcctttctgtttagagaactttttaagccattcttttagtgtaggtctgctggtgagaaattctcttagttttccttcatctgagaatgtcttgatttccccctcatttctgaaggatattttcctttgttacaggatattttcctttgtcaattctgaattgaccgttcttctctttcagcatttgaaaaatagtatgccacttccttctact

SEQ ID NO: 40548 - DNA, 589 bp, Homo sapiens
ctgtccaaggccagcccatagttcaaaggtcagctcgggattctctgctctgatgagtttgagggtggtgcccatctggggcagccggtgattcagaagtcatttctgtctgtgtcgtggtaagaatccctgggctcttgagactccgtgcaggcaaggactgctgctgacatgtcacccccgagtctccagtgtctggygcaatacctggtattagataggtgcttcataaacgtggactggatgagtgactaaatctgtgttgttgtagaaagaactgtacccatcgagttggaggatttgggctctaaactcagctttgctatgcagagctttgtggtctggaatgagtatctttttttcactctgctgccaagctggagtgcagtggcgcaatcttggctcactgcaacttctgcctcccggattcaagcaattctcctgcctcagcctcccgagtagctggtactacaggcatgcgccaccatgcccaactaatttttgtgtttttagaagagacggggtttcaccatgttggccaggatggtctcgatctcctgaccttgtgatccacctgcctcagcctccc

SEQ ID NO: 40549 - DNA, 822 bp, Homo sapiens
catgcccaggtcatgtgcctaagaagaaagcttgctgggtagaygctaaacaatagctaatacaatcagcacaggtttaacttgagggagaatttatgtcagcttagcttgtaattatcattctgttggctctctatcagcattctatagctgtagtgttccctttccctggtcaccttcatatcatgcccctgtcttccactttgccataacatcacctctctgaggttcactgggtttcccattgggaagaaaagttccctggctttggctgagcgcggtggctcacgcctgtaatcccagtactttgggatgccgaggcgggcagatcacctgaggtcaggagttcgagaccagcctgactaacatggagaaaccccatctctactaaaaatacaaaattagccaggcgtagtggcgcatgcctgtaatcccagctactcaggaggctgaggcaggagaatcgcttgaactcaggaggcagaggttgcgataagccaagattgcaccattgcactccagcctggacaacgagagggaaactccatctcaaagagaaaaaaaaagaaaagttccctggctcttacagccacactggctggcttttttttctgtcatgccctctcactacatcagactgtcatgcttcaaaggccactcccaaatatcattatcatttttcactatccttccagcagcaactatctaggcaattgtcactctattaactgtgtttctccctcttttccagtacttcccccacttttttttcttaaaatcaaactcaattttccaagggtcccttttcctagaaattacctc

SEQ ID NO: 40550 - DNA, 967 bp, Homo sapiens
catggcccatctatggaagaaagatggggaattcaaatagaaaggagacagctagcaaattcaagggaaccatgcttggcttaatgcccagcatcctaatcgcaagtccattcccagagctagaagtatcagcctcccatgaaaatgaaacctagaaaactccaggcagttgataagacttttaagtacatgatatgaggctctcaagagaagaaatgggaatcccctcccaaggacctcatcatataattaatccatttaagcaatcaaaaggcagaactgtatattcttattacatgcatgactatragcatgattctagagtcagactgtcagggtgtgaatcctgctacttactgtatgaccttgggcaagttacttaacatctctgcactttgatttcctcacttaaaatggaaatgataatacttcataaggtcattatgaaaatcaaatgaggtaatatttgtaaagtaattaaaatagtaatagtaagtgctaaagtgcttttaaataaatatatacaaaacaattataaatttacagttataatttataaataacatataagtgaaacattcatcttgtggtttagcctcataagaatttataattggaaaaaattatagaaaaaaagaaatcaagaagggtttcactgaagtagtgaaactgagcaattggtaggatttgagtagccacagaggtgtggcctagatctggggatcaacaggcaaaagtatggaggcagcaactggcatggctggggccagataaggtggagagtgagaaggaatgctagccaataggactggaattggagagtagggagacataggtggagacctgattatgtaagactttgaaagttagatttgctgtaataggcaatggagaattgttgagattttccagagggaaatgacatgatgaaagggaagttttgggtggtcacagtggctcacacttg

SEQ ID NO: 40551 - DNA, 1042 bp, Homo sapiens
atcactgagcaaaagacaatcactccatgaggcagccctggggcacttgcctggcatcaggagctcaacgcagagaactgaatgctaatgtttaatgtttgtgcactggagggcacacatcattcaaaatttgatggaggctgtttagaatctattttaatcccagaagatgacatgtaaggagaaattttctgatagtgtgattaagctctgggacatgagttaaaggggtggtgggtgttgcaatgttgaaggtctttatagtctctgattttttcagaaaagactgtgtggagtgagtagctgaaatgtgaatagatgacctctgattttaaggttatgtaatgggattggataggtctcttgctcgctctgggcattggacatggtgtggggctttggtagcttcaggtggaatgacctggccctccatgaatgagtgttgaggttggacacacggctgccacttctctgtactgctccccacagcttagcctcatctgcaaacttcggagggatcagtccatatgagtacatatgtgttgtcagtaaatagacttttccagagctgccagtatcagctggtgctctgtgcttgtgcttctctttggctctctctgcctcctggtcccaaaggctcttggcgtggatatggggatagccagctgtattgaaaaaggatgactacacaacaaaagaagaaaggtgagggtcaccttcaaggggaaaggtaagtgggtgtcatggttgattccattccgtgctggggactcccttgcagggcgttccttgggggtggaattttttgacttgtgctttagtcaaaacaaccatgggtctgaggaaagaggagaggatggcacatgagtaggacagaagtgatcgctraggctgggaaatggctgtcactcacatattaaaatagcccaaaagcccaacattagggttattagtgaaaattttttcaagtttagcacaatttttttgctctatatcttaaatagcctcaccattgtattaaacattttttatcgtggaaaaa

SEQ ID NO: 40552 - DNA, 1349 bp, Homo sapiens
tctaaaagcaacagctaaaacgtgaaacaatacctacacatcaaaatcagtgaagctcttccaaaattgtgacttcattttcaccaagtagttcagcaccttgtgaaagtctgtgcttctactgagctcatggtgcttaagcaaaaggaaatgagtccagtgcctggctgactcagttgtcatggccagttctcatctgaacacctgcatgtcttagaacacatcagcactgctcttgtattactccccagcagtttcacatatactgtgctcagctatcacatcatatcagtaagaaagtacactcttagagtcagtaggggtctggcatgttgtatctctcagaaccctgttaattaattctctaaagtcttcaatctaaggaaacagctcagtaaatctcttcaacaagtttccaccatttagctgtctgacagcattaaaataaactagatcttcatgttctgcttcagccttttccaaacatactaaaaactgaatatggccaagggcagacacacaagaaacccagtctcaatgcctccatcaaatcatgtgatttgcagagctcccagcacacattttcctaatgaatgatgtaatggaagctggggccccctaatcgcttttgacgtgaataacttgaataacatgcagaaatctttcttcccgtgatctgtgtcaagtgagcttagcttttccatacttagacaaacttctcaagttccatcttgacaagaggttaggccctactagctaattaggcacactttttcccctgaaaattttaagtggtccacaatccaaggtcaagggagcctgcatctggtaaaagggctgcaggagggacacttccacacaaagcttyactgatgaaatgaaatcactgtgctagtgtccccatcctggtcttttctctgtgtatatcacagtatgggcatggcaccttcattcattcaaccaatatttcttagtgttagccatgtgcaaagccctttggaagataccaagataaataatactaacagctatcatttaatgagcctcttacatccgagatccttctaaatgcacaacaccaaaagattaactccctttcgctgaagaataaaactgggtccctatatttaaggagtttatatttacaaagatttctgatatatagcatggtacagactatatgtatatgaaatcctaactgctgtttgtaatgaaattaacaagtacatcagattgtttaatttgtagtactcaacagcattctgatctaagcacttctcaaatgtttgttgacagggccaactaggagacagtgacaggttgttttctatctacactaggaacacagc

SEQ ID NO: 40553 - DNA, 1349 bp, Homo sapiens
tctaaaagcaacagctaaaacgtgaaacaatacctacacatcaaaatcagtgaagctcttccaaaattgtgacttcattttcaccaagtagttcagcaccttgtgaaagtctgtgcttctactgagctcatggtgcttaagcaaaaggaaatgagtccagtgcctggctgactcagttgtcatggccagttctcatctgaacacctgcatgtcttagaacacatcagcactgctcttgtattactccccagcagtttcacatatactgtgctcagctatcacatcatatcagtaagaaagtacactcttagagtcagtaggggtctggcatgttgtatctctcagaaccctgttaattaattctctaaagtcttcaatctaaggaaacagctcagtaaatctcttcaacaagtttccaccatttagctgtctgacagcattaaaataaactagatcttcatgttctgcttcagccttttccaaacatactaaaaactgaatatggccaagggcagacacacaagaaacccagtctcaatgcctccatcaaatcatgtgatttgcagagctcccagcacacattttcctaatgaatgatgtaatggaagctggggccccctaatcgcttttgacgtgaataacttgaataacatgcagaaatctttcttcccgtgatctgtgtcaagtgagcttagcttttccatacttagacaaacttctcaagttccatcttgacaagaggttaggccctactagctaattaggcacactttttcccctgaaaattttaagtggtccacaatccaaggtcaagggagcctgcatctggtaaaagggctgcaggagggacacttccacacaaagcttcactgatgaaatgaaatcactgtgctagtgtccccatcctggtcttttctctgtgtatatcrcagtatgggcatggcaccttcattcattcaaccaatatttcttagtgttagccatgtgcaaagccctttggaagataccaagataaataatactaacagctatcatttaatgagcctcttacatccgagatccttctaaatgcacaacaccaaaagattaactccctttcgctgaagaataaaactgggtccctatatttaaggagtttatatttacaaagatttctgatatatagcatggtacagactatatgtatatgaaatcctaactgctgtttgtaatgaaattaacaagtacatcagattgtttaatttgtagtactcaacagcattctgatctaagcacttctcaaatgtttgttgacagggccaactaggagacagtgacaggttgttttctatctacactaggaacacagc

SEQ ID NO: 40554 - DNA, 1071 bp, Homo sapiens
tgagtgtctgcagcctgtgtggagcaggactgtcccaagaactggactgcccactgcagatgggttaaaagagagaaacaaatgtctgcatttctgaagccactgtcttggggatctttttgttacagcagcttagcattactccaaggaatacattcaaatacatgtctttcaaagaaaattataaaaatatatttaaaagccaaattagaaataatgtgttcctatctatatcacagttccccttcattatcatacaagacaaaatcctgtaagtgggcaactatctgttgcaaaatgcagagtctaaactaatgtttgtcaaatatgagttataatttgttttctcataacttttataatgtaataatgtctatctttttatgtttagtaaaaattaatcatttatttaaaatatttctccataggattctgtcaaatagaaacagcatatttactcagctgtttttagtaagtagcttttttctctggcaaaaagttgaaaaaatgcaccgcaatatttttctttccacaacagagactgtttttgttttctacccagtcattcaggaatcaagaggataaaaccaatcattttagacacacttttgtttcttctcacttttcttatgccttgagtccccacaagttcattgtcttttctcaggttaattttaggtggcaaagggtaagcarcgaggggtcaagtgggtattggccagttgaaatggcagactttttaaaggtagtgcacatgagaataaatcaagatctatgactgtaatcatgacggcaagcatctccccagactgaaggcccttgaggagatgtcacatctatctcctccccacaaactctctgtccccactgtacccagtgtctaagcagtaaacatatttgctccattaaagaggttcaacaaatgatgtgtggtaggtaattgatgtgggtaagtaatgatggcatctgaccactgcatcagttgactgtatggacttatgtatgggtatcagtctgagcagaaaaagcattgctgagctttcatgccactgtccttgatggtctggcata

SEQ ID NO: 40555 - DNA, 1071 bp, Homo sapiens
tgagtgtctgcagcctgtgtggagcaggactgtcccaagaactggactgcccactgcagatgggttaaaagagagaaacaaatgtctgcatttctgaagccactgtcttggggatctttttgttacagcagcttagcattactccaaggaatacattcaaatacatgtctttcaaagaaaattataaaaatatatttaaaagccaaattagaaataatgtgttcctatctatatcacagttccccttcattatcatacaagacaaaatcctgtaagtgggcaactatctgttgcaaaatgcagagtctaaactaatgtttgtcaaatatgagttataatttgttttctcataacttttataatgtaataatgtctatctttttatgtttagtaaaaattaatcatttatttaaaatatttctccataggattctgtcaaatagaaacagcatatttactcagctgtttttagtaagtagcttttttctctggcaaaaagttgaaaaaatgcaccgcaatatttttctttccacaacagagactgtttttgttttctacccagtcattcaggaatcaagaggataaaaccaatcattttagacacacttttgtttcttctcacttttcttatgccttgagtccccacaagttcattgtcttttctcaggttaattttaggtggcaaagggtaagcagcgaggggtcaagtgggtattggccagttgaaatggcagactttttaaaggtagtgcacatgagaataaatcaagatctatgactgtaatcatgackgcaagcatctccccagactgaaggcccttgaggagatgtcacatctatctcctccccacaaactctctgtccccactgtacccagtgtctaagcagtaaacatatttgctccattaaagaggttcaacaaatgatgtgtggtaggtaattgatgtgggtaagtaatgatggcatctgaccactgcatcagttgactgtatggacttatgtatgggtatcagtctgagcagaaaaagcattgctgagctttcatgccactgtccttgatggtctggcata

SEQ ID NO: 40556 - DNA, 1071 bp, Homo sapiens
tgagtgtctgcagcctgtgtggagcaggactgtcccaagaactggactgcccactgcagatgggttaaaagagagaaacaaatgtctgcatttctgaagccactgtcttggggatctttttgttacagcagcttagcattactccaaggaatacattcaaatacatgtctttcaaagaaaattataaaaatatatttaaaagccaaattagaaataatgtgttcctatctatatcacagttccccttcattatcatacaagacaaaatcctgtaagtgggcaactatctgttgcaaaatgcagagtctaaactaatgtttgtcaaatatgagttataatttgttttctcataacttttataatgtaataatgtctatctttttatgtttagtaaaaattaatcatttatttaaaatatttctccataggattctgtcaaatagaaacagcatatttactcagctgtttttagtaagtagcttttttctctggcaaaaagttgaaaaaatgcaccgcaatatttttctttccacaacagagactgtttttgttttctacccagtcattcaggaatcaagaggataaaaccaatcattttagacacacttttgtttcttctcacttttcttatgccttgagtccccacaagttcattgtcttttctcaggttaattttaggtggcaaagggtaagcagcgaggggtcaagtgggtattggccagttgaaatggcagactttttaaaggtagtgcacatgagaataaatcaagatctatgactgtaatcatgacggcaagcatctccccagactgaaggcccttgaggagatgtcacatctatctcctccccacaaactctctgtccccactgtacccagtgtctaagcagtaaacatatttgctccattaaagaggttcaacaaatgatgtgtggtaggtaattgatgtgggtaagtaatgatggcatytgaccactgcatcagttgactgtatggacttatgtatgggtatcagtctgagcagaaaaagcattgctgagctttcatgccactgtccttgatggtctggcata

SEQ ID NO: 40557 - DNA, 603 bp, Homo sapiens
tattgggcttttgttgtattgtattattgagagaaaatgactgcgttgcaggatggtgagaaataaatgatagagatttgcatttctcgtatgtcactctggctagaggtcagctcaaggccgtgaggaagagactggagagacaagagaaaagaagtgagtctgtcttaatagtcccaacaacagaccattggctatccaaatcgtcagtacaccagagaatagctttcaggtgacctgcggactttcaacatgaaaaattcmatccagagtcctgggtggggctcacgagtctgcatttttaacaactcaccaagttattcttatgtgccctagaattggaaacccatgtatctcaagattttttgcacaaactgcagcctgtaggataagagagaaacttagatcagagtagaggttttgcgactctaagaaccaaaatgatttcagatgcctggtcatcctcaacctggtggacacgccttcattcactggagaagcagcagcagggcttgcttcgagtccagggaagcaagaaaacagatctgatccccctgtggagtgtggagtaggggcactgcccttgatggtgggagtgaaacc

SEQ ID NO: 40558 - DNA, 573 bp, Homo sapiens
aaactccacctcctgggttcaagcgattctcctgcctcagcctccctagtagctggtattacaggtgcctgccaccacacccagctaatttttgtatttttagtagagatgggggtttcaccatgttggccagcctggtcccgaactcctgaccttaggtgatccaccagcatcggcctcccaaagtgctgggattacaggtgtgagccactgcgtccagccagtggtgggtctcatatctcaatgtggacttttactaactcccgatgcctcaktttcctcatcagttgaaaggaatgaatgaaagatatgtgtttttcatattatcaggtagatgataaggagattttaattttctttttttttttaacttttattttaagtttaggggcatttgttacataggtaaactggtgtcacagggggttattgtacagattatttcatcacccaggtattaaacctagtacccaatagttatcttttctgcttctcttccttttctcaccctccaccctcaagtagaccccagtgtctgttttattctttgtgttcattagttctcatcattta

SEQ ID NO: 40559 - DNA, 573 bp, Homo sapiens
aaactccacctcctgggttcaagcgattctcctgcctcagcctccctagtagctggtattacaggtgcctgccaccacacccagctaatttttgtatttttagtagagatgggggtttcaccatgttggccagcctggtcccgaactcctgaccttaggtgatccaccagcatcggcctcccaaagtgctgggattacaggtgtgagccactgcgtccagccagtggtgggtctcatatctcaatgtggacttttactaactcccgatgcctcagtttcctcatcagttgaaaggaatgaatgaaagatwtgtgtttttcatattatcaggtagatgataaggagattttaattttctttttttttttaacttttattttaagtttaggggcatttgttacataggtaaactggtgtcacagggggttattgtacagattatttcatcacccaggtattaaacctagtacccaatagttatcttttctgcttctcttccttttctcaccctccaccctcaagtagaccccagtgtctgttttattctttgtgttcattagttctcatcattta

SEQ ID NO: 40560 - DNA, 573 bp, Homo sapiens
aaactccacctcctgggttcaagcgattctcctgcctcagcctccctagtagctggtattacaggtgcctgccaccacacccagctaatttttgtatttttagtagagatgggggtttcaccatgttggccagcctggtcccgaactcctgaccttaggtgatccaccagcatcggcctcccaaagtgctgggattacaggtgtgagccactgcgtccagccagtggtgggtctcatatctcaatgtggacttttactaactcccgatgcctcagtttcctcatcagttgaaaggaatgaatgaaagatatgtgtttttcatattaycaggtagatgataaggagattttaattttctttttttttttaacttttattttaagtttaggggcatttgttacataggtaaactggtgtcacagggggttattgtacagattatttcatcacccaggtattaaacctagtacccaatagttatcttttctgcttctcttccttttctcaccctccaccctcaagtagaccccagtgtctgttttattctttgtgttcattagttctcatcattta

SEQ ID NO: 40561 - DNA, 573 bp, Homo sapiens
aaactccacctcctgggttcaagcgattctcctgcctcagcctccctagtagctggtattacaggtgcctgccaccacacccagctaatttttgtatttttagtagagatgggggtttcaccatgttggccagcctggtcccgaactcctgaccttaggtgatccaccagcatcggcctcccaaagtgctgggattacaggtgtgagccactgcgtccagccagtggtgggtctcatatctcaatgtggacttttactaactcccgatgcctcagtttcctcatcagttgaaaggaatgaatgaaagatatgtgtttttcatattatcaggtagatgataaggagattttaattttctttttttttttaacttttattttaagtttaggggcatttgttacataggtaractggtgtcacagggggttattgtacagattatttcatcacccaggtattaaacctagtacccaatagttatcttttctgcttctcttccttttctcaccctccaccctcaagtagaccccagtgtctgttttattctttgtgttcattagttctcatcattta

SEQ ID NO: 40562 - DNA, 573 bp, Homo sapiens
aaactccacctcctgggttcaagcgattctcctgcctcagcctccctagtagctggtattacaggtgcctgccaccacacccagctaatttttgtatttttagtagagatgggggtttcaccatgttggccagcctggtcccgaactcctgaccttaggtgatccaccagcatcggcctcccaaagtgctgggattacaggtgtgagccactgcgtccagccagtggtgggtctcatatctcaatgtggacttttactaactcccgatgcctcagtttcctcatcagttgaaaggaatgaatgaaagatatgtgtttttcatattatcaggtagatgataaggagattttaattttctttttttttttaacttttattttaagtttaggggcatttgttacataggtaaactggtgtcacagggggttattgtacagatyatttcatcacccaggtattaaacctagtacccaatagttatcttttctgcttctcttccttttctcaccctccaccctcaagtagaccccagtgtctgttttattctttgtgttcattagttctcatcattta

SEQ ID NO: 40563 - DNA, 545 bp, Homo sapiens
ggcatggtggcacatgcctgtaatcccaactactcgggaggctgaggcaggagaatcrcttgaacccggcaggtggaggttgcgctgagccgagatagtgccattgcactccagcctgggcaacaagagtgaaactccatctcaaaaaaaaaaaaaaaaaaaaaggtattaatttttacagaggatcagcacaatgagggacacactagcacaaagtaaagacaactctagagaatacggaactagcagaggccaggcattgtggctcatgcctgtaatcccagcaatttgggaagcctaggcaggaggatcgcttgaggccaggagttggagaccaatcagtgctaaatagtgagactctgtgtctaccaaaaaaaagagacattagccaggtgtggtggtggtgcacacccatagttccagctacttgggagtctggggtgggagaaatcccttgagcctgggaagtctacactacagtgagccaagattgtgccactgcactccagcctgggcgacagagtgagaccctgtcttagaaagaa

SEQ ID NO: 40564 - DNA, 545 bp, Homo sapiens
ggcatggtggcacatgcctgtaatcccaactactcgggaggctgaggcaggagaatcgcttgaacccggcaggtggaggytgcgctgagccgagatagtgccattgcactccagcctgggcaacaagagtgaaactccatctcaaaaaaaaaaaaaaaaaaaaaggtattaatttttacagaggatcagcacaatgagggacacactagcacaaagtaaagacaactctagagaatacggaactagcagaggccaggcattgtggctcatgcctgtaatcccagcaatttgggaagcctaggcaggaggatcgcttgaggccaggagttggagaccaatcagtgctaaatagtgagactctgtgtctaccaaaaaaaagagacattagccaggtgtggtggtggtgcacacccatagttccagctacttgggagtctggggtgggagaaatcccttgagcctgggaagtctacactacagtgagccaagattgtgccactgcactccagcctgggcgacagagtgagaccctgtcttagaaagaa

SEQ ID NO: 40565 - DNA, 545 bp, Homo sapiens
ggcatggtggcacatgcctgtaatcccaactactcgggaggctgaggcaggagaatcgcttgaacccggcaggtggaggttgcgytgagccgagatagtgccattgcactccagcctgggcaacaagagtgaaactccatctcaaaaaaaaaaaaaaaaaaaaaggtattaatttttacagaggatcagcacaatgagggacacactagcacaaagtaaagacaactctagagaatacggaactagcagaggccaggcattgtggctcatgcctgtaatcccagcaatttgggaagcctaggcaggaggatcgcttgaggccaggagttggagaccaatcagtgctaaatagtgagactctgtgtctaccaaaaaaaagagacattagccaggtgtggtggtggtgcacacccatagttccagctacttgggagtctggggtgggagaaatcccttgagcctgggaagtctacactacagtgagccaagattgtgccactgcactccagcctgggcgacagagtgagaccctgtcttagaaagaa

SEQ ID NO: 40566 - DNA, 535 bp, Homo sapiens
ggagtttgaggctataatgagccatgataggaccactgaactccatcctgagtgacagggcaaggtcctgtttctgaagaaaaaaaggacattggaatcagggtcctctccatcctgaggtgcctacaaggcatctctctctgcaaatgagtaaacatcaccctccaactccttacrgagtggagcaacaggaaaactccttcacctcatttctgtgctgcttgggaagcctggacagcccaataaccagctccttgctgatgaagcaatcaggaaatggctcgagttgagctaaggagaatttagatccttcttttggttctcagtaggcagggtaggggccaggcatggtggctcatacctgtaatccttgcactgtggggggccaaggtgagaggattgcttgaggccaggaggtcaagaccagcctggacaacatagcaagacctgggtggcatacacctgtggtccctactacttagtaggatgaggtgggaggattgatcacttgatcccaggagtttcaggctgcagt

SEQ ID NO: 40567 - DNA, 535 bp, Homo sapiens
ggagtttgaggctataatgagccatgataggaccactgaactccatcctgagtgacagggcaaggtcctgtttctgaagaaaaaaaggacattggaatcagggtcctctccatcctgaggtgcctacaaggcatctctctctgcaaatgagtaaacatcaccctccaactccttacagagtggagcaacaggaaaactccttcacctcatttctgtgctgcttgggaagcctggacagcccaataaccagctccttgctgatgaagcaatcaggaaatggctcgagttgagctaaggagaatttagatccttcttttggttctcagtaggcagggtaggggccaggcatggtggctcatacctgtaatccttgcactgtggggggccaaggtgagaggattgcttgaggccaggagstcaagaccagcctggacaacatagcaagacctgggtggcatacacctgtggtccctactacttagtaggatgaggtgggaggattgatcacttgatcccaggagtttcaggctgcagt

SEQ ID NO: 40568 - DNA, 535 bp, Homo sapiens
ggagtttgaggctataatgagccatgataggaccactgaactccatcctgagtgacagggcaaggtcctgtttctgaagaaaaaaaggacattggaatcagggtcctctccatcctgaggtgcctacaaggcatctctctctgcaaatgagtaaacatcaccctccaactccttacagagtggagcaacaggaaaactccttcacctcatttctgtgctgcttgggaagcctggacagcccaataaccagctccttgctgatgaagcaatcaggaaatggctcgagttgagctaaggagaatttagatccttcttttggttctcagtaggcagggtaggggccaggcatggtggctcatacctgtaatccttgcactgtggggggccaaggtgagaggattgcttgaggccaggaggtcaagaccagcctggacaacatagcaagacctgggtggcatacacctgtggtccctactacttrgtaggatgaggtgggaggattgatcacttgatcccaggagtttcaggctgcagt

SEQ ID NO: 40569 - DNA, 691 bp, Homo sapiens
tttttttttgacagagtcttgctgtgtcacctaggctggagtgcagtggtgcaatctcagctcactgcaacctccaccttctgggttcaaggaattctcctgcctcagcctcctaagtagctgggattacaggcatgcgccatcaggcccagctaatttttgtatttttagtagagacagggtgtcgccatgttgacgaggctggtcttgaactcctgacctcaartgacctgcccaccttggcctcccaaagtactggaattacaggcatgagccactgtacccggcctggatttctttttgacatagaattatttaagagaaagcttttaaatttccatgctgtaatttctagttttgttgggtcataatcagagaatataatctgtagcatttctacattctctactttgcttagatgtttttagggtggggtgtgtaatatgtactgaattttgtaaacattttatggacatacaaatttcaatgtttactttttcaggctataggctttgctacataatttttgtgtattttgtggtcctcatatagattttttaatttctttttgctgtgatagagattagaagggtaaattaatgtctcacttaccatcatttttctttctgtatctcttttcatttcctgatgctttggctttatgaaatctttaggtataaaaattgtgcac

SEQ ID NO: 40570 - DNA, 1187 bp, Homo sapiens
tacattcaaaacaaagactctactcttgaaaatagtgtatggggccagacatggtggctcatgcctgtaatcccaagactttaggagacaaggtggggggtttgcttgagtccaggtgttccagaccagcctggctaacaaagccagaacccaacattataaaaaaatttaatagagcatggtagaaggaatatctttataattttagtaaaaaacaaaacctatctttcaaaatcacaatagcattcttgggtggggtgactcttgcctgtaatcccagcactttgggaggctaagggctggcagattacatggagtccaggggttccagaccagcctgggcaatatggtacaacmccatctctactaaaaatacaattagccaggcctcatggtgtgggtctgtagtcccagctactgggaaggctgaggtgagaagatcccttgaatacaggagacagaggttgcactgaggcaattatcacaccactgcagtacagctgggtgacagagtgagactttgtctcaagaaattaaaatcacaataacgtagtctataaactgtaaattaagggcacacaatctacaaactttaaatgtcaaggaatgagacattaattaattggaatttttttttttttaattgagacggagtctattgcccaggctggagtgcaatggcgtgatctcagctcactgcaacctccacctcccgggctgaagcaattcacctgcctcagcctcctgagaagcttggattacaggcatgtgccaccatgcccagttaatttttgtattttcagtagagaaggcgtttcactgtgttggtcagcctggtctcaaattcctgacctcaggtgatgcacccaccttggtctcccaaagtgctgggattacaggcatgagccactgtctctggcccagttggattctttcttaattctttggttaagaattttggaatgacataaaacaagcacaaataaatttttttttcctttttaaggcaaagtcttgctgggtcacccaggtgcacaccaccatgcctggctaatggttgcattttaagtacagatggagttggcctcatgtgatctggctgccttggcctttcaaggttgctggaattacaggtgtgagccatcatgggagtctcagctacttggaaggctgaggagggaggatcc

SEQ ID NO: 40571 - DNA, 1187 bp, Homo sapiens
tacattcaaaacaaagactctactcttgaaaatagtgtatggggccagacatggtggctcatgcctgtaatcccaagactttaggagacaaggtggggggtttgcttgagtccaggtgttccagaccagcctggctaacaaagccagaacccaacattataaaaaaatttaatagagcatggtagaaggaatatctttataattttagtaaaaaacaaaacctatctttcaaaatcacaatagcattcttgggtggggtgactcttgcctgtaatcccagcactttgggaggctaagggctggcagattacatggagtccaggggttccagaccagcctgggcaatatggtacaaccccatctctactraaaatacaattagccaggcctcatggtgtgggtctgtagtcccagctactgggaaggctgaggtgagaagatcccttgaatacaggagacagaggttgcactgaggcaattatcacaccactgcagtacagctgggtgacagagtgagactttgtctcaagaaattaaaatcacaataacgtagtctataaactgtaaattaagggcacacaatctacaaactttaaatgtcaaggaatgagacattaattaattggaatttttttttttttaattgagacggagtctattgcccaggctggagtgcaatggcgtgatctcagctcactgcaacctccacctcccgggctgaagcaattcacctgcctcagcctcctgagaagcttggattacaggcatgtgccaccatgcccagttaatttttgtattttcagtagagaaggcgtttcactgtgttggtcagcctggtctcaaattcctgacctcaggtgatgcacccaccttggtctcccaaagtgctgggattacaggcatgagccactgtctctggcccagttggattctttcttaattctttggttaagaattttggaatgacataaaacaagcacaaataaatttttttttcctttttaaggcaaagtcttgctgggtcacccaggtgcacaccaccatgcctggctaatggttgcattttaagtacagatggagttggcctcatgtgatctggctgccttggcctttcaaggttgctggaattacaggtgtgagccatcatgggagtctcagctacttggaaggctgaggagggaggatcc

SEQ ID NO: 40572 - DNA, 1187 bp, Homo sapiens
tacattcaaaacaaagactctactcttgaaaatagtgtatggggccagacatggtggctcatgcctgtaatcccaagactttaggagacaaggtggggggtttgcttgagtccaggtgttccagaccagcctggctaacaaagccagaacccaacattataaaaaaatttaatagagcatggtagaaggaatatctttataattttagtaaaaaacaaaacctatctttcaaaatcacaatagcattcttgggtggggtgactcttgcctgtaatcccagcactttgggaggctaagggctggcagattacatggagtccaggggttccagaccagcctgggcaatatggtacaaccccatctctactaaaaatacaattagccaggcctcatggtgtgggtctgtagtcccagctactgggaaggctgaggtgagaagatcccttgaatacaggagacagaggttgcactgaggcaattatcacaccactgcagtacagctgggtgacagagtgagactttgtctcaagaaattaaaatcacaataacgtagtctataaactgtaaattaagggcacacaatctacaaactttaaatgtcaaggaatgagacattaattaattggaatttttttttttttaattgagacggagtctattgcccaggctggagtgcaatggcgtgatctcagctcactgcaacctccacctcccgggctgaagcaattcacctgcctcagcctcctgagwagcttggattacaggcatgtgccaccatgcccagttaatttttgtattttcagtagagaaggcgtttcactgtgttggtcagcctggtctcaaattcctgacctcaggtgatgcacccaccttggtctcccaaagtgctgggattacaggcatgagccactgtctctggcccagttggattctttcttaattctttggttaagaattttggaatgacataaaacaagcacaaataaatttttttttcctttttaaggcaaagtcttgctgggtcacccaggtgcacaccaccatgcctggctaatggttgcattttaagtacagatggagttggcctcatgtgatctggctgccttggcctttcaaggttgctggaattacaggtgtgagccatcatgggagtctcagctacttggaaggctgaggagggaggatcc

SEQ ID NO: 40573 - DNA, 1187 bp, Homo sapiens
tacattcaaaacaaagactctactcttgaaaatagtgtatggggccagacatggtggctcatgcctgtaatcccaagactttaggagacaaggtggggggtttgcttgagtccaggtgttccagaccagcctggctaacaaagccagaacccaacattataaaaaaatttaatagagcatggtagaaggaatatctttataattttagtaaaaaacaaaacctatctttcaaaatcacaatagcattcttgggtggggtgactcttgcctgtaatcccagcactttgggaggctaagggctggcagattacatggagtccaggggttccagaccagcctgggcaatatggtacaaccccatctctactaaaaatacaattagccaggcctcatggtgtgggtctgtagtcccagctactgggaaggctgaggtgagaagatcccttgaatacaggagacagaggttgcactgaggcaattatcacaccactgcagtacagctgggtgacagagtgagactttgtctcaagaaattaaaatcacaataacgtagtctataaactgtaaattaagggcacacaatctacaaactttaaatgtcaaggaatgagacattaattaattggaatttttttttttttaattgagacggagtctattgcccaggctggagtgcaatggcgtgatctcagctcactgcaacctccacctcccgggctgaagcaattcacctgcctcagcctcctgagaagcttggattacaggcatgtgccaccatgcccagttaatttttgtattttyagtagagaaggcgtttcactgtgttggtcagcctggtctcaaattcctgacctcaggtgatgcacccaccttggtctcccaaagtgctgggattacaggcatgagccactgtctctggcccagttggattctttcttaattctttggttaagaattttggaatgacataaaacaagcacaaataaatttttttttcctttttaaggcaaagtcttgctgggtcacccaggtgcacaccaccatgcctggctaatggttgcattttaagtacagatggagttggcctcatgtgatctggctgccttggcctttcaaggttgctggaattacaggtgtgagccatcatgggagtctcagctacttggaaggctgaggagggaggatcc

SEQ ID NO: 40574 - DNA, 1187 bp, Homo sapiens
tacattcaaaacaaagactctactcttgaaaatagtgtatggggccagacatggtggctcatgcctgtaatcccaagactttaggagacaaggtggggggtttgcttgagtccaggtgttccagaccagcctggctaacaaagccagaacccaacattataaaaaaatttaatagagcatggtagaaggaatatctttataattttagtaaaaaacaaaacctatctttcaaaatcacaatagcattcttgggtggggtgactcttgcctgtaatcccagcactttgggaggctaagggctggcagattacatggagtccaggggttccagaccagcctgggcaatatggtacaaccccatctctactaaaaatacaattagccaggcctcatggtgtgggtctgtagtcccagctactgggaaggctgaggtgagaagatcccttgaatacaggagacagaggttgcactgaggcaattatcacaccactgcagtacagctgggtgacagagtgagactttgtctcaagaaattaaaatcacaataacgtagtctataaactgtaaattaagggcacacaatctacaaactttaaatgtcaaggaatgagacattaattaattggaatttttttttttttaattgagacggagtctattgcccaggctggagtgcaatggcgtgatctcagctcactgcaacctccacctcccgggctgaagcaattcacctgcctcagcctcctgagaagcttggattacaggcatgtgccaccatgcccagttaatttttgtattttcagtagagaaggcktttcactgtgttggtcagcctggtctcaaattcctgacctcaggtgatgcacccaccttggtctcccaaagtgctgggattacaggcatgagccactgtctctggcccagttggattctttcttaattctttggttaagaattttggaatgacataaaacaagcacaaataaatttttttttcctttttaaggcaaagtcttgctgggtcacccaggtgcacaccaccatgcctggctaatggttgcattttaagtacagatggagttggcctcatgtgatctggctgccttggcctttcaaggttgctggaattacaggtgtgagccatcatgggagtctcagctacttggaaggctgaggagggaggatcc

SEQ ID NO: 40575 - DNA, 541 bp, Homo sapiens
tgaataggaataagattagtggcatgttcagagaagactagatcaccctcatcaaaagttttaccactgattttttttttttttttgagatgaaatctcactttgtcaccaggctggagtgcagtagcactgtctctgctcactgcaacctctgcctcctgggttcaagcgattctcctgcctcagcctcccaagtagctgtaactattggtttatgccaccatgctgggctaatttttgtatttttggtagagatggggtttcgccatgttggccaggccrgcctcaaactccttacctcaagcgatcctcccaccttggccttccaaagtgctgggattacaggtgtgagccacagtgcctggcctcaaatggaacattttctaagttctactgttcaaagtttagcttctttcactaagcaaatcaaattgctggctatgtatacattttttttaatctttatttttgtttttcttttttgagacagggtcttgttttgcaacccaggctggagtgaagtggcacgatcacggcttat

SEQ ID NO: 40576 - DNA, 539 bp, Homo sapiens
cctcccgaagcgctgggattacaggcgtgagccactgcgcccagccttatttatttatttatttatttataagacaggttctcactctgttacccaggctggagtgcagtggcagatctcagctyactgcaacctctgcctcctgggctcaagtgatccttccacctcagccccccaagtcactgagagtacaggtgcatgccaccatgcccagctaatttttgtattttttgtagagatgaggttttgccacattgccgaggctggtcttgaactcctggactcaacaatctgcccactttggctttccaaatgctgggattactggtgttaactaccatgcttgctcctctatcccaatttaaaccacaatcacacaatctggtgtcaatggaaattaaggctgttgagggagaaataatttgataaaagtttgttggaagctgaatgtgagaattgacccaggaacatacagcaacaaagagggtgtgttccaaagtctgttataagttggaatgctttcatgagagagtgtagaa

SEQ ID NO: 40577 - DNA, 1098 bp, Homo sapiens
tatttgggtggctggtgtgggagaatcacttgagcacagaagattgaggctgcagtgagccatgctcataccactgctgtactccagcctgggcaaaagagagacactctgtccaaaaacaaaaacaaaatcaatcaaaaaggatctttgaccgtaattttaaaccaatcacatcctcttccacccaaatggagacatggctgtggggggtgcatgcctgtagtcccagctatgtggaaggctgaagcatgagaattgcttgaatcttggaggccgaggtaacagtgagccaagatggtgccactgcattccagcttgggcgacgatgtgagactcagctccctcagcaccaaaaaaaattatatgacccaggtgatcatgggttacatgaagatttctattgtgttttcttagggactgtcatctctgtctttgaaaactgttttaactctgaaatattttgataaatttgatgtggccaaggatccctcaacaaggataatttcaagttttctttctttctgtctaatatcaggaagagattcaacccttccctgtctcacactcaggactttgaaggacacatattagtaaaactccatgtttgtgaagggaatcagtgaatgagtcctggactttcaccctatccctaaatctttcattttgatggattaatatctaattcgatcagttattctttaagaaagccaaaaatccaataaggattaactgggtagagattaagaagtctagtcaaatgtagctctctctgtctctcagttcaatctagcctattccccaggctggagtggagtggtataatgtcagctcactgcaacttctgcctcctgggttcaagtgatcctcctacctcagcctccctagtagcttggactacaggcgcagaccactgcacctggctaatttttgctgtcttagtagaggcagggttttaccatgttggccaggctcgtcttgaattcctgatctcagatgatccacctgcctcggcctcacaaaatgctcagattacaggtgtgagtcactgcwcccagccaaaatggttcagtttgaacatgtgtaacaggagtgcattgg

SEQ ID NO: 40578 - DNA, 1087 bp, Homo sapiens
atcaaaaagtgggtaattgtgagtatgtggaagtgatgtctataggaaccttcatctcagagttacagtgctctagaatagcatggtagcacttttacagtttttgagatggagtttccctattgttgcccaggctgcagtgccatggtgtgatttggctcactgaaatttctgcctcctagttacatgcgattctcctgcttcagcctcctgagtagcttggattacaggcactcaccaccatgcccagctaatttttgtatttttagtagacacagggttttgccatgttggccatgctggcctcaaactcctgacctcaggagatctgcccacctcagactcccaaagtgctgggattacaggagtgagccaccgcgcccagctacagttagcatttctatacataccttccaaatgctgtggaataccatcacaccacttttacagttccagtgaattattttgttttttttctgcgatgtactctgagtgtgtcacccagactggagtgcagggccctgagctgggctccctggaaactctgcctctgggcttcaagtgattctccttcctctgcctccagagtagctaggattacagtcatgcatgaccacacctggctaacattttaattaattaatttatcagtttgtttttgtttgagtcggagtccaactctgtcacccaggctggagagcagtggtgagatcttggctcactgcaacctctgccttctggagtcaaatgattcttaatttttttgtatttagtagagacatcgtttcattatgtaggccaggctgttctcraactcctgacctcaagtgatctgcctgccttggtgtccagcagtgttgggattacagacatgagccacagcacctggtccatttctggtagaaaattttcaaaataaaaaataatggcatcgattttagggagtccctttagtgttcccccagcacgtttatggtgtgaactgagaatggaggctgtctggggccacaggacactctcattctcattgctttagggtggtaagtgacaagaaatttttcctcaaagaggtagagcttggctttca

SEQ ID NO: 40579 - DNA, 557 bp, Homo sapiens
gaggtgctggcaggtttggtgtctggcgagcgcctgttccttatggaccgcaacttcttgctgtgtcttcatttggtggaaggagcaaagaaggccccctgaggatctgttttgtctctttaatagagacggggtttcaccatgttgcccaggctagtctcaaacacctggccggaagtgatccacccttggcctcccaagtgctgggattatgggtatgagccaccacgcccggccccgagcatctttttaagggcatgagccccatttatgagggtggaaccctcatgacttaatcacctctttatattatcccattgggtattaggttccaacatatgaattttgggggaacaccaacattcagatcacagcaggagccaggaggatgggtaagaatgagcagaaccagccagtgtgagrgcatggactcagcaagccctgaggaagaacaaagggcagatctgagaacttagcaggcagcctcaaaaggacttgaggagtagctggatttgagtgggtttgggggacagagagaaggacctgccagggggtca

SEQ ID NO: 40580 - DNA, 522 bp, Homo sapiens
actaactcatcctcacttctctctctccctcttccaacaaatccagtcactcagggagtcccactgacaatgcctgcggagttcttcttggatctggctacatctctctccctagtacctgttcaagttcaggccctcatatctgattggttccctctcacttccatctttctttggtcttaaatctccctagtatgtagtatgtagtatgcagcagataggagatttttagttgcaagtgacataaacctaactcaaattagcataagcaaaaaattgaatgtattggctcacataactaaaaggctcaggttcgcttcgggcatggctggatccagcagataagcaaagtcaagaggacctggtccctctgctttgccattttyttaatcaacataattccctggcacactctctccatgggctggtctcatttttcccacatcaaggccagcagagagagatttttttttttttttttttttttttttacagatctaaccagaatccagctgcatttca

SEQ ID NO: 40581 - DNA, 458 bp, Homo sapiens
aaaaatgtaatttacaacactcatttagagcttatcagtgaaatatactgtttactgattcattcagtgtttatttagtacattaggtaggtgaaatactcattaagacaatttgtggccaggtgccgtggctgatgcctgyattcccaggactttgggaggctgaggcaggtggatcatgaggtcaggcgttggagaccagcctggccaacatagtgaaaacctatctctactaaaaatacaaaaaattacctgggcgtgctggcgggcacctgtaatcccagctatttaggaggctgaatcccttgaacctgggaggcagaggttgcagtgagccgagatcgcatcactgcactccagtccaggcgatggtgcgagactccaattcaaaaaaacaaaagaaaaaaaaaagaaaatttgcgagcccacagctaatcaaaaggataatccttttccct

SEQ ID NO: 40582 - DNA, 458 bp, Homo sapiens
aaaaatgtaatttacaacactcatttagagcttatcagtgaaatatactgtttactgattcattcagtgtttatttagtacattaggtaggtgaaatactcattaagacaatttgtggccaggtgccgtggctgatgcctgtattcccaggactttggraggctgaggcaggtggatcatgaggtcaggcgttggagaccagcctggccaacatagtgaaaacctatctctactaaaaatacaaaaaattacctgggcgtgctggcgggcacctgtaatcccagctatttaggaggctgaatcccttgaacctgggaggcagaggttgcagtgagccgagatcgcatcactgcactccagtccaggcgatggtgcgagactccaattcaaaaaaacaaaagaaaaaaaaaagaaaatttgcgagcccacagctaatcaaaaggataatccttttccct

SEQ ID NO: 40583 - DNA, 525 bp, Homo sapiens
cacaatatacagaagcagaaacaggtcaaaactgggttgaatatattcccctcgtctgtggttttcaaatctctgcagccacgaatttcctccttgaaccacacacgatgaacagaygcctaataggagaaataaaaagttgatttccttgagcagcaaatttttagcacacaccaaattcaatcaatcatataaatgtactgattgataacttgaaattgcatgaggtaaagggaaattttatactaaaaaaaaaaaaaaaaaagagccaggtgcagtggctcacccctgtaatcccagcactctgggaggccgaggtgggcagatcacgaggtcaggagatctagaccatcctggctaacacggtgaaaccctgtctctactaaaattacaaaaaattattcaggcgtggtggtgcgtgcctgtagtcccagctcctgaggaggctgaggcaggagaattgcttgaacctgggaggcggaagttgcagtgagccgagatcacgccaccgcactccagcctggg

SEQ ID NO: 40584 - DNA, 525 bp, Homo sapiens
cacaatatacagaagcagaaacaggtcaaaactgggttgaatatattcccctcgtctgtggttttcaaatctctgcagccacgaatttcctccttgaaccacacacgatgaacagacgcctaataggagaaataaaaagttgatttccttgagcagcaaatttttagcacacaccaaattcaatcaatcatataaatgtactgattgataacttgaaattgcatgaggtaaagggaaattttatactaaaaaaaaaaaaaaaaaagagccaggtgcagtggctcacccctgtaatcccagcactctgggaggccgaggtgkgcagatcacgaggtcaggagatctagaccatcctggctaacacggtgaaaccctgtctctactaaaattacaaaaaattattcaggcgtggtggtgcgtgcctgtagtcccagctcctgaggaggctgaggcaggagaattgcttgaacctgggaggcggaagttgcagtgagccgagatcacgccaccgcactccagcctggg

SEQ ID NO: 40585 - DNA, 274 bp, Homo sapiens
ttagaataataaagcaggaattttgccctctagttcaagtagaggtttgagcaggaggagagctttttatttttagagcagactgcacttacctcatagctagaaaataatcacctgtaatctaawaaaataaaccacctgtatactacttctatgtacttttacatgaccttaaaccagtcatttaacctctttgtgttttactttcttttataaaataagagttagaccacatatattttctggctgtataagatcatttaatacttgccat

SEQ ID NO: 40586 - DNA, 785 bp, Homo sapiens
catagcccacttccagtggctccctttaaccagtgctgccccctgcagaaccagcacaaggcgacacgttaatgtaaccccagcattgccattgaaggctttatgggaggccttgccctacttaccagagaaagcaaagcgggaggtgtagagaaatgggaagcctgaccatgtatgttcatgttccatgtcacgcagcatccctgtgtgtgtgtatgtgtgcacaggagtacttggtgtcataagttttgcttattattattagagacagagtctcgctctgtcacccaggcaggagttcaatggcacattctcggctcactgcaamctctgcctcccgggttcaagtgattctcatgcctcagcctcccaagtagctgggattacaggcacccaccaccaggcctggctaatttttgtatttttggtagagacagggttttgccatgttggccaggctggtcttgagctcctgacctcaagtgatccacctgccttggcctcccaaagtgctaggattataggtgtgagccaccatgcctggccaattttgctttttagaaatcactccagacctgacacttcttagctagacaaagaggcacacacacacagagaggcaggacgctcacttctacagtccctgtggagttttagaccaaacgcaatgcctctgaccttctttggatgacatcaactttaccggtcttcatctggggacctgggcatcaaatcccagcctgaagatcccaggattggccaggtatggtggtgtatacctgagg

SEQ ID NO: 40587 - DNA, 785 bp, Homo sapiens
catagcccacttccagtggctccctttaaccagtgctgccccctgcagaaccagcacaaggcgacacgttaatgtaaccccagcattgccattgaaggctttatgggaggccttgccctacttaccagagaaagcaaagcgggaggtgtagagaaatgggaagcctgaccatgtatgttcatgttccatgtcacgcagcatccctgtgtgtgtgtatgtgtgcacaggagtacttggtgtcataagttttgcttattattattagagacagagtctcgctctgtcacccaggcaggagttcaatggcacattctcggctcactgcaacctctgcctccygggttcaagtgattctcatgcctcagcctcccaagtagctgggattacaggcacccaccaccaggcctggctaatttttgtatttttggtagagacagggttttgccatgttggccaggctggtcttgagctcctgacctcaagtgatccacctgccttggcctcccaaagtgctaggattataggtgtgagccaccatgcctggccaattttgctttttagaaatcactccagacctgacacttcttagctagacaaagaggcacacacacacagagaggcaggacgctcacttctacagtccctgtggagttttagaccaaacgcaatgcctctgaccttctttggatgacatcaactttaccggtcttcatctggggacctgggcatcaaatcccagcctgaagatcccaggattggccaggtatggtggtgtatacctgagg

SEQ ID NO: 40588 - DNA, 785 bp, Homo sapiens
catagcccacttccagtggctccctttaaccagtgctgccccctgcagaaccagcacaaggcgacacgttaatgtaaccccagcattgccattgaaggctttatgggaggccttgccctacttaccagagaaagcaaagcgggaggtgtagagaaatgggaagcctgaccatgtatgttcatgttccatgtcacgcagcatccctgtgtgtgtgtatgtgtgcacaggagtacttggtgtcataagttttgcttattattattagagacagagtctcgctctgtcacccaggcaggagttcaatggcacattctcggctcactgcaacctctgcctcccgggttcaagtgattctcatgcctcagcctcccaagtagctgggattacaggcacccaccaccaggcctggctaatttttgtatttttggtagagacagggttttgccatgttggccargctggtcttgagctcctgacctcaagtgatccacctgccttggcctcccaaagtgctaggattataggtgtgagccaccatgcctggccaattttgctttttagaaatcactccagacctgacacttcttagctagacaaagaggcacacacacacagagaggcaggacgctcacttctacagtccctgtggagttttagaccaaacgcaatgcctctgaccttctttggatgacatcaactttaccggtcttcatctggggacctgggcatcaaatcccagcctgaagatcccaggattggccaggtatggtggtgtatacctgagg

SEQ ID NO: 40589 - DNA, 746 bp, Homo sapiens
ctatcagaattcatccagcccaagagctcagggcttttttagccaaacaacagcaatctcctgctggcacgtaatcttcaagactttcacttcctctgtcagagtggagggaaaaatcaaacagaacaaaagcaaaatgaaaaccctggcctggacttccattctaatgtgcatgagtgaggtgggctctgatgatcaattacaccagcagaaccaatgaattacaccaagagaaccgagttgccggcccagctcaccgggggtgaactcagacactgcttttcctgcctgctttcggctgctccctctcggccrctcttccaagctgcatcccaagctgtcctttctagctgcttgattgaagtgcctttcccgtgtgtccacagcaataccagcatcaaggattgtccactgccctcttaggattccttcctccaaacagaccctcgtgcttcgtccagagtgagaggtttcagaacaggaagcaggaggtctgtgcggaaatgtcacctggatcttctaaattagtgatttcagccttgcgagcacattagaatcagcggggcagtttaaaaagccagagatgcctggggcaccctcgggattccgacttgattggtcttgggtgggtcgaggaatctgtggattcttttttctttttctttatttagagaaagggtctcactctgtcactcaggctgaagtacagtggtacaattatagctcacagcaaccttgaactcttg

SEQ ID NO: 40590 - DNA, 568 bp, Homo sapiens
gcgccactgcactccagcctgggcgacccagcgagactccgtctcgraaaaaaaataaaaaataaaaataaaagaaataccagtcatcctatgtggaaaagtactcttactaatttgcatatatcattctgtcatatgagcacatgcaactttataagtacatagaatgttactgtcgataaaattcaacaaatgatacgtgagcaataactatatatctgacactttgctagatgctgttagggaaaagataacacaacagtcaataaaatagaggctctatcattaaaaagattaataacctaaggagagagatgaatgatccaaaaatacatctaatattattattgtaactgtatatatatatatatatatatatttttcttagccatatttccaatagaatgtaagcttcattagagatactaagtcttatccattgttatgcccctattggccaatgcctcacacatggtagatatttagtagcatatttgatagtggatgaccaaatgaacaataataagtaaaaagtgctatgaatatgcagagggagagagatttctga

SEQ ID NO: 40591 - DNA, 566 bp, Homo sapiens
aagaggacagaaacatgaatgcctttcatggaccatgaaccatgtgagatgctttccaagtcattgtcttactgttcatagaattgtctcactaaatcctcagaagtcttttaacctgggagttaattattcccattctacagactcagaawagttaagcaacttatccaaggtcaagcagctaagaagtggaaccaggcccttttggataacattttcatcacacttgtggccttcttaaatctctatcccccaaaataattttggcatacacacctgctctctgccatttgccaaacacaaggtaggtgcttaattatggctttgttagtgaatgaataaatgaatgaattatatattttttaggttaacactcactttgccataaacttctctgaattcccatatcaggccattcagctactctccagttgttagcaactctcccagatagttatctagactgtacaattccttttgtgcagggttccaacaaacttagactttaagttttccttttccacccccgcctctcagttgaatcttttgggttaatgcgcttggct

SEQ ID NO: 40592 - DNA, 1086 bp, Homo sapiens
ctgccgctgaagttaagctgacaaattatcttccacagcccatggagaatcggcagagctatctagagacacaaagactctgacgcttacgctatactcctcgattctcacattttcccccaagagactgaaacgatagagttttagagaagttgccagatttatatattctaacgagcaaaaaaaaaaaaaaaaaaaaaaaaaacccaaagcaggtctattaattcaatgagaatattacatccttatgtgtttaattgccattccttaggaagctcaggactttttcactacaggaaaggagtatattgaagctgaaagaagatattgctgaaaatagagcacagaagaggtttctgatgcaaacgtcatgtaggtatatagtaaaacaacagacatgcaaatataaaggtttcttgggctaccacaaagcattagaataatgaaatcagttcaaatgttaataacacttaggaaagtcgctagaactataatgattatatttaatctcacagactcaaagcagtgactacattaagtgaacatcatgttcactgttgcatctccagtgtctagcacaggtgcgtggtaggtgctcaattgaatttgctgaatgaatgaatagtaatacaactcaagttgrctttagcgatgttatagaatcattctaactgcattagggcaaaagatttcacatcggagtaatataggaggattttaatgtattattgaaaaaaatgtagcttcagtgcaaagttgctatggctgtgaatttgaatccaaaataattacacctgtaagcattttaaagttgcatggtaagtttgaggctgatgtgaactggctactcatgtaatttgaagggagtggaaagaaattagaaattacaatcttaactacttctcaaggttgcatctttctttccatctcattccacctcacttttttttagattggttttgtcctgtcattgtgcttacccagactgacttgtaggagggttccaatatttctggttttctttgcctagatgtggccaaatctctccaatttttggtttgcctgacatgagtcagaaatatttca

SEQ ID NO: 40593 - DNA, 1586 bp, Homo sapiens
tccctcaatacctggagattgtaattcaagatgagatttgggtggggacacaaagccaaaccatatcagacatccaagcacagaataggtaaactaggaaaacctctctgggaaggaagcctttcccaagagagactcacaccctggatctccctaacccacaggggcagcccttacggtctggaggctggggctgctctctccaaggctggtgggcagactcttgacccagaaagctgctgttgtccctcaactgccttcccccccatccagaggggatctggttctcccaacccattccatgtagtgtcccaggaagtgcatccaagagctttgaggccagaggacagagccattctaagtggcccacagccttggcatcggcccagggagccccagtgagaatcagggtcacctgcagacacctgcacagtcatctttgcaccatgctgtactttctggggtttcaggtccatgacatgatgctatcttctgggtcacaggcaagcaaacaccatgaagtcagaggtacacacagctctcgggcctaagtggagggaagtacatgccctcgctgtaacaacacgcactgagcagagtcagctctgaccaggttctagaaacctttgcaatcttgagatcctattccyactctttaacaggaagcatgcttgtaaagagcttttgtcttggggggaaagaggaacagccctccacacgcctcccgacattccaaggttggagaattagcctcccacagctgctgtcgcaggaagcgggtcggccatatccatgtgtaaacaaaggcagcgagacccctttccttagggcaaagccggcttcaagagacacagaattgaagtgagggcaggtggaaaataccggcccagcatgggaagggaaaggaaatgctttgctgagccatttctagcaaatatgctacaatcctaataaatatgtattttaaaaatcactctgtgatcaaaataggagaactcttaatgtaatttattttttaacaagaggagaaggagctctgctattagaccacacttcgggacttcactttttaaaagttagccatgagtgcatgttgctagtaaatcgggatcccccaccaggggcactaagtcatttcgcattagcacctattcaggaaatctccagctcccaaggccagtctttgaccagggatcacagctttgattttgcgctcccttttgccttggccccctgctcgaggctgtgcacagcctgacatgacgtccttgtccataataatgacttctgaactgcttggctggggcgcttttccaaaatggaatcagggaatctctgaccccacagcctgctgagcgctgctgtcctctgctcaagagttcaccagatcctcccttcaaaattgggccaccactttccatgtctatctaatgagacgctgtgccacagagaagaaattgcaagtgtattgcaaaaggcaccggggaaagaaaaatgttttggagctgtctctctctatgagccacctatcttaatttaaaacttttctaacaagtatttgtttttctagaatatccaagtttatc

SEQ ID NO: 40594 - DNA, 831 bp, Homo sapiens
ctttccactggccagggtctctgcacactgtatgtatttagagaagcacttctgcctgtttgactattctgtaggtctgtttttacttagcaacacacaagaatggaaatgcagctgttagattcatctggccttggtgaaatacgtctactttacgagtaagatgactgaaatttacatttttgttactcttcaatgcaggcaggcatttaactcctatttgcaagatctttccagaacatatctcaagagacccaactactccaataatgatgctggtaatattggggcaatgtgaaaagaagaattaactctattactgtagtttacttttaacagtcatgtagggataaggggctaacagtgggctgacagtagaccaggcagggctgcaaagtgtggctgcctcccctcctgcagctcaaggccctaatcagattgtcctgttgagttgtgtggcttagatgacgggtgcttgcacacagaaagctgatgaaaaggcagctcttatagattttttkgggggaattgtgctttacttacttcaagagtgctcaaaaacaatactgattgtcattactgcccaagaaaattgatagctgttagcattttaaatttgtcccatgtcaaatgggttaaatgacagaatgattcattgatctagttcatgctgcagaacaccagatttggatgaagtcagttagaatatatctcatggtcagccttttcatgtttgtttgtttcccattgttattgtaatctaagcttgtattgctacagacactgtttattgcaaacctcctaactgttctgttgccttcttatccatcc

SEQ ID NO: 40595 - DNA, 725 bp, Homo sapiens
ggatgaagaaacctactggtttccagggaagggtaccaaccagcaaactatctaactacaaggaatcattagagactagtcaatgtaatcaaaatttaatacattgcaaaaaagattcaatatttttctgcaaatgtcaagttaccttggggatcagcaccccttaattatgagatcttagactctaagatccctcagactgtgacttataaatgtgaagaacagcagcttgtttcttaagtggagtttgctcattttaccacgtttataacgaagataataatcttgagccaatcattgtgggtccasttggtacatgggtagtttgctttctgtgggataagtatgtgtgtgtgtgctcatgaacgtgcatctacagatatgttgtatgtgtgtttactatatatatacacatatgtgaatatacatgtatatataacttttgtatacaaataaatatattcatctggatcatttaatctgacaatttaaatatttgagcaataatattctcatatgtctcatctctacttgactgtatgtttataactttgacttgagcatgattagttactgagaaaaaagattaagggagtgagaaaaagcaacaagagtttaagtacagcaattttgaaaaactgtatggaggctcctaaaaaagaaactaaaaatagaattaccatatgatccagtaatcccagttctgggtattttcccaaaagatt

SEQ ID NO: 40596 - DNA, 599 bp, Homo sapiens
gaagagggcagtccgagggctgatactccatatctcacccctccctgggagctattaggcaagtgaggygtttccttttctaaagccctcgctgtttagctacaggattagttctagtccatttactcaccaagtttgctggccaaacactgagaccagaaaagcacatctcccttgcataataaatgtttaataatgacagttggatttggacagaaaatgccctggctggcaggcccgaagcaacattagctccagagagcgtttaaagttcagctccattgcccccatctacctacacacctgcttccaggcactggaacatgcaggcagccttcctacctgcctccttcccacctacccaccctgtgatggcagagtcagcgggagttaccccttccccacctgtcccagggtctactgggtttccgtgtgtggcctgtttccttcctcaacatcggagctcccccagggcagggctgtgtgtccccctcagactggggctccctgaggacagggctgtgtctcccccaacacccactccagcctgggatctcccttcttcaggcctccctgctcagctcagcacagagcttgtt

SEQ ID NO: 40597 - DNA, 550 bp, Homo sapiens
aggcatggtagttcatgcctgtaacccagccctttgggaggccaaaagtgggaggattgcttgagcccaggagttcaagacccccctgggaaacatagcaagagcccaccccatctctaccaaaaaaaaaaaaatcttaattaaaacaaaattttttacatcaaatttacccaactgacatttaagtagctactaagactagaagataatttagctattttagtcattttcattgtttgccctgacttttaaatggttcagataaaatccaatcctgttaaatggttacatcaaacatttatattgcagagctgaaacccaaggacaaagatgtgatcccttcatactcaggcaagcaggaaacatttcaactctgctaaggaaaaggaaaaggaaaaggaaatgaatccacaggctggggagggaaaacagggaccaacygcaaataacacacacagttgtgagcacctccaaggtattccaagacgttattcactgctgagagaggaaatctgagttgacatgttattttctgagctggttattaatg

SEQ ID NO: 40598 - DNA, 570 bp, Homo sapiens
tgcataggagtattatactttctttctagaaaactgcccaaactgttaaaacttaaggaaaacatttgtaacattttgcatttctaccagcaatgtataaaagtttcagaatatattccttgtagaatcatgatgattaaaaaatgttttacatttggatttcaggtttttcgattaggaaagctctacctgtattatattgttatttctgaagatataacaatataaaatattgactaaataatttttgatgttaaaatataagaagagtaaacacaaatttgtttcctgattggattaaatttttgagaaatatcttatatgaaagcatgttaaaagttacactagaaagtatgtgatatatttttgcctmaaaaaagtaggaggatttagatatcatttggctccacttgcttgctttctgtagtaaaactattgtttgattacaatagttaatattcattatagataaaataatttgtcactctttactaaatatatttaccaagaactgagtcttctatgttggatcaaaatacctaacagctggaattttcttataacagaaat

SEQ ID NO: 40599 - DNA, 504 bp, Homo sapiens
gctctgcattttatcagctgtgtgatcatagcagagttacctaacctctctgaaccttaatcacatctgcaagtgaggataataaaagttgaagatagtaggttggtggtgaggatttcatcaaacagttatgggaaacacttagcacagcgccagctccaccatgttagctgttgctgctggtgttcaccccttcaaattcttgccataccctttcccaaatcctgccgtctttgcctatttcaacccatgaagaggcagggtgtggtggctcacacttgtaatcccagcactttgcgaggccaaggcaagaggatcatttaaggccagaagttcaagaccagcctaggcaacattgcgagacctgcctctctctgtctctctcaaattatatatgtaatatataattatatataatatatratatgtatattatatttatattataatatattatatataatatttatattataattatattatatataatgtttatatttt

SEQ ID NO: 40600 - DNA, 1427 bp, Homo sapiens
catgtgacgtgggtcagcccctgcccctatcaagcctcggtttccctgtctgggcagtgagcgccatgttgttggagggggmctgcatttcggggtgctcagccgcacagagaaggcagcttccggggagctctgccacgtcgcgggcatgtctccttgcaggttgtaaaatccttttggcaggatttgggcttgggcttgctctttccatcagatttaataggaaaagggtttcctgtttcggtgtctccgtttgttattcatttcttgttttcataaaatgttaaaagactgtgccatttagacaagtagagatgccagtcactttccctaaaattgtcatcctgtcactccctgctctgcagctggggtgatccttcccaaatgccaagctgccatgacactgccctgcggagattcttcccaggatcccctcctctctggtggccgtggactcccagtggccccctcctctccagctgcctccctgctctctgcaccgcagccttgccaccctctgtccccttctatccgtgtctctgccagcctcccctgcctccagcctctgtccagggatattcccttgtcctggaatgctgctctcctgactcccatctctcccctcatttcctctggctaactcctctccatccttccccctctggatgctctgaggaggatcaggtctgactgtgagctccccaaggacgggcaatctggttctccctagtaatctcagcacctaccatgttgcccagcacacaggaggtgtttaataaacacttggcgagtgaattaatgcattatgaatgaatggatgatgtcctgtccagctttagcttcagtggccggaagacccgaacccagggtgaggactcagatggcatctccatcagaagcaactgcctccagcttcaaactgtcctgagccctgaccctgggctgactgagccctgatcctggactcagactaagccctgacttcagctgcagactgagtcctgacctgagacatttagctttgactccagacacagaccgagtttaaccccttccatgaaatcattgctggggagagtcctgggctgggagttagaggtctcagtttgagccttagctctgccacggttctctgggtgaccccagaaggtcctatccccctgtacctcagcatcacagcaaaataggtgcatctccagaaagtacagaacaccattgaaatatggcagccagtccgagggtggtggccccttcctgtaatcccaacactgggaggccaaggtaggaggatcacttgaatccaggggtttgagactgacctggacaacacagcaagaccccatctctaaaaaaataaaaatgaaaaaattagctgggcatggtggcacacacctgtagtcccaactgcctgggaggctgaggcagga

SEQ ID NO: 40601 - DNA, 1427 bp, Homo sapiens
catgtgacgtgggtcagcccctgcccctatcaagcctcggtttccctgtctgggcagtgagcgccatgttgttggagggggactgcatttcggggtgctcagccgcacagagaaggcagcttccggggagctctgccacgtcgcgggcatgtctccttgcaggttgtaaaatccttttggcaggatttgggcttgggcttgctctttccatcagatttaataggaaaagggtttcctgtttcggtgtctccgtttgttattcatttcttgttttcataaaatgttaaaagactgtgccatttagacaagtagagatgccagtcactttccctaaaattgtcatcctgtcactccctgctctgcagctggggtgatccttcccaaatgccaagctgccatgacactgccctgcggagattcttcccaggatcccctcctctctggtggccgtggactcccagtggccccctcctctccagctgcctccctgctctctgcaccgcagccttgccaccctctgtccccttctatccgtgtctctgccagcctcccctgcctccagcctctgtccagggatattcccttgtcctggaatgctgctctcctgactcccatctctcccctcatttcctctggctaactcctctccatccttccccctctggatgctctgaggaggatcaggtctgactgtgagctccccaaggacgggcaatctggttctccctagtaatctcagcacctaccatgttgcccagcacacaggaggtgtttaataaacacttggcgagtgaattaatgcattatgaatgaatggatgatgtcctgtccagctttagcttcagtggccggaagacccgaacccagggtgaggactcagatggcatctccatcagaagcaactgcctccagcttcaaactgtcctgagccctgaccctgggctgactgagccctgatcctggactcagactaagccctgacttcagctgcagactgagtcctgacctgagacatttagctttgactccagacacagaccgagtttaaccccttccatgaaatcattgctggggagagtcctgggctgggagttagaggtctcagtttgagccttagctctgccacrgttctctgggtgaccccagaaggtcctatccccctgtacctcagcatcacagcaaaataggtgcatctccagaaagtacagaacaccattgaaatatggcagccagtccgagggtggtggccccttcctgtaatcccaacactgggaggccaaggtaggaggatcacttgaatccaggggtttgagactgacctggacaacacagcaagaccccatctctaaaaaaataaaaatgaaaaaattagctgggcatggtggcacacacctgtagtcccaactgcctgggaggctgaggcagga

SEQ ID NO: 40602 - DNA, 1262 bp, Homo sapiens
catctcagacttctccccctcaatcaataccattatgattacccaactccaccacaaatgtctaaaagctcccaatgaaaaccatggctctagaatctcattcaacagccaactcaggatctacttggatgtcacatgctactcaactgtccataattacctaatctttctcctaaactccaaaaccatctctcctactgttccccattttcaattcccttattgagactattatagctactgatagtataggacttatgtgtgtagaatttttttttgatttgttctttttgtatcccttagaatagtgctgggcatacagtagtcaactattaaatatttgttgaatgaataccyagcaaaatttcccattcccctaccttgagtaacaaaccccaaaacaatttggaaggggagaaacctgcaagaagagagcatagactcttggtcagaagcccctgcttcctacagaatctctgctaatacccttgataattctattggcccaagatgcaaaaaagcccagaactactgcttaaactttcccaccaaagtacttgcgcctggctgggaagattgagtcagccccactggaggtctggaaaagaggcccagattcaccaacctcaagcataaaatttctctgaagtctggccgggcggggtggctcatgcctgtaatcccagcactttgggaggctgaggcaagcagatcactttagtccaggagttcaagaccagacctggccaacatagcgaaacaccatctctactaaaaatacaaaaattagctgggcatggtggcgggcacctgtaatcccagctacgtgggaggctgaagcagggagaattgcttgaacccgggaggcagaggttgcagtgagccaagcttgcgccactgcactccagcctgggtgacagagcgagtctttgtctcaaaaaaaaaaaaaaaaaaaaaaaaaaaaaaattctttgaagtctcacattttatctttaaaattcatgcaaattttatgttttattcccatgtttgttttaacattaaaataatgtttttaattaccaccctttaggagaaaaattcaaagcctgttttcccaactctttaagtagaaattcacactccaggaagacatttcttgttcatgctgtggctctgagtaattcctggcataccaccgcctagctctggtggtaattatactaacagccaacatttattaagcacttattatgtgccaggcaatatattaagcacttaac

SEQ ID NO: 40603 - DNA, 512 bp, Homo sapiens
tacagatgtgagcacctgcactcggacctgcatgatttcttatctatatggtagaggaatttccatctttctttctttccctgcctcccttctttcttttctgttttaatgatgagtgctgtatagatacatttagaaaaaaaaaaatttaggccgggcacggtggctcacgcctgtaatcccaacactttgggaggccgaggtgggcggatcacttgaggtcaggagttcgcggycagcctggccaacatagtgaaaccccatctctactcaaaatacaaaaattagctgggcatagtggcacacccctgtagtcccagctactcaggaggctgaggcaggagaatagcttgaacttgggaggcagaggttgcagtgagctgagatcgtgccactgcactccagcctgggtaacacagtgagactctgtctcaaaaaaaaaaaaaaaaattagacataatacctatagtgatatgggttacatgatgtggatgaatgtgtttaaatcgaaa

SEQ ID NO: 40604 - DNA, 1244 bp, Homo sapiens
actgccccctcctcactcactgtcttctcaccattatctctgtccagctctggacatctgtctgggtttgctctctcaaggttgctgccagccttggctggacctaaggctgcttatccttcacctcacttttcaagggagctggtaaccataaaaatactgcccagccatggcttccatcctttagctatttgggattacccaggccctgagacttcccagcttcccactgacaatgttgtttcaaagtcccaggactttgcaggaaatctctgggaatggagctccagaaaaatctgggcggtcaggcttgtgttgctttcatagatgggttttagtgagagagtttgaatctgcctagagtgtacacctcaagtagttattagaaatatctgttagtagtttgtgttctccaacaggggcatatgagggagtcagggaggtttggcagcccctagcatgcacaccactggtaacctggtggatcagttagttttcacactcctttaaagaactatgtgagactgggtaatttataaagaaaaaaaggttaatcaactcacagttctgtgtggctggggaggcctccggaaacttacaattgtggtggaaggcgaagggggaaacaaggaccttcttcacatggaggcaggagagagaaagagcaatgagaggaactgccaaatacttgtaaaccatcagatcttgtgagaactcactcactatcayaagaacagcatggaggaaaccacccccatgagccaaccacctcccaccaggctcctccctcgacaagtagggattacaatttgagttgagatttaagtggggacacagagccaaaccatatcacctggggaagagttttaagagactaatacatgaagactgtggaaagaggtacctgggcatgcaccttgtggcagagcctgagcaccaaacagcctcaaccacagggtcttgaaaatgacaccccactcctgctgagagcttaaggaagcactctttcaagtgccctctctgctctgcagatcaggctggttttaaaattacaataatcggtaataatatcaaaagctacaaccacaatttgctgattgccaggtaccatgcaatggggctttacctattctaagccccattgatgggggttattatttccccaactttgcagatgagaatatggaatgggaacttaataacctgtccaagcctcagccagtgaaagagccagctgctaacct

SEQ ID NO: 40605 - DNA, 589 bp, Homo sapiens
cttggatgtcacttcaccagtaaccttggagatttccttaacctgtcatctgtgatgatgcaatgtcctattytctgccttggtctggagtagagttatttctagaatgttgctgggaagggtatatgagaaatatatattttttgatattttatttataaggtatctttactttctctcaaaatcttcaaggcagtaccctagtttcttctagcttcagtattgcctcagagaagtccagtgatatgctgattcctggtcctttgcatgatatatgatcttttttagtcatcatttcttggatgttaatttgtgttgtagtgtgtattagtaattcgttcctttttattgcttaacacgattccattgtattaagatgttttgtttatccactcatcagctgatgggaatttagattgattgtatgaatttcgcttctgcaaatgtttttatacatgactgtgtgtgaacatacatttttgtttttcttaagcaggtaactaggagtggaactgccaggtaatatgttaaatgtaggtttaaattttcaagaaactgccaaactgtttttcaaagtagctgtaccact

SEQ ID NO: 40606 - DNA, 589 bp, Homo sapiens
cttggatgtcacttcaccagtaaccttggagatttccttaacctgtcatctgtgatgatgcaatgtcctattctctgccttggtctggagtagagttatttctagaatgttgctgggaagggtatatgagaaatatatattttttgatattttatttataaggtatctttactttctctcaaaatcttcaaggcagtaccctagtttcttctagcttcagtattgcctcagagaagtccagtgatatgctgattcctggtcctttgcatgatatatgatcttttttagtcatcatttcttggatgttaatttgtgttgtagtgtgtattagtaattcgttcctttttattgcttaacacgattccattgtattaagatgttttgtttatccactcatcagctgatgggaatttagattgattgtatgaatttcgcttctgcaaatgtttttatacatgactstgtgtgaacatacatttttgtttttcttaagcaggtaactaggagtggaactgccaggtaatatgttaaatgtaggtttaaattttcaagaaactgccaaactgtttttcaaagtagctgtaccact

SEQ ID NO: 40607 - DNA, 558 bp, Homo sapiens
caacaacgctgcagaaggttacctattgttgcacccactttacagaagaggaaactgagactcagagaagccaagtatctcaaagcatcccgtatctttttttgactcattctgattgcactaagctgtgtggagacctcaaaatctgagtctgggctgggtgcactggctcagacctgtaatcctagcactttgggaggccaaggcaggaggattgcttgagcccaggagttcaagactagcctaggcatcacagcaagacctygtttctgtgaaaaataaaattaaaaaattaaggccaggcgcagtggctcacgcctgcaatcccagcactttgggaggccaaagcgggcacaacacctgaggtcaagagttcgagaccagcctggccaacatggtgaaactctgtctctactaaacatacaaaaattagccaggtatggtgatgcatatctgtagtcccagctacttcggtggctgaggcataagaattgcttgaacctgggaggtgaaggttatagtgagccgagatagtgccactgcactccagcctgagtg

SEQ ID NO: 40608 - DNA, 932 bp, Homo sapiens
gtgcttccatgttagctttgatttttagttaaatgcacacacaatgatattaaaaacatgaccaaagagcattgcctttgaagtcagacattcaaaaaaaagcacatgcaaagtaagagataagttctctttgtcaatgataactatgtctcagtgctacgaaataaaaatataaatgggattttttgccctgagctcttatctgatctattgatatgtttcttgatagcccatgtttattttgaacactcttataatgggtcaaaatcatgagggctcattgtccgttagtggaaattgtaaatacacatttggaatcacaaatgataattcctgcaagcagccttaattaaaaagatgtgtaaaaagatgtgtgccaagcctgttaaagatctcgttagcccttgacccccttaacctactctcaacaaaaatggcagagctcctctgctcaaacctaagtcagattgtgccactctttcacacaaagccttccaattcctttccatcctactcggggcaaaagccaaagccttcttgaaatctatgaggtcctatgatagggtctggcaaactaacagcccacggtccaaatctagcccattctttctttttgtacagctgctaaactaagaaatgttttcttagcctgtgygtagtggctcacacctataatctcagcactttgggaggccaagagaggtaggaggatcacctgatctcaggagttcaagaccagcctgggcaaaacagtgagaccctgtctcaataaaaaaataaaaatatataataaataagtagataaaaaagaaatgtatacttaatatatatttttaaatggttgaaaaaactcaaaagaacaataatatttgtggcatgtgaaaatgacatgaaatttaaattcctataaataaagttttattgaaagacag

SEQ ID NO: 40609 - DNA, 806 bp, Homo sapiens
atagagagaccgtcatagttacagcagcagccaggagatactaaagttgctgttttttaacccacaacttctatcgcttcttcagagtatttgccggctctatcatcacccattgatgcaacagatatttattaagcctttgcaaggttttaggcattgctgtargttctagggatagaacagtatcttagtccattcaggctattacaacaaaacagcatacattgggtggcttataagcaacagaaatgtatttctcatcattctggaggctgagacatctacatcaaggtgctaagcaaatctggtttctggtgaggacccatttccttgttcacagatggtgtcttccatgtgtcctctcatggtggaaggagaaaaagctcaggcctttgaaaaataaggatactaattccattcctaagggatctaccctcatgacctaatcatctcccaatgacctcactcctaatatcatcacattgggagttaacattttacaacatgaatttggcaggggcggcggggggtaatgacataaatatttagaccatagcaagcagtgagtagaatattcaaggtcactcctcacagagtgctattggtgttgggggccagactataaaataaacagacaaatatggatggtgatcaatgttatgaaggaagctgggtgcggtggctcacgcctgtaatcccagcactttgggaggctgatgcaggcagatcacctgaggtcgggagttcaagactagcccggccaatgtggtgaaaccctgtctctactaaaaatacaaaaactagcc

SEQ ID NO: 40610 - DNA, 645 bp, Homo sapiens
aggtaatttttgcaatgtagaaatagcactgtatagccaagtatggtggtgcacacctgcagtctcagctactcaaggtgctgaggtgggaggattgcttgagcccaggagttcaagagtgtggtgcattacgattgtgcctctgaatagccactgcactgtagcctgggcaacacggtgagaccctgggtctttttaaattaaaaacaaacaaacaaaaaaaaaacaaaaaaaacctgtaagcagtgaagagcttgttttgctgggaagaaaaatttcagtttgtgtaaaaaaaaaaaaaaaaagaacagttggaaaggcaagataacagaaaatcaaagtagtgctctctatctctctctctctctmtatatatatatatagacagagctactttgattttatctatctaatctccaaatgacacacacacacacacacaccccaaaaaaagcaaagaacaagtgcagtgcttggcatgtggtttttgaatttaaggcttacagtggtttcgcagagagtgtgttatttgatgtcactgcaattaaggaagggtaggaattccgttccacgtcatggacgaggaaaatgaaagtaaacaaaggcagtggtgtatcagacagtcgaaagtaaacaaaggtggtg

SEQ ID NO: 40611 - DNA, 1221 bp, Homo sapiens
ttattatgtgttcatcttttgttgttgttgttgttgagacagggtattgctctcttgtccaggctggactgcagcggcacaatctcagctcactgcaacctccacctcccaggctcaaacaatcctcccatctcagcttcccgagcagctggaactataggtgcatgccactacacctggctcatttttgtaatttttgtagagacagggtttcaccaggttactcaggctggtcttgaactcctgggctgggctcaagggttcagcccacctcagcctctcaaactgctgggattataggtgtgagccaccatgcccggcctattaatctcttttaattgttcaaatgagtttactgattaaaactgatcataagcggtatttttatcacaccctaaaagatagtgtgtgcaaatggttgtgctttctcaatatgtaatactgacacagatagaaaaggaaaaaccaagaatcttgaaagaagagaatatatcctaattaagttaataagtttaaattaaatgaaatatgtcactttttctagcatcaaatttttacgggggtgcactctcactaagttaaggcatatgccaatatcaaatctagtaatattacctacaggttagaaaaactgccacaaataccaatgttaaaaatagctacatctattcaccttatgcaagtaatacacagcatatttcttaaactacactttgtcaaattctattttaataaactttctaattttctaccttttaaagaggctttttttaacaccttcattgcatagagctgcccagcatcaggaccggtcttctttctaacaagaaaaacctaatagaaaattgaacaaaaaaaaaaaggaaaattcacatttctastcattcttgctctacacaaacacaccagcatacacttatatccttgcattttctctaattttataaacatatgccttcccatagagggaagggagagatagtgagagatttgttgaaggatgcaaaattaccctgatctgatccccatacattatacgtattgaaacttcactatgtaccccacgaatatgtacaactatttgtcaatttaaaaaaataaatgaaaaaagttataccttctcctataaattattctataatttacattattattttctcacttttcttagatttaatttagtttttaatcaaaaaaactgttatgatttaataaatcata

SEQ ID NO: 40612 - DNA, 604 bp, Homo sapiens
tctgtctttgagctaaatcatatacatcccatttaaacaataaaatttaactacacaggaagatgaggtagatgtacttttccctcatgctcctactaagtrcaaataaataacctgggtattttaatcaacttaagaagactctgaaaggtggagaaaagacagcagaccagctaaggacattgggacctgaggaacgacttggaggtaagttcactgggtcctccctcctctccttccttccttctttccttccttccctcattccgtcccttctcccctccctcctcctcccctccctccatcctttccttccttccttttttctttccttccttccttcctccctcccttcttcctttccttctttcttccttccttcctccttccttccttcttttctttttcttttgcttcatatgttctagattggataatagagaatccagcaacctagaaatgttactggatgcaggcaagaaaagtccgctctctctctagccaaaggaccaggaaaggggcagcccagcaagacagaacacttttatatggtaaccactctactccagccaaatacaacacaaaataatgtataatctatggc

SEQ ID NO: 40613 - DNA, 460 bp, Homo sapiens
atggtgaaatagtgaatagaggtgaaggaggaggagggcagagctcatgcatctgtttccacagcaaacactaagtcagacttcccaccagaaacagtgcagtgcagcttgagggcttatgggcctgtgagacactttctgctgtttcrtacttattgcagaattcttaacttgacaccaaccgtagataacccactgatgtgtaatatgtgttacagcccactctgccagtacttgcttctcatcagctcatttctctttattatttatgcagacagtattcagtatattttattttattttattttatttttttagatggagtttcactcctgtttctcaggctggagtgcaatggcacgatctcagctcactgcaacctccacctgccaggttcaagcaattctcctgcctcagcctcccaagtggctgggattacaggcacgtgccaccatgcccg

SEQ ID NO: 40614 - DNA, 620 bp, Homo sapiens
aaacacatgttacaatgagatttctgcttaattgcacacactgcgagatgagaccacgaaacaagctagaaatacaaaagagaggtttatcaaattcatcctggataagcagaattcaactattaataatatttcaataacaaataattcacaaggtaagctagattggaacatgacgccagatggcagggaaactagggctatcctgggctagtcagaacagacaattactatcttgaaagtagatcgttgattatctatgatagctttttatcatcacaatgttacctccccctctgcgctttgagttgatttygcttttcattactaattagtttagtcattttgcccatcaatttttagctttactactgcttactgtaaatacttaaggctgtaaatttcacctaaagcgctgcttgtactgtctgtctcccacaagttgtcattaacccagctagtgttgataaactcagtttggtagtcgttttgacaatgcctctccccacaagtgtccatggcctgaaaatgcctggagtgaacaatcacattagtgatgatttctcagcttggagggaataataaacgggcaggcaatgaattaactggaatccaggcag

SEQ ID NO: 40615 - DNA, 1730 bp, Homo sapiens
tttgcctttgttttgaaagtattttgctagacaaagaattctaagttgtgatagattttttttctttcagtgctttaaagatgttgcttttttgttttggcacatttgacgatttctataagaaatccactgttatctgtggattatctgtacctttgttatctgtatctttgtggcactatatgtagcatgtcatttttttctctgcctaattttaagaacttctctataccactagtttgagcaatggaaatatcatatgttaagttactcggaaatagtttaatctttttgcctcttgcttttaaaattttgtaggcaggatagaaacaattatcaatttaggactagtaactcccatctccccaggcaagatcatttgtgtactctatccagtgtcctttggatagtgatgttttccgctctgattttggtgagaaaagatacctttctarggcttatgcgagcaccagccaccatgacctctaatctttttgagtaggttttccttagccttcctcacatgcatccactgagcaatactcaattcaatattcaacgagaatccttggctaatgtacacagttctatctttgtcagctcttttgtccagtactcaattctgtgggtttcatatgccttggctttctgagaacttcagatccttcccctcaagtcagggagttggatgatctctgcctgggatccctctcctgtgtggtggcgatagctagggcaattatagaactaatctcatttgctttccttcactgagaaataaatgtctttgttatctcgcttctatctccgtgcatatttgtttcatatattttattcatattttggttgtttcaggcaggaaggtaaatccagtccttgttaactccattttgaccagaatgtaacaaaaacaggtggcacaagtaggttgaataaaagacaacatttttgcttccaacaagaaacacccttgaaatataaagcacaaataggttgaaagaaaatggatggggaaagatacatcatgccaacaggaatcaaaacaagtctggagtggttacattagtaccaaagtagatttcagaacaaagcacattgccaggaataaagtgcatcattttaaaagtgtcgaataattaaggagccataacagtcctaaacattcatgcactcaccagcagagcctcaaaatacctgagggaaaactgatacaactgcaaagacaaataaacaaactcacaaacgtcagatttttcaatactcctctctcaataatttgtaagttaaaggaactagaatacaaacaaccattttatataaaacaagtagacagaaaatcaaacaacttgacctaactgacatttacaaaagactcccccaaacagcaaaaaaaaaatttcaattgcacactaaaacttgaccatgatagactatattctgaaccataaaactattcttgataagttcaaaacgattgaagtcatataaaacatattctcagccacaatggaattaaatttgaaataagtaacagaaagaccctgtaaaatctgtgaagatgcttaaataagacttaagtcaaaaaacagattatgataggcaatagcaagttggaagagttggggatgggaagggggtgcatcatgagaaattacccagtgggtacagtgcattttattcgggtggtggataccataaaatccttgactttgccgctatgcaatctatgc

SEQ ID NO: 40616 - DNA, 626 bp, Homo sapiens
gcatactattttcctagtgcttagttctgtacttttaatttccatggattagatatcattattatcgctttttattgtatacaaacaatacttaaatttacttatagatagataggcaaggggcacagttcttatgtggagcataacatcttcaatatcaaagacatttcaayggcatttgaactttcatgtggttgttgagaagtgtgttttcagtagagatggctccagactttgtggggtctaaaatttattggcattaataacgcacagtctcaactagtccttactttaactagtaccttactttaacttgactttcttcctcaaagggtgtcacacaggaaggaactgggtcaccgtttatcccattgctaaataggtagctggtggtggactctcaggtcacggtcctcacacattgcagcttctgagaggaagaagcaaagttttccctcttgtttaaaaaaatgtgtgttcatggcaaaaaaaaaaatgacttgaaatgtttttgttttgttttgttttgagatggagtcttgctctgtcacccaggctggagtgcagtggtgcgatcctggctaactgcaacctctgcctcccgggttccagtgattctcctgcct

SEQ ID NO: 40617 - DNA, 550 bp, Homo sapiens
tctatttttcagcatgtcactttctggttagggcgtggtgtatgaaggagagctgggctcttcttcccacattgctttgctgttctgatgtaatgtttgggtccagcacctcagcagtgaggagagcacacaggcgatcaggatcacttatgtgtatctgggaagagttaaatgctgtcttgtgtctcccagatatgggcaccagtcaggaattgctaaaaggaaacaattaaacctcttgtttctagtctttccaacaattactttatgagatagtttgaatatacacccccatcaaatctcatgctgaattccagtcctgtgttggaggtagaacctggtgggaggtgtttgggtcatagtttctgatccctcatggcttggtgttgtcctcacaatagtcagtgagttctctmgagatctggttgttaaaagtgtgtaacatcttcctctaggtctctctcttgatccttcccttcgtcctgtctatctagaaagagggaccaggaaaggtcactctgaggatgtggcatgggagctggactctgca

SEQ ID NO: 40618 - DNA, 915 bp, Homo sapiens
aaaggcattgggagattgggatggtggagtggattagtcactttagatctacttatyccaactgggagcatccagaagatatacctttgaccaatgccttgcaaaatagatttgtgagggcagcacctgcatctctgaagagccctgtaattgctcttctcagatctcacagtgggaaactacaacagcccaatccaggtaggactacaaattgcccagactctttaggaatgaaggtttggcttactccacaaggaaaaaaaaaacacacacacacaacctgctgaggcacttgctaaaggcaaagggaatacagaatgggtagaagaatgtagtcatcaataccagctatgaccacaagaccagaagcgtgaccagacctttttatatatataaaggggagtttatatgtgtgtgtgtgtgtatatgtgtgtgtgtatatgtgtgtatgtatatgtgtatatatatatgtgtgtgtgtgtgtgtgtatatatacataaaaatatatatagatatatatcctattagttctgtccctctagaaaacgctaatacagttggggaagaaaacctgacaccaagtgcagggccagtgttgggcagggggagccttggactgtggtgctgactgaggaaggctccgccaacccagagattgcccattagaggcgtccaatgctgggtgcactgagttgggctgcagcaccagccaagtgcaggccgtggcagggatggcctgcaaagagtttgtctgagtaggaaagcaggggcagatcctggtggcagccagtgaaggctgcagaaacccgccttccttgcagctgggcaagttctcccttgaggggaagagaggtattccacagtgctccccaccactgctccctccaaatcgccactcaaaccaattcctgctct

SEQ ID NO: 40619 - DNA, 915 bp, Homo sapiens
aaaggcattgggagattgggatggtggagtggattagtcactttagatctacttattccaactgggagcatccagaagatatacctttgaccaatgccttgcaaaatagatttgtgagggcagcacctgcatctctgaagagccctgtaattgctcttctcagatctcacagtgggaaactacaacagcccaatccaggtaggactacaaattgcccagactctttaggaatgaaggtttggcttactccacaaggaaaaaaaaaacacacacacacaacctgctgaggcacttgctaaaggcaaagggaatacagaatgggtagaagaatgtagtcatcaataccagctatgaccacaagaccagaagcgtgaccagacctttttatatatataaaggggagtttatatgtgtgtgtgtgtgtatrtgtgtgtgtgtatatgtgtgtatgtatatgtgtatatatatatgtgtgtgtgtgtgtgtgtatatatacataaaaatatatatagatatatatcctattagttctgtccctctagaaaacgctaatacagttggggaagaaaacctgacaccaagtgcagggccagtgttgggcagggggagccttggactgtggtgctgactgaggaaggctccgccaacccagagattgcccattagaggcgtccaatgctgggtgcactgagttgggctgcagcaccagccaagtgcaggccgtggcagggatggcctgcaaagagtttgtctgagtaggaaagcaggggcagatcctggtggcagccagtgaaggctgcagaaacccgccttccttgcagctgggcaagttctcccttgaggggaagagaggtattccacagtgctccccaccactgctccctccaaatcgccactcaaaccaattcctgctct

SEQ ID NO: 40620 - DNA, 915 bp, Homo sapiens
aaaggcattgggagattgggatggtggagtggattagtcactttagatctacttattccaactgggagcatccagaagatatacctttgaccaatgccttgcaaaatagatttgtgagggcagcacctgcatctctgaagagccctgtaattgctcttctcagatctcacagtgggaaactacaacagcccaatccaggtaggactacaaattgcccagactctttaggaatgaaggtttggcttactccacaaggaaaaaaaaaacacacacacacaacctgctgaggcacttgctaaaggcaaagggaatacagaatgggtagaagaatgtagtcatcaataccagctatgaccacaagaccagaagcgtgaccagacctttttatatatataaaggggagtttatatgtgtgtgtgtgtgtatatgtgtgtgtgtatatgtgtgtatgtatatgtgtatatatatatgtgtgtgtgtgtgtgtgtatatatacataaaaatatatatagatatatatcctattagttctgtccctctagaaaacgctaatacagttggggaagaaaacctgacaccaagtgcagggccagtgttgggcagggggagccttggactgtggtgctgactgaggaaggctccgccaacccagagattgcccattagaggsgtccaatgctgggtgcactgagttgggctgcagcaccagccaagtgcaggccgtggcagggatggcctgcaaagagtttgtctgagtaggaaagcaggggcagatcctggtggcagccagtgaaggctgcagaaacccgccttccttgcagctgggcaagttctcccttgaggggaagagaggtattccacagtgctccccaccactgctccctccaaatcgccactcaaaccaattcctgctct

SEQ ID NO: 40621 - DNA, 547 bp, Homo sapiens
gttttacccttttaactttacttgtggtgggttttctttttttagacatgtgaattttaattgtttatggttttttttttttttttttgagacggagtctctctctgtcacccaggctggagtgtaatggcatgatctcagctcactgcaacctctgcctcccaggttcaagcgattctcctgcctcaggctccccagtagctgggattacaggtgcgcaccaccatacctggctaattttttttttgtatttttagtagagatggggtttcaccatgttagccaggctggtctcgaactcctgacctcaggtgatccaccagcytcaacctctcaaagtgttgggattacaagcgtgagccaccatgcccggccattagctttttatatagtaaagcctgccaatctgttataactgatatttttgcaaaatcctttctttttttttttttttgaaactttaaaatccctcaaacattgtatattatacaagtgaattctgatcctcttgatgggcttattggcaggattcacggtagcgaatatg

SEQ ID NO: 40622 - DNA, 544 bp, Homo sapiens
gaaggctgaggcaggagaatggcgtgaacccgggaggtggagcttgcagagagcggagattgcgccactgcacggcagcctgggcgacagagcaagactctgtctcaaaaaaataaaaataaaataatagacccacacgcagggtaggtcaccaagtccgtgacatgaagcccactccgggaacttggggccactttttaattctcaccctgcgctccccacacacctgtgcctcgccagtgtgacccacgctttggtcttcctctctgtgccatctgcagactccaactgacatttttttctggcccaacctatttgtgtctgataatcttatacatgggtctcaggcatgagcaaaaaggtttaaacaggaaaattcaaaggattcatggaatcagcttctaaagatcgaaagctactggcatgcgctagggtatgcatggcacaacctgggtcctcaccrttttcgaattgggatttggggtcaagccagctccctcttccatcagcagaagcccttcccctgtcctagggcttatttgca

SEQ ID NO: 40623 - DNA, 1908 bp, Homo sapiens
ggatccaaagatgagtaagagatatcccttcaatctgctcacaggttcctagggaaatgaagaaggaaccaatagttctgtctagggaaggcaggagatgcttcacagaagacatgacacttgtggatcagacaagatggagaggagttttctgatgaagaactgaagataattttcctagtgaggaaagaatgctttcaaaggcacacagaggcgaaatttcatgtcatatctagggaactgactagatcaatgagggcgtgggcacatatatgcatgtgtgtgcatgcacatatgtaagtttgcatgtgatgtacacacatgtgcacatttgtgtgagcctatgaatgcatgtttgcacctatgcatgtgtgtgcttgtgtatgtgcctgtgtgcatgcatgcctgtgtatgcatttgttgagggcataaatgtgtctgtgtgcctgcatgtaactttgcatgtgtgtgtgcatgcatgcgtgtaactctgcatgtgggtgtgtacatgtttgcatgtgtgtgagcgtgagcctaggaatgcatgctgcgtctgtgcatgtgtgtgcctgtgcatgcacctgtgtgtatgtatgcctgtgtatggatgtgtatgtgtgtttgcatgcctaggtatgcatacattgagtgcatatgtgcctgtgtgcataagtgtgtgaaagcttagtgctgacagactgcgaatgcatcttgagcagagagaggaggaaatgggaggaaagggaattctcctagacatgttacatatgtagtcttactttgtcctcacaacaaccttactacgtgggtggcattgtacccattctataataaggataagtgaattgctcaaggacctaacagttataggtgatgaagctataattcaggccacacctctaactagtccccacccacagggacctgagattggggtactttgaagtctggaagcccagctctttccatgtgtccccctctcaggtggaatctggctgaattcctgaatgcctgacatttcactgggagaactccagtggatggtgtgttcattttccagataatccctctagtgtgtgccagggcaacccagctcctctgccaccaggcagaagctagtacatttttcaaagctttttctgcaattcagagagccaacagcaaaacacaaaaccataatttcagtctttgaaaatggccagttggaaaatgaaatgggaggtcatgggtttgaggaaattgggaaaaaccatcaaatgctctccctgctcaacaaagcagctgagagcttgagttagctctgcagagaaatgaccagacgaggtcaggtactgccaagctcactgacttggcctttcctggccttcctcctctgttaaatttggtccatgaaacagcagtgattccaaacaagcttggtcatgcatcatttcagctaagtcaaaaaggagcactcctcattctaacagatattaggacctattttctgtgctaaacactgttytgaggcctttctatattctctcacataagttacatctgttttccagggcttacaccatattttctatattctatttatataggatgaaattataccatacagcacatattacatatttagtgtatttttagttatatatttaaacacttccatgttgcctatgatatactttatgtttttagcacaatcctttgagtcaattatttatcaccccattttttagactaaaaaactgaagcccagcaggctagaataacttgctttaagtcctgcaaccagtaaaactgacaaacagaatgcaaacctacatcctcctgtaacccagatttgtaccttttcttctgtgtcagctctttcatctggtttcattcttagtcacagtcagggcataaccagatgctgtg

SEQ ID NO: 40624 - DNA, 523 bp, Homo sapiens
tgagactgcccagaacacattgggctggcactgagcgttcacagcaatgggctgccctcgctcttgtaaggcagttggaactagtcccagggctctcgtgagctgcagttcactgggtttttatatcatgcggtgatagggaggaggagttggtggctcctgctcaccagaggaggagttggaaacccaggggaagggggcagcctggccagaggctgcaaagatggtgccagctgcagaccctgcactgtcaaagatgatgccttctcccgcctggtgctctgaggcccctccagtggttcccttggactgaagagccttaatcactctctctttccatcagagccaggtgtccaattgtcattcctgctacttcttrccttgtcatggctcaaagctccttgggacccggcttctacctttgctcctactctggcttcctactccccagccccagccccttaatcccacagaccctccatgagcagaccattcacacttccatgtctttgctccttctacc

SEQ ID NO: 40625 - DNA, 809 bp, Homo sapiens
agatggggacacgagagagcaaggagccactggaaggcaaaacatcccatacccttaggcctctgcagaggctgtttccttccctacctctctagtctcacctctttttggaagacaaactcccacaaaataagcctcccccatccccaggcctttgtagcactttgtacatttcatcgctcctcaccctgctgttttctaggttgttctttgctcatctctttctctcatgagacgataagtttgatgtgtacgctttttctctataattcctgagccaagtgcaggtctggtgtggagtaggtgcttgaggagtatttgatgactagaaatgaactttctgtcttatctttaccatatcatttactctaaacgttctggccttgtcactgccatggaatgtgtcttgttaggtcctgcttctgcctgttctctactctattccccaatacagaataccctttatcccctttctatttcatcartcaaaattccatatgtctgttaaagccaagttcaaatgccacttcttctctgaagttttcttggacatgcctgccagctacaaaatacttgccagatttggtaggagaggaacttctgcttgggtctcacttttcttttctttagtgtgaaggggttgaagtcggtaattttgggggcttcttcagttctaccacagctcagtaacagtcatggattatttagaatttaatctatgctaggccctgcaccatgcactaaggatacagaagtaagtaagactgaggacactgaagctaccagagaagccagacatgcatagaagc

SEQ ID NO: 40626 - DNA, 1277 bp, Homo sapiens
cattgcactaaatacatatttagtatcagaaactcaaacaagaagccactctgtcctctcttaagtggagaattaagtattctccacttcgatgaccttgagcaatgctttgtgctctgacaccttaactgatgttgaggattgaatgaggggacctgtgtcagtgccttttacagtggcctctgacctgggcaggggctcggtcgtccctgtccttcctcatatccctttcagccccactctgctgcctccttcttttgttcttttccaattcttccttccctctctccctccttcactttccccattcctcataccatagttcagattcagattcaaatartgtaatacctattgagcttttcataaattggggacttgaccttcaccttgaaggaactgtttttggggttcactgtctgtcacttctgcctccccaagagaggacagagtagcttcttgtttgagtgtctgatgaggggctgaattaactgtgaactgagttaagggacaaccagaggttgtcagcatgcccagaggagtctctgttcccagtgtgtcctacaggaaaggtttgtggtgagaaagtaatctcccgaggcccacatgacatcctggtggatgtgtccatgggccagttattttaatttgcttgctcatttatttatcacttgtggtaaattataacaaaagcacctgccacaataaagcaatgaaaggcatttcctagccctgagctcttaaagaaacatctcacctgggaatccatgtgggggcccagtaggaggcagtggcctctggcttcaagagcattccttcagcagatgccaacatgagtgtcatgaggatgcctctcatagtgtcccctgatgaatgccaagggcacagtcccaaaacacagtgcaagcacgcagctgtctgaagtctagctagacactacaccaaggcaaatgtgagtaaagtgcatccttcacaccatcctctgagactgtcacatctttcagcccagctatggagaaagccaggacaactaagtggtgcagggtcaggcaaaggccaggaatgcggggatttgagctgatgtggctcagtggttgggaactcagactcagaaatcatacatgtctggtttcagatcctagttttgccacttccaggccctgtgtgactttgggcaagttacttcactgctctgaacttcatatatcttatctgttgaatacaagtaatggtacaaacttttcagggttgtggtgagaattaaatgagctaatgca

SEQ ID NO: 40627 - DNA, 1277 bp, Homo sapiens
cattgcactaaatacatatttagtatcagaaactcaaacaagaagccactctgtcctctcttaagtggagaattaagtattctccacttcgatgaccttgagcaatgctttgtgctctgacaccttaactgatgttgaggattgaatgaggggacctgtgtcagtgccttttacagtggcctctgacctgggcaggggctcggtcgtccctgtccttcctcatatccctttcagccccactctgctgcctccttcttttgttcttttccaattcttccttccctctctccctccttcactttccccattcctcataccatagttcagattcagattcaaatagtgtaatacstattgagcttttcataaattggggacttgaccttcaccttgaaggaactgtttttggggttcactgtctgtcacttctgcctccccaagagaggacagagtagcttcttgtttgagtgtctgatgaggggctgaattaactgtgaactgagttaagggacaaccagaggttgtcagcatgcccagaggagtctctgttcccagtgtgtcctacaggaaaggtttgtggtgagaaagtaatctcccgaggcccacatgacatcctggtggatgtgtccatgggccagttattttaatttgcttgctcatttatttatcacttgtggtaaattataacaaaagcacctgccacaataaagcaatgaaaggcatttcctagccctgagctcttaaagaaacatctcacctgggaatccatgtgggggcccagtaggaggcagtggcctctggcttcaagagcattccttcagcagatgccaacatgagtgtcatgaggatgcctctcatagtgtcccctgatgaatgccaagggcacagtcccaaaacacagtgcaagcacgcagctgtctgaagtctagctagacactacaccaaggcaaatgtgagtaaagtgcatccttcacaccatcctctgagactgtcacatctttcagcccagctatggagaaagccaggacaactaagtggtgcagggtcaggcaaaggccaggaatgcggggatttgagctgatgtggctcagtggttgggaactcagactcagaaatcatacatgtctggtttcagatcctagttttgccacttccaggccctgtgtgactttgggcaagttacttcactgctctgaacttcatatatcttatctgttgaatacaagtaatggtacaaacttttcagggttgtggtgagaattaaatgagctaatgca

SEQ ID NO: 40628 - DNA, 1277 bp, Homo sapiens
cattgcactaaatacatatttagtatcagaaactcaaacaagaagccactctgtcctctcttaagtggagaattaagtattctccacttcgatgaccttgagcaatgctttgtgctctgacaccttaactgatgttgaggattgaatgaggggacctgtgtcagtgccttttacagtggcctctgacctgggcaggggctcggtcgtccctgtccttcctcatatccctttcagccccactctgctgcctccttcttttgttcttttccaattcttccttccctctctccctccttcactttccccattcctcataccatagttcagattcagattcaaatagtgtaatacctattgagcttttcataaattggggacttgaccttcaccttgaaggaactgtttttggggttcactgtctgtcacttctgcctccccaagagaggacagagtagcttcttgtttgagtgtctgatgaggggctgaattaactgtgaactgagttaagggacaaccagaggttgtcagcatgcccagaggagtctctgttcccagtgtgtcctacaggaaaggtttgtggtgagaaagtaatctcccgaggcccacatgacatcctggtggatgtgtccatgggccagttattttaatttgcttgctcatttatttatcacttgtggtaaattataacaaaagcacctgccacaataaagcaatgaaaggcatttcctagccctgagctcttaaagaaacatctcacctgggaatccatgtgggggcccagtaggaggcagtggcctctggcttcaagagcattccttcagcagatgccaacatgagtgtcatgaggatgcctctcatagtgtcccctgatgaatgccaagggcacagtcccaaaacacagtgcaagcaygcagctgtctgaagtctagctagacactacaccaaggcaaatgtgagtaaagtgcatccttcacaccatcctctgagactgtcacatctttcagcccagctatggagaaagccaggacaactaagtggtgcagggtcaggcaaaggccaggaatgcggggatttgagctgatgtggctcagtggttgggaactcagactcagaaatcatacatgtctggtttcagatcctagttttgccacttccaggccctgtgtgactttgggcaagttacttcactgctctgaacttcatatatcttatctgttgaatacaagtaatggtacaaacttttcagggttgtggtgagaattaaatgagctaatgca

SEQ ID NO: 40629 - DNA, 1277 bp, Homo sapiens
cattgcactaaatacatatttagtatcagaaactcaaacaagaagccactctgtcctctcttaagtggagaattaagtattctccacttcgatgaccttgagcaatgctttgtgctctgacaccttaactgatgttgaggattgaatgaggggacctgtgtcagtgccttttacagtggcctctgacctgggcaggggctcggtcgtccctgtccttcctcatatccctttcagccccactctgctgcctccttcttttgttcttttccaattcttccttccctctctccctccttcactttccccattcctcataccatagttcagattcagattcaaatagtgtaatacctattgagcttttcataaattggggacttgaccttcaccttgaaggaactgtttttggggttcactgtctgtcacttctgcctccccaagagaggacagagtagcttcttgtttgagtgtctgatgaggggctgaattaactgtgaactgagttaagggacaaccagaggttgtcagcatgcccagaggagtctctgttcccagtgtgtcctacaggaaaggtttgtggtgagaaagtaatctcccgaggcccacatgacatcctggtggatgtgtccatgggccagttattttaatttgcttgctcatttatttatcacttgtggtaaattataacaaaagcacctgccacaataaagcaatgaaaggcatttcctagccctgagctcttaaagaaacatctcacctgggaatccatgtgggggcccagtaggaggcagtggcctctggcttcaagagcattccttcagcagatgccaacatgagtgtcatgaggatgcctctcatagtgtcccctgatgaatgccaagggcacagtcccaaaacacagtgcaagcacgcagctgtctgaagtctagctagacactacaccaaggcaaatgtgagtaaagtgcatccttcacaccatcctctgagactrtcacatctttcagcccagctatggagaaagccaggacaactaagtggtgcagggtcaggcaaaggccaggaatgcggggatttgagctgatgtggctcagtggttgggaactcagactcagaaatcatacatgtctggtttcagatcctagttttgccacttccaggccctgtgtgactttgggcaagttacttcactgctctgaacttcatatatcttatctgttgaatacaagtaatggtacaaacttttcagggttgtggtgagaattaaatgagctaatgca

SEQ ID NO: 40630 - DNA, 712 bp, Homo sapiens
tgaaaaaatattaaaaaggggtcaaagagtataaggaagtggtcaatgctagagtagattttctatagaggtctggagaacccatcaggctgattgtgttacctatgagggtcctaaagacagccttcactaaygcagtaagaaatgtgctagtgaaagtggtgacatagataggcagacaatgagggtttttcttgacttaacaaaaaagtctgagagaaggtaaatataaagttgacgttagctaccaaacaaaggaaaaaattatgtatgaccctttgcccagattccaatcttgagccagttctcaaatccagagctcattgatgaagtaaagccagatctccttctagaaggatcctataataccacagtatatacagtagtgtttttcctaatatttctccagagggacctatgactatttcctggagcactgactaccagggagtgaggagtatccagctctttgagggcttctgaatttaggcatctgaactgggcatttttctcaagcaaacccataaatgcaaacatggcttccttattcagcagtggcaggcctagggaatccaggagtaagttgagcacctggtccatatacactttgtagtagagctgatgcaccaatcaagtgcataagtgagcatggatatgcctcaacagttgcacagcaaatttcaggtttgtttcatgatctgtgaagcaagag

SEQ ID NO: 40631 - DNA, 1163 bp, Homo sapiens
atgaatgagaacatgtggtgtttggttttctgttcctgtgttagtttgctgaggatgatggtttccagcttcatccatgtctctgcaaaggacatgaactcattcttttttatggctgccctaattgggtttattgagaagtttacatacrgtaaaacaaacaaaaagaaaaagtgacacattacctgcaggaaccactcaatacatatttttccctttctcctccccactgcccatcccctacttccacctccagtcttagaggttctgaattcacactttgttgcccttggttaataaccagacatttctttagtcgatgtttcacttgggctctactttcctttcaacctgagataaggtttcactccccaggtcctagggaattacgttctcctgctgatcattaggacagtagaagcaatgtaccacaattaaatgatgtactgcagacaagcaattaggtaattaacagcagtcagtgcatgggataattggcacgtaggtaattgggagggcggttctcattctgtgtgtagggctttatttttaaagccaatattgttgtgtatagagtttgttttgtgcagtgtttgtttatattaatttgttccaggatgaattttttttgtttgattaaagccccaacttagtgagtttgggagggagctgggactatagttactgatgttctcaaagctgagccctcctaatgcctgttttctaaaactgaggttgccatagtgaactgtcttgaataccatatgtacatttctagcccactttaaccaaagagcattttattctggagaagagaagatgaaagcattgaatgcttggagaaagctctgctcataagtggcattggaaagcttttaaattttctccctgaataaattattgtggaaggttgataagatggaaagataaaccataaagctaggtacttaaaaatgtcatccacttcccccctgagtcatcatagcctaagttttaaaaatgatatctgcatagcccatattttccttgtcatccctcctatgtgggcttctgtgaaattaaaatcatctattagtctgtcaagccaaaaagataataaaatcatggtgttggaattaggagtcgggggagggggagagatgatgtgagtgacatgaccataa

SEQ ID NO: 40632 - DNA, 653 bp, Homo sapiens
tatgaaagtcatctccactgccagtgaaaccagtcaagctgcatgtgcagctgccattaggtcaggagaaaaacttccatttttgaaattgtatagcatagacagtccctgggatcaaaaggagacaagcatgggtatggatcttgtctgcactacttaatagtcagsaaggtacttaagtcctgggcccgtttcttcttctgaaaatggaaacgatgcaaattaaatggcataaatgaaggtaaagatgcttccctttcagaacctttgtttctgcctagtgttcactccagggccacagatggcctgctagttgatgttaatgccattctttaactaccccttgtgtgtgttgtttgttcattaatgtggatgaatggttccacaattccaccagggactttggtaggtgttggatgagtgtgtaaaggagggagaaggtgttatatgcaaagctggtaacagagaatagggacagcccaatgctttgtataagaagagcttgataagggtttgtttgtagaactaaatatcaagaagaaaatcttccaatgaggatactgcagaatgagaagctgttagggccaactctgtaaattctcacctgacagtgattttgcagactaacaaatgtttccattttcgcttttccc

SEQ ID NO: 40633 - DNA, 653 bp, Homo sapiens
tatgaaagtcatctccactgccagtgaaaccagtcaagctgcatgtgcagctgccattaggtcaggagaaaaacttccatttttgaaattgtatagcatagacagtccctgggatcaaaaggagacaagcatgggtatggatcttgtctgcactacttaatagtcaggaaggtacttaagtcctgggcccgtttcttcttctgaaaatggaaacgatgcaaattaaatggcataaatgaaggtaaagatgcttccctttcagaacctttgtttctgcctagtgttcactccagggccacagatggcctgctagttgatgttaatgccattctttaactaccccttgtgtgtgttgtttgttcattaatgtggatgaatggttccacaattccaccagggactttggtaggtgttggatgagtgtgtaaaggagggagaaggtgttatatgcaaagctggtaacagagaatagggacagcccaatgctttgtataagaagagcttgataagggtttgtttgtagaactaaatatcaagaagaaaatcttccaatgaggatactgcagaatgagaagctgttagggccaactctgtaaattctcacctgacagtgattttgcagactaacaaatgtttccattttcgctttyccc

SEQ ID NO: 40634 - DNA, 510 bp, Homo sapiens
ggtcagacatcaagcagggatggacaaccatcatttacagctcagggctgctcttgttctagggtgcttctgaggcattctggaaggttaagggtcctcaggaggcccttgctcaattacaattamtattatgaaatattattacattaaaggtggataattattgtctcaatgccccttccttaattttttttcctttttctttttttaataaaatagcgacatgttctcacaatgttgcccaggctggtctcgaactcctggcctcaagcagtcctcccacctcagcctcccaaagtgctggaattacagatgtgagctaccatggccagcccctaattttatatgaagggggattacatgtttttcatgcacgtaacgtttaatttatattggtatcttatatataaagcattacaccttaaatactaaaaacctaactgggagagaagacatgtaagtccagttgtcacctgaatagatatatgagtgtgatgtacagaggaaggg

SEQ ID NO: 40635 - DNA, 2052 bp, Homo sapiens
tggacagtctttggtaagctaaacatatcaaatgcaaactcatactggaaaaactaaatcaaacaaaccaggagtaaccctgccaatgtgaaagaaaattttccaaatagtatagttttgttttagccactgacatatgggaaaatttatgtagtaaagtatatgcttataaagtttcaacttatatttagtgggggaaacaatttattataccaaaaaagcataaacgtatgacagatggtaatgctttttttctgttcttggcagggtccttttttggctgaatgacttttgctacttcaaattgtgaacattgtcattcacacctattttctgaaattaaacagaccaattctatgacgaaaccccttataaatttggttactgtataatatcttcccattttgtatcataaattatctagagcaccactttccctagaataatggaaaaggccaaaactgggcaaaaagcattctgtaataaaacctttattttaaactccttaaatcaattttggaaaaccttttatatttaaatgttttctggtaggactttaccaaggaaactataaaagattatattagaaatacactcttccattctgaaatatttatttttggcttttaaaatgttcaactcctttaaatcattttcaaaattataaatgatgtatatggatagctaggtgatggatctagttggtttatcttccgaaaaataggaacattttttcctaagtataggtgatataagactagtttcttgtattacttaactatgcaaaccatttgtttaaagtaagaaatttatttactagataaagaagcgaaagaatgtactgtatatgcaaatggaaagcaaggtaaagggtgagatcgagatctcactagatgcatggggtagtggggaggtagggattagatcttcctgcctctcacagtggccagcattgtgtattgcctccttgaaagtaacaaggtttttctctcaggcagtttcagaaaggctggctggtgttagatttattaacaggtgattctcagatgaaaatgataaaaaatgttagggtagttacggtaacccttgctgctgtagcaaaccccagtacttcagcagctttaagaaaaatgtttaattctcacctacataatagtcccaagcaaatgcttttggtgggaggagcaagatgatcttcaggggaaggagagacctctgtgtcacagcaatcattcagagattcaaggttttcaatgccaccccaatatcaagcaaaargggtatgaagaatgctgggggacatttttcaaggccaggcttggctagaactcagtcacatgttcacatctaagaataaggaaggccaaaaaatgtctgactcccatattaggagaaaataaaaggaaatgtctgatgaacaactggatagtttctgtcacaataaatattgcaaacatcttactgctgccaatattgtggttggacagctgtcacttgttaaaaaaaatggctagtgacactatctctgcaatttttaaataacacttaattttactttttttctgcttattctattttttcctcttcttatctgcaacgtattttattaatcatctgctagtgatctggcaaaactgattgcaggtaatggtttattttgaagtgtgcgttcacattcaagaagaaagaatattagtaatgtagcgagacacgcacaaacagctaaattttttaataaaatatcccggaatgccaacaaactttttactacgttttaaataaaaaggcaggactttttttcccccagtttaaaactatgagaacttaatcaaaatttagaatgatctaattaatgattaggtagatttttttttttttggtctgaaagagactcaactttattttctagccataatacaaagaaaattttcatcttacaaatgctgaaaaaattttggtgaggaacaaaattttggagaaaatgctatgaaaattaacagcagcctcggtgttgttatagactctcaggaaaattcttttctggcagatctc

SEQ ID NO: 40636 - DNA, 523 bp, Homo sapiens
gccaactttctctggcctatatttagccaagaaggaaggtagttaatcctgagaacactaaatgtgaagtaagtgctatcacccccattatacagatgggagagttaaatgacgtactcaaagactacagctacaaaaaattcaggttcagcctgtgcctggctgatttcaaaccccctttccatctcgcagacttacakttcaggaagtctaacctgtcccaatgaactgctccaggggataggcagttagctaatcttgcctactctggatcaaatgtaagctgctgatgttacatgtaccacatttcatgtagttttcttttgacttgcccactctggaagttggttgtaaactttgagacccctctttgtttgttaaccacatcgtaaaccaggcacacaatcaacagcttgaatttggggaggcggaagggaggctagtagaattctttccaacctttaaaagaaaaacagtccatttggcagtagtttcttaacggtggactaaggatctgttgtgt

SEQ ID NO: 40637 - DNA, 523 bp, Homo sapiens
gccaactttctctggcctatatttagccaagaaggaaggtagttaatcctgagaacactaaatgtgaagtaagtgctatcacccccattatacagatgggagagttaaatgacgtactcaaagactacagctacaaaaaattcaggttcagcctgtgcctggctgatttcaaaccccctttccatctcgcagacttacatttcaggaagkctaacctgtcccaatgaactgctccaggggataggcagttagctaatcttgcctactctggatcaaatgtaagctgctgatgttacatgtaccacatttcatgtagttttcttttgacttgcccactctggaagttggttgtaaactttgagacccctctttgtttgttaaccacatcgtaaaccaggcacacaatcaacagcttgaatttggggaggcggaagggaggctagtagaattctttccaacctttaaaagaaaaacagtccatttggcagtagtttcttaacggtggactaaggatctgttgtgt

SEQ ID NO: 40638 - DNA, 523 bp, Homo sapiens
gccaactttctctggcctatatttagccaagaaggaaggtagttaatcctgagaacactaaatgtgaagtaagtgctatcacccccattatacagatgggagagttaaatgacgtactcaaagactacagctacaaaaaattcaggttcagcctgtgcctggctgatttcaaaccccctttccatctcgcagacttacatttcaggaagtctaacctgtcccaatgaactgctccaggggataggcagttagctaatcttgcctactctggatcaaatgtaagctgctgatgttacatgtaccacatttcatgtagttttcttttgacttgcccactctggaagttggttgtaaactttgagacccctctttgtttgttaaccacatcgtaaaccaggcacacaatcaacagcttgaatttggggaggcggaagggaggctagtagaattctttccaacctttaaaagaaaaacagtccatttgscagtagtttcttaacggtggactaaggatctgttgtgt

SEQ ID NO: 40639 - DNA, 1155 bp, Homo sapiens
aaaagcttcagaaagtggaaagcacaaaagagaaagaaagaaagaaagaaggagaaaagatccactgcaaataaaaaaaatatgtatcatatggcttaagttgatttaaaacaaaggccttaaactaatttttagggtttttttttcttgaaatgagctaatggcttgtttgtgtaaagcttttccattaaaacaaaaaaatttttaaaatcttgtacataacacagtattgttgtagaattcatatgaaacattttatatggtaaagtcaactagctccctaattgtggacaaattaacagttggttcctgttcttttgctataacatacttgtgccacccatgtagccctggcatctgtgcagacacatcagtttcagttccactgtcacttggaagatcaggttcagcatcagtttttgtcaggtagctctaatacctggagttttctttcttttcttttttacttagttgaagtttaagaggaaaagtaccagttttcagatttgaactatcatagtttgtatattcaacaaactatttgaagtatattgtgttttggtttgctcttgtttcaaagtgtatccaagtaggattcctgaaatatagaaaagaaacttgtaaataaatgaatggctggtaagtatccaaaattagggagataaatgattcactaaacttaggaagcacacctggacacatcatagtaaagctacagcataatgataaacaaatatcataatagcataaaatagatacattgcctataaacgagtacaaaatagacagcaggtatctatacatcaacaaatggaggccaaaaaggaaaaaatagctgtcatgctagagttgcattcctagccaaacatcatttaagaagtaagctgtgacagacatgcaggtagatcgccccaaacccccttcaaggacagattttctgcttcagctgctgggacagcagttggatgccagtcatcagccatcagttccttcaggtatgacccgagctgcrggagctgccttgcccaaggtcacgcacttgcagagactgaccacatccaaggactgatccaagaggaggcacaaacatctggcttgctctgcccaaggtggaatgattctgatgggccatttttaccttcagagctccccttg

SEQ ID NO: 40640 - DNA, 1184 bp, Homo sapiens
tgtatgttattttgaaaagctgggactttactttgaggactaattagaagctggtaagagacatggtcaaatatatattcaaaagttttcacctcagctgatgaagatggcaaaaaaagttcaaatgccagtgtgtgggctaacccacatgaccattgtcccacaacccaaaaatataaagcatattattgtatttctatattaacattcactggataggaaccagctttttttgttcatttgaccattttaataacagtgttctgtgaactataaatggcatcttgcagaatctaatgtgtatcagaaactgcaatgatagaaagggaaagaagggaagaatagagaaaacagtgattgaccagttatctaccatgtaccagatactttgtgttaggtgctctgaatatgtttaatcttcccaataaggcaaatcttatcacatcaactttacaggtatgtaaacagagtttcaaaaaaattaagtttccagtgtatacatatattgctcagatctatacctagagctgtcagtcttcaaagtgtttaatcttttcactacaccactctatctccttgaaaaaaaggaaagaatgaagagcmcaagataaagaaaaagttggataggcactctaaaatacatgaaaacatgggtacctgtgctgctagcaagtattagcatttaaatgctactacaaagagatttcagaatatgacatcctgaagtggtcaatgaatcctatcaacacaagtataaatttgaaaaaaaaatttaaaaatcacaacaatctcaggcctctggaaataaagcaaaggcagacaacagattgagaagcacctattctttaaaaatcatcagagcttttggtacaaacagaagaagtttgagattttcttgcttgaagctactcccatcccactccccagctccacagttgagaacaatagctttgccaatgtggtgctaaccaaaaaacaaaacaaaatgaaacaaaaaaacagcaactttgctaccagaggcagacttgatttgggacacaaagacaatagcccatgattctgtaagctttttaagtttacaaagtggtaaactttgtagaaaacaaataggcaaagcctacagctttgctgatctgaagttgcagctccaattggggctatgacagaacagaaatttaaaggga

SEQ ID NO: 40641 - DNA, 546 bp, Homo sapiens
ttttgcatttgttggagctggagggtaccttgcccacatcctttgtttaatcaatgagaaaacttcagtttataagaagttgttgcttatccaaggtggtatggctagtggatttaattcagcaaatcttctgttgagtgtttatagtgtgacaggcctgggaaacctataaagatgaataagggttgggcccagccctggatggactcgcagttcagaaacaacagacgtaaacaaatacttcaagtatgagggctagagcagaggcagcacctttttgttttcagaacagtgttgtaatcatgtcagctcaaataaagccagagtagcaagttgatgtgccagtaaaaatcgaggagcagaatcttgggtacaggaagatagaagaggcgttatatggtttatcaaattttacgtacatgtccttaaaaaagatttcgtattgtgyctctacctaggcctgcttgtctcccagttcctggccagcaccccaaaacatcttgccttcctaattattgtgaattgtgaataaatggccctctagta

SEQ ID NO: 40642 - DNA, 695 bp, Homo sapiens
cccactctctcctataaaggatgtaccatggggatctagtctagacggttcctcagtgtctgtaattatgcattttctctgagtattcttyatattcaatgttttgccaactctgtttctaaagaggctttcttttccctctgctgagcgttgcggaaactggccatcagcctgactgagccccagagccctttgactgctttctcagtgctgtgcatcgcaaccagcagcctctggtttctgccttgatcccctcaatggtgcttggtgaggcaagcagctctatttcaggcctgcagaaggggagagtcacttcctctttaggatctgttctttaaatgaacccctcgtggaggggaagcctgcctgctaggacacatctgtgtgcatgaatacaggctctcggaaatctcatcctcacttcagcagcctgctggttacactgctcttatctcccctttcctgccttttaaggattgcaaggctctgtggttctgataagacccagttatgacctgaagaatactggctggacagattggaggaaacctatcactcttgaagggaaggagaggctcaaaggggacacgagatcctgcccttttccaaaaggaacccttgaggacacaagagcggtcctctgcaggatgaatcaccctgaggctctaggagaaactttgataagcatgctctgc

SEQ ID NO: 40643 - DNA, 1241 bp, Homo sapiens
agacaggccgggcgtggtggctcatgcctgtaatcccagcactttgggaggccaaggcgggtggatcacctgaggtcaggagttcgagaccagcctggtcaacatggtgaaaccctgactctactaaaaatacaaaaaatagccaggtgtggtggttcgcgcctgaaatccagctgcttgggaggctgaggcaggaatcgcttgaatccgggaggcgaaggttgcagtgagccaagatcgtgccatttgcgctccagcctgggcaacaagagtgaaactccatctcaaaaaaacagaaacaaacaaataaaaaaactaagagacgaaactgaaataggaataatcaaagtgatttttttttaattacgctttgaaattctgctttaaaattaactttgagtatatgtaaatgataaccagaaaattcttttcaaatagaatgttaaagtagcatattactgttgaaagtggtgtattactgttgaattattttaaagctctgatattaaaatgtccatcatttataaccatttttttatacctcttttatttcagggatggggaaagacaccatagtcataaaagaagaaagcaaaaaatataaatgaagtactygtacctatattaattatgcttacgccatgataaccaatatacagatatattaattggaattcctttgcataggagaatgtttttatgatctgtttagtgcttattattttttttatgatctgtttagtgcttattattttccagtaaatatgcttcaaaccatgagtacactattaggccctacaactttgttttccttatattttattagatgatttgcttcctataactgatgttgttttgttcgttttgctaatatatgtatctcaaaattctttaagtcaatatttatcatatgtaaattaaacatgaatacattctcatcttataactacatcttataaataaggctaataacccttagaacaccacctgcggttctgtcctcaccccagtggtgactactgtttaccactacactggtgaattgtagtagggaaaaacaatctaaatattgaagaggaatggcctaattaaaatatgatgtagtcataggatagattattgtattggagttaaaagaaataatctagatccatattaacctggattggtctcaaaaacataatgctcagtgaaaatagcaagttgtagaaagttatatacaaattatatatatgtacaaa

SEQ ID NO: 40644 - DNA, 1241 bp, Homo sapiens
agacaggccgggcgtggtggctcatgcctgtaatcccagcactttgggaggccaaggcgggtggatcacctgaggtcaggagttcgagaccagcctggtcaacatggtgaaaccctgactctactaaaaatacaaaaaatagccaggtgtggtggttcgcgcctgaaatccagctgcttgggaggctgaggcaggaatcgcttgaatccgggaggcgaaggttgcagtgagccaagatcgtgccatttgcgctccagcctgggcaacaagagtgaaactccatctcaaaaaaacagaaacaaacaaataaaaaaactaagagacgaaactgaaataggaataatcaaagtgatttttttttaattacgctttgaaattctgctttaaaattaactttgagtatatgtaaatgataaccagaaaattcttttcaaatagaatgttaaagtagcatattactgttgaaagtggtgtattactgttgaattattttaaagctctgatattaaaatgtccatcatttataaccatttttttatacctcttttatttcagggatggggaaagacaccatagtcataaaagaagaaagcaaaaaatataaatgaagtacttgtacctatattaattatgcttacgccatgataaccaatatacagatatattaattggaattcctttgcataggagaatgtttttatgatctgtttagtgcttattattttttttatgatctgtttagtgcttattattttccagtaaatatgcttcaaaccatgagtacactattaggccctacaactttgttttccttatattttattagatgatttgcttcctataactgatgttgttttgttcgttttgctaatatatgtatctcaaaattctttaagtcaatatttatcatatgtaaattaaacatgaatacattctcatcttataactacatcttataaataaggctaataacccttagaacaccacctgcggttctgtcctcaccccagtggygactactgtttaccactacactggtgaattgtagtagggaaaaacaatctaaatattgaagaggaatggcctaattaaaatatgatgtagtcataggatagattattgtattggagttaaaagaaataatctagatccatattaacctggattggtctcaaaaacataatgctcagtgaaaatagcaagttgtagaaagttatatacaaattatatatatgtacaaa

SEQ ID NO: 40645 - DNA, 788 bp, Homo sapiens
ccaagcagcctattattgcttggcatcacagagatctatcaggatggtggccagaggagcaggcggtaaaactccacagggagaaggacttctctagctgaactttgtaacaacttgaatggggcgagaagcctyctggccagaactcaggggagggtatgactccgaattgcagacttcacagatcggggaagaactaaagcccttttcttttgcagctgggaggcaggaagcctccggcaagttttcaagcccgactcaccctccacctagaaacagactcagggctgttgtggggggcatggtgggaatgagaccagcccttcagtttgtatgggagctgggtgaggcctgtgaccactggctttcccccacttccctgacagcctacatgactcagcagaagcagccataatcctcctaggtacacaactccaatgacctgggaatctcacccccattccccacagctgccgcagcaagacccacccaaggagagcctgagctcagacacacctagccctgtccccatctgattgtccttccctacctactttggtaacgaaagacaaagggcatctagtcttgggagttctagggccctgctcaccaccagtccctctccacactactacagctgattctttctggaaagcaacgcctcctggcaggaggccaaccagcacaaaaatagagcattaaatcaccaaagctaagaacccccacggagtccattgtaccctccaccacctccaccagaacaggcactggtatccatggctgagaga

SEQ ID NO: 40646 - DNA, 760 bp, Homo sapiens
ttgctttcactagacatatgagggcatgtcagtctggaaccatattaaaataaatagctggcttagaggttcttagaccacaaaaatagtttcaatttgagcacaaacacatgtgagttctggctcatgatcaattgtttttttcttttttttttttccctttattttcttttatcaggttaaatcttggggcagatatttcttttttttytctctctctctacccagagccaaggccaagacaagtttttgtttgttttgttttactataaccttttacaaggcgtattttgttctctagttcactttttctctggtggcgtaacttcagggctctcagctttatgtggtgatttcttgttaagcacccccaccttgccatggccctagctttgtgtcctgaaccctgtgtggacgttgaagctgacatgctaggtctagacaccagctcagggtttgcagacctctcagaacttctattctcattttgcttttggtctgtacaggctttccttgctttgttaccagctcagtcaaacattttaaaagatttttcaaaaatattttatccaacagttttagatgtttggtaacaggaaggattttcagaatatcttgtctaccatattcttttgtcaaaaataagtaactatttctgtgaccacactagaggtatcctcgcgaaggtggaaattcaattccatgtattcctcacttctagcccttaataactcatgttagaaaatttcccaacacaaat

SEQ ID NO: 40647 - DNA, 657 bp, Homo sapiens
agcaatgatggttctggtagacagtgatggtgacaaatggcaaccagatggtatgcaataagcaaagcctttgaaggatgtataattttcccaaatttacaattaaggaaattaaggcttggagatgataaataatttgttcaaggccacacagatagtattaaaggcagaggtcaaatccaagtttgtctttgtttgacaatatatccttaatctttaaatgtaccccctttgaggtatacatctctaaccctgactcctctcaggagctccagaaccacatttccaactttctcttatgaacttccctatgactattccacagccacctgaaattcaacacatcccacaactgaactcatcrtctacctggtcagcttcatttcttgttctgtgtttcctggatgagctcatggcatcagcattctcaacaccaaggttgcaaaacatggagtcgtcttttactcacccctcacttttactccccatagcccatctgtccccctcctttccaatgctactgccattatcttaggtcagttcctcatcatctcccatttagactcatgaagatgcttgaactttccatccttgttgcagtttttcatctctccacaccatgtttgaacccgattaatcctcctgaattgacttacc

SEQ ID NO: 40648 - DNA, 581 bp, Homo sapiens
tcatggaaaaaatgcatctcattttggtagcatacttagaaaaagcaaaataagaataaatttgcatgccaattagatgcaaagwtaccacacatacctcaagataaatttgagatcctgaaacaagcaattgggtctataatattttgtaacatattcatttggatatgtgcgctatctgcatttttagtgaaagaaaatgcattcaatcaagggccatagagagagtgctatcaacaatattccaagttctaaactaaattgcagaagattgtctgtgcaagttcacttataatgtgtataatttatatcacagcaaagtaaatatggatgaaagaaacatttgaatgagaaagggatacacttttaaaattttgcccaacattttatacttttggatagctaattttttatttaaaaattatattcttccataaataattatccatgagaaaatctttataggtagccttataaaatgttcacagtaaattaacacatttgaaatcaaaattaataggcactggttgtgtataaaagaagcatacattttgattcatgtaatttgttcaattgagcaa

SEQ ID NO: 40649 - DNA, 1361 bp, Homo sapiens
gtctcaagcgtagtaggctcataagaaaattcacctccccagttcaccctttgcaggtttcctttgtaagtcatgaaacaaaagagctagaagagacattgttcatttagtataatttatcattttaaagaagacaaaaccggcactcagagatgctaggctcacactgtgagtgatttacagagtcaagatgaggagaatccagttctgctgattcgctgcartgcaaggtcctgcccatgattcacttgttcttggggcattgtcgtgattccttgtttctatcttagaagtcaaggaggtgtcctataaaagctttcctattcttagttcactcttctgaatatataatgtaaacaactaacaatgaacaaagcagaaaagacaaagagaacataagagagtccaggtaatccagggtctgtacaaacaactctttcatacaatcaggaactggtcatggtggcataagtaataactggcataaatgtaaaatgaataaagaccatatgtttgcccttcttcatgttggcagaacatatgtatgttaccagaatttcctatgctttagagttttcctctaaaaccctctgaaacttaactaagctcaatggaaaaatgaagccttttaacagttgttttgtaagaaaatttttatttctgtatatttctgtgtgcatgaaaaaaccacacctgtattaatttgttaaaacttctgtaataaataaccatgatctgagtggcttcaacacaaaaatgtattgtttcacatttctgaggactggaggtccaagataaaggtatcagcagggttggtttcttctgaaagctgttagggagaatcattcccaggcctctcccctagcttctggtgtttgctggcaatctttggtgttccgtggcttacggaagcatcttccaacctctgcctttatattcacgtgccattcttcctgtgtctttgtccaagtgtccttttcttataaggccaccagtcatattgatttaggggcctgctcaactccaggatgacctcatcttaactaattacatctgcaatgaccctatttccaaacaaggtcatatcctgaggtactgggaattgaaactttgacctataagttttggggggcacagttcaacccacagcaacacccttcactgagatattgcaaaaaataagataactattttgttcgctgtagagtttcatatagacacttcttgagctgaaaaatttttgttaacagtacatgtgtttggacactgaagggcagtataacactacaaataatttcaaaaagaagtttatggcttgattgcttcagaaattacattgttatggtgattttgtttaaatg

SEQ ID NO: 40650 - DNA, 1928 bp, Homo sapiens
tttgctagtttctaaaatgattaattgcacaaagaatagagatagcaggtttgtgtgaaggatgctcttcttttttgccacctcaaattccccgcttcctgcctccagcaatttctggyctgttctctggatgtcagttcattaccacattagtgtgttcattgtatgttctgttgccaggaaggtgctgccacagcggcccctgggaagtcaggatgctgctagttttcactgtaggtctatcaaagagaaacctgtgggattgggaagggatttggtcatcccagacatgttcggttttaaggaactctatgttctaagaaatatgttgacatcaacctttttatttccagcataggaaggaaaaggaaaaaagggaaagaaatattcaaattatcttggagctgtcctctcatttctattaggcacaaaatccatagttccttttcaaatggttattgacccaacaaaagattggatgtactggggctgagtattatctctgttattatcacattcttttgtcttctatgcactttcattcatctcctgtagaggcagatcacagattgattttaaaagatgtaacaatgtctcctcaatcgctgcagagtacattttgtcattgtgttgactgttcgtgcatttcagtttattattgctggtttcaaaagcatgtaatttttatcggaaagtaggttacaattaagggagttgcaggtagtgatcctgggtcctgttttgtctccttgataaattcaacttagaggagctggagaacacgtgtctggatttgtagctctcctgttccctcctgagtaacctcaggatatagcacctgggggaagacaaaggagaagcaaagcggatggatgcgggtgtctttagcaaaatgacaggtgaggcagggcgagaacagaggacggaggtgctggctgctagaagcttttcaagatggagctgtagaagcaagcctgtttttggtgagagaggcaaagtctcatgcccaggggagatttttgttttcttttaaggagtaataaagtctagggtggtctgtgtcatttcaccctttctagtaaaaaggattagctctcgttgaaaatgcctccttgtcccctgaatctgtcaatactccacctttgtcctcacccttgactttaaaaaccctgccacatgacttcctatgaatgcataaattaagcactttttttcctttgtagaaaaaaaaaatacacacacacacacacacacacacacacacacacacacacacatatgcacacagcaattaataaccagagtttattgagggtttacagtgttccggccatttctcattgcatacaaaatctcataaatcccacccaaaaaccatgaggtgagtatcatcccacctagcagatgaggaagtcttagagaggcaaagtaagttgcttaatgtcatacagtggagagccaggattgccagcaagcctgcctggcaccaggacccatatttttaatgtttgcgtgtgtcacatgtacagcgtcttccattttatgtgcaaatattcatttctcacaccctctttggagaaagacaaggtggagaggaggaagttgtaagtgttgaaatgggagcactcacacatgtgagtatccaggagcccccaggaggctcagcagccatgtggccccacctacagccacctcatttctttttctgcaacataaaatgccgctcccgggtgctattgaaaatacatgttgtgtggtgctgacacagtccaaacatacctactgagcgtgctcagatctaattaggagcctgtctctgcttcctgagatatgaaagcgtctggaaacatgttttctttttcttcttgctttgtagagatacatctttttaaaaaattgcagaaagctttttggtttcttgttcaaaa

SEQ ID NO: 40651 - DNA, 1928 bp, Homo sapiens
tttgctagtttctaaaatgattaattgcacaaagaatagagatagcaggtttgtgtgaaggatgctcttcttttttgccacctcaaattccccgcttcctgcctccagcaatttctggtctgttctctggatgtcagttcattaccacattagtgtgttcattgtatgttctgttgccaggaaggtgctgccacagcggcccctgggaagtcaggatgctgctagttttcactgtaggtctatcaaagagaaacctgtgggattgggaagggatttggtcatcccagacatgttcggttttaaggaactctatgttctaagaaatatgttgacatcaacctttttatttccagcataggaaggaaaaggaaaaaagggaaagaaatattcaaattatcttggagctstcctctcatttctattaggcacaaaatccatagttccttttcaaatggttattgacccaacaaaagattggatgtactggggctgagtattatctctgttattatcacattcttttgtcttctatgcactttcattcatctcctgtagaggcagatcacagattgattttaaaagatgtaacaatgtctcctcaatcgctgcagagtacattttgtcattgtgttgactgttcgtgcatttcagtttattattgctggtttcaaaagcatgtaatttttatcggaaagtaggttacaattaagggagttgcaggtagtgatcctgggtcctgttttgtctccttgataaattcaacttagaggagctggagaacacgtgtctggatttgtagctctcctgttccctcctgagtaacctcaggatatagcacctgggggaagacaaaggagaagcaaagcggatggatgcgggtgtctttagcaaaatgacaggtgaggcagggcgagaacagaggacggaggtgctggctgctagaagcttttcaagatggagctgtagaagcaagcctgtttttggtgagagaggcaaagtctcatgcccaggggagatttttgttttcttttaaggagtaataaagtctagggtggtctgtgtcatttcaccctttctagtaaaaaggattagctctcgttgaaaatgcctccttgtcccctgaatctgtcaatactccacctttgtcctcacccttgactttaaaaaccctgccacatgacttcctatgaatgcataaattaagcactttttttcctttgtagaaaaaaaaaatacacacacacacacacacacacacacacacacacacacacacatatgcacacagcaattaataaccagagtttattgagggtttacagtgttccggccatttctcattgcatacaaaatctcataaatcccacccaaaaaccatgaggtgagtatcatcccacctagcagatgaggaagtcttagagaggcaaagtaagttgcttaatgtcatacagtggagagccaggattgccagcaagcctgcctggcaccaggacccatatttttaatgtttgcgtgtgtcacatgtacagcgtcttccattttatgtgcaaatattcatttctcacaccctctttggagaaagacaaggtggagaggaggaagttgtaagtgttgaaatgggagcactcacacatgtgagtatccaggagcccccaggaggctcagcagccatgtggccccacctacagccacctcatttctttttctgcaacataaaatgccgctcccgggtgctattgaaaatacatgttgtgtggtgctgacacagtccaaacatacctactgagcgtgctcagatctaattaggagcctgtctctgcttcctgagatatgaaagcgtctggaaacatgttttctttttcttcttgctttgtagagatacatctttttaaaaaattgcagaaagctttttggtttcttgttcaaaa

SEQ ID NO: 40652 - DNA, 1928 bp, Homo sapiens
tttgctagtttctaaaatgattaattgcacaaagaatagagatagcaggtttgtgtgaaggatgctcttcttttttgccacctcaaattccccgcttcctgcctccagcaatttctggtctgttctctggatgtcagttcattaccacattagtgtgttcattgtatgttctgttgccaggaaggtgctgccacagcggcccctgggaagtcaggatgctgctagttttcactgtaggtctatcaaagagaaacctgtgggattgggaagggatttggtcatcccagacatgttcggttttaaggaactctatgttctaagaaatatgttgacatcaacctttttatttccagcataggaaggaaaaggaaaaaagggaaagaaatattcaaattatcttggagctgtcctctcatttctattaggcacaaaatccatagttccttttcaaatggttattgacccaacaaaagattggatgtactggggctgagtattatctctgttattatcacattcttttgtcttctatgcactttcattcatctcctgtagaggcagatcacagattgattttaaaagatgtaacaatgtctcctcaatcgctgcagagtacattttgtcattgtgttgactgttcgtgcatttcagtttattattgctggtttcaaaagcatgtaatttttatcggaaagtaggttacaattaagggagttgcaggtagtgatcctgggtcctgttttgtctccttgataaatwcaacttagaggagctggagaacacgtgtctggatttgtagctctcctgttccctcctgagtaacctcaggatatagcacctgggggaagacaaaggagaagcaaagcggatggatgcgggtgtctttagcaaaatgacaggtgaggcagggcgagaacagaggacggaggtgctggctgctagaagcttttcaagatggagctgtagaagcaagcctgtttttggtgagagaggcaaagtctcatgcccaggggagatttttgttttcttttaaggagtaataaagtctagggtggtctgtgtcatttcaccctttctagtaaaaaggattagctctcgttgaaaatgcctccttgtcccctgaatctgtcaatactccacctttgtcctcacccttgactttaaaaaccctgccacatgacttcctatgaatgcataaattaagcactttttttcctttgtagaaaaaaaaaatacacacacacacacacacacacacacacacacacacacacacatatgcacacagcaattaataaccagagtttattgagggtttacagtgttccggccatttctcattgcatacaaaatctcataaatcccacccaaaaaccatgaggtgagtatcatcccacctagcagatgaggaagtcttagagaggcaaagtaagttgcttaatgtcatacagtggagagccaggattgccagcaagcctgcctggcaccaggacccatatttttaatgtttgcgtgtgtcacatgtacagcgtcttccattttatgtgcaaatattcatttctcacaccctctttggagaaagacaaggtggagaggaggaagttgtaagtgttgaaatgggagcactcacacatgtgagtatccaggagcccccaggaggctcagcagccatgtggccccacctacagccacctcatttctttttctgcaacataaaatgccgctcccgggtgctattgaaaatacatgttgtgtggtgctgacacagtccaaacatacctactgagcgtgctcagatctaattaggagcctgtctctgcttcctgagatatgaaagcgtctggaaacatgttttctttttcttcttgctttgtagagatacatctttttaaaaaattgcagaaagctttttggtttcttgttcaaaa

SEQ ID NO: 40653 - DNA, 1928 bp, Homo sapiens
tttgctagtttctaaaatgattaattgcacaaagaatagagatagcaggtttgtgtgaaggatgctcttcttttttgccacctcaaattccccgcttcctgcctccagcaatttctggtctgttctctggatgtcagttcattaccacattagtgtgttcattgtatgttctgttgccaggaaggtgctgccacagcggcccctgggaagtcaggatgctgctagttttcactgtaggtctatcaaagagaaacctgtgggattgggaagggatttggtcatcccagacatgttcggttttaaggaactctatgttctaagaaatatgttgacatcaacctttttatttccagcataggaaggaaaaggaaaaaagggaaagaaatattcaaattatcttggagctgtcctctcatttctattaggcacaaaatccatagttccttttcaaatggttattgacccaacaaaagattggatgtactggggctgagtattatctctgttattatcacattcttttgtcttctatgcactttcattcatctcctgtagaggcagatcacagattgattttaaaagatgtaacaatgtctcctcaatcgctgcagagtacattttgtcattgtgttgactgttcgtgcatttcagtttattattgctggtttcaaaagcatgtaatttttatcggaaagtaggttacaattaagggagttgcaggtagtgatcctgggtcctgttttgtctccttgataaattcaacttagaggagctggagaacacgtgtctggatttgtagctctcctgttccctcctgagtaacctcaggatatagcacctgggggaagacaaaggagaagcaaagcggatggatgcgggtgtctttagcaaaatgacaggtgaggcagggcgagaacagaggacggaggtgctggctgctagaagcttttcaagatggagctgtagaagcaagcctgtttttggtgagagaggcaaagtctcatgcccaggggagatttttgktttcttttaaggagtaataaagtctagggtggtctgtgtcatttcaccctttctagtaaaaaggattagctctcgttgaaaatgcctccttgtcccctgaatctgtcaatactccacctttgtcctcacccttgactttaaaaaccctgccacatgacttcctatgaatgcataaattaagcactttttttcctttgtagaaaaaaaaaatacacacacacacacacacacacacacacacacacacacacacatatgcacacagcaattaataaccagagtttattgagggtttacagtgttccggccatttctcattgcatacaaaatctcataaatcccacccaaaaaccatgaggtgagtatcatcccacctagcagatgaggaagtcttagagaggcaaagtaagttgcttaatgtcatacagtggagagccaggattgccagcaagcctgcctggcaccaggacccatatttttaatgtttgcgtgtgtcacatgtacagcgtcttccattttatgtgcaaatattcatttctcacaccctctttggagaaagacaaggtggagaggaggaagttgtaagtgttgaaatgggagcactcacacatgtgagtatccaggagcccccaggaggctcagcagccatgtggccccacctacagccacctcatttctttttctgcaacataaaatgccgctcccgggtgctattgaaaatacatgttgtgtggtgctgacacagtccaaacatacctactgagcgtgctcagatctaattaggagcctgtctctgcttcctgagatatgaaagcgtctggaaacatgttttctttttcttcttgctttgtagagatacatctttttaaaaaattgcagaaagctttttggtttcttgttcaaaa

SEQ ID NO: 40654 - DNA, 1928 bp, Homo sapiens
tttgctagtttctaaaatgattaattgcacaaagaatagagatagcaggtttgtgtgaaggatgctcttcttttttgccacctcaaattccccgcttcctgcctccagcaatttctggtctgttctctggatgtcagttcattaccacattagtgtgttcattgtatgttctgttgccaggaaggtgctgccacagcggcccctgggaagtcaggatgctgctagttttcactgtaggtctatcaaagagaaacctgtgggattgggaagggatttggtcatcccagacatgttcggttttaaggaactctatgttctaagaaatatgttgacatcaacctttttatttccagcataggaaggaaaaggaaaaaagggaaagaaatattcaaattatcttggagctgtcctctcatttctattaggcacaaaatccatagttccttttcaaatggttattgacccaacaaaagattggatgtactggggctgagtattatctctgttattatcacattcttttgtcttctatgcactttcattcatctcctgtagaggcagatcacagattgattttaaaagatgtaacaatgtctcctcaatcgctgcagagtacattttgtcattgtgttgactgttcgtgcatttcagtttattattgctggtttcaaaagcatgtaatttttatcggaaagtaggttacaattaagggagttgcaggtagtgatcctgggtcctgttttgtctccttgataaattcaacttagaggagctggagaacacgtgtctggatttgtagctctcctgttccctcctgagtaacctcaggatatagcacctgggggaagacaaaggagaagcaaagcggatggatgcgggtgtctttagcaaaatgacaggtgaggcagggcgagaacagaggacggaggtgctggctgctagaagcttttcaagatggagctgtagaagcaagcctgtttttggtgagagaggcaaagtctcatgcccaggggagatttttgttttcttttaaggagtaataaagtctagggtggtctgtgtcatttcaccctttctagtaaaaaggattagctctcgttgaaaatgcctccttgtcccctgaatctgtcaatactccacctttgtcctcacccttgactttaaaaaccctgccacatgacttcctatgaatgcataaattaagcactttttttcctttgtagaaaaaaaaaatacacacacacacacacacacacacacacacacacacacacacatatgcacacagcaattaataaccagagtttattgagggtttacagtgttccggccatttctcattgcatacaaaatctcataaatcccacccaaaaaccatgaggtgagtatcatcccacctagcagatgaggaagtcttagagaggcaaagtaagttgcttaatgtcatacagtggagagccaggattgccagcaagcctgcctggcaccaggacccatatttttaatgtttgcgtgtgtcacatgtacagcrtcttccattttatgtgcaaatattcatttctcacaccctctttggagaaagacaaggtggagaggaggaagttgtaagtgttgaaatgggagcactcacacatgtgagtatccaggagcccccaggaggctcagcagccatgtggccccacctacagccacctcatttctttttctgcaacataaaatgccgctcccgggtgctattgaaaatacatgttgtgtggtgctgacacagtccaaacatacctactgagcgtgctcagatctaattaggagcctgtctctgcttcctgagatatgaaagcgtctggaaacatgttttctttttcttcttgctttgtagagatacatctttttaaaaaattgcagaaagctttttggtttcttgttcaaaa

SEQ ID NO: 40655 - DNA, 633 bp, Homo sapiens
agtccgagaggtcaagtgagcagtgagccatgattgcagcactgcattccagcctgggtgatagactgagaccctgtctcaaataaataaaggaaaatgaataaaagaaatgttacatattgttgtggaagaaagctcactggcactagagaaacttctgggagctggcaagttctgattagtgggtgtcagtgatggtggtaggaaaaaccagtcttggagtcatggcgggtcgtttcagcagctactaggtgacactgtttttaaggttacagcttgccattttagcagctgggcttgcagaaaagtcaattcttggagcagatgctgtgtcctgagtgcttaccacctgactccgggccctcgactctggcttagttgggtatgataagaatggctcaatttgcataatcargtttcacactctgtatcccaatttaggtctctgtgacttctggaccatgcttcaggccactgccaaaccaaggtgtcctacaactcaccctggccatgtcattgtattgctaataactcttcagtgatttcccctgagccagttgacttgagggtttcagagttctccaagtctgctctcaaactgcatttccagactttatctgtaacttcttcccc

SEQ ID NO: 40656 - DNA, 635 bp, Homo sapiens
ttttttcactcataaacattccacatcactatatgttcttttacaatacatttcaagtaaatatgtcactgttaattacatggctatgatagtctgttagtgcattttctcttcatttcccttcataaataaattggaaggaaaatatttgggagaaagcagtaatcaaggtaataggagaggtttgtcaaaataaatgtcataaatgaggattgggcggtgactcagagacccaaaagctaagttcattctttaaaaataagatgtatcaccaaatcttaaggggggaaagaaaacgatgatggaatgaatcagaattacagaatgtcttctacatttctaacaaagttaacaaatagtcatttaaagaattaaaacaaaaatgaaaaaacaattaagaaatcattagctgactccaaacaaagacagagaaacaagtctgggtcctacactttaaaaagtggtkgtccaggaaagacacagaagactgctgtgtgacacagcagggagagcccctaactcctaatttagggtgatttattgcttccttcttttaatatttttgcacattttgaatttttataatggcatataacgtatttacaaaaataataaatccattacaaaccctttct

SEQ ID NO: 40657 - DNA, 1277 bp, Homo sapiens
aataatcacatcagggtaaatggggtatccatcacctcaaacatttattccaattatactcttttagttatttttaagtatacaattaaattattcttcattgtagtcaccctgttgtgctatcaaatactagatcttattcattttttctaattattttttgtacccattaaccatccccatttcccccccactgcaatgctttgtttttaaaagctgtattttagagtgttttgatcttgattgcttttattccagacgtgctgcgtgtggagcttggggaagcagcagttatttcaaaccccacaggcagtaggatgggagtcttaccatggtgtcagggttcactcagaaaacgggtggagtagaagaaaccagatgggcctcagttcttactagatgcaggcccatcctttcctcaagaagcctacatgtggattttcctgtaatgctgctgcgaagtatgaaaatcataacatttctatagaaagtaaattttagttgtccattataccaggatggctttgttcagctcaaccaggcagacaagctggagactgaggatggagactgagattcaaaaccatgaggcaggaggtggtgaatctcccaggcactgggggtgctcagaaggaagctggaccaccacttagttggaatggagacaggaggagagaatattcctgagttaaggagagagttgactcattaaccattgacagccttgatattctaggagggcgcctcccaagggsagggaagtgaacatgtaggggcaacttattggagaattggagaatcagaattgcaagttctttttgtcattgactttgtgccatttttataaaatgcctctggaactgaatgtgcttcctcactctcttttgcatatagcaacagagaggaatattattccatttacaggctttgtacctttgccaaattaagaggaagcttgcctttgtaatcagggtatggtagaaagcacaaagcatctactgcttatgatggtttcttctagatgaacttgtccatttcctgaacaattcagaaaactgaatttagagttgagatatattaagaggcctctgcctaagagtgcttttatgctggttggtttcaaaaaagagactagaaaagtaaaaccatttcttgttcaaagagtattccctagccaacatgcagcatgtcaccaaggctgtctagacactcaagggacttcacctatgccttgttcaagattctccagaaggtctaagtaggcccctttgaatgca

SEQ ID NO: 40658 - DNA, 1277 bp, Homo sapiens
aataatcacatcagggtaaatggggtatccatcacctcaaacatttattccaattatactcttttagttatttttaagtatacaattaaattattcttcattgtagtcaccctgttgtgctatcaaatactagatcttattcattttttctaattattttttgtacccattaaccatccccatttcccccccactgcaatgctttgtttttaaaagctgtattttagagtgttttgatcttgattgcttttattccagacgtgctgcgtgtggagcttggggaagcagcagttatttcaaaccccacaggcagtaggatgggagtcttaccatggtgtcagggttcactcagaaaacgggtggagtagaagaaaccagatgggcctcagttcttactagatgcaggcccatcctttcctcaagaagcctacatgtggattttcctgtaatgctgctgcgaagtatgaaaatcataacatttctatagaaagtaaattttagttgtccattataccaggatggctttgttcagctcaaccaggcagacaagctggagactgaggatggagactgagattcaaaaccatgaggcaggaggtggtgaatctcccaggcactgggggtgctcagaaggaagctggaccaccacttagttggaatggagacaggaggagagaatattcctgagttaaggagagagttgactcattaaccattgacagccttgatattctaggagggcgcctcccaaggggagggaagtgaacatgtaggggcaacttattggagaattggagaatcagaattgcaagttctttttgtcattgactttgtgccatttttataaaatgcctctggaactgaatgtgcttcctcactctcttttgcatatagcaacagagaggaatattattccwtttacaggctttgtacctttgccaaattaagaggaagcttgcctttgtaatcagggtatggtagaaagcacaaagcatctactgcttatgatggtttcttctagatgaacttgtccatttcctgaacaattcagaaaactgaatttagagttgagatatattaagaggcctctgcctaagagtgcttttatgctggttggtttcaaaaaagagactagaaaagtaaaaccatttcttgttcaaagagtattccctagccaacatgcagcatgtcaccaaggctgtctagacactcaagggacttcacctatgccttgttcaagattctccagaaggtctaagtaggcccctttgaatgca

SEQ ID NO: 40659 - DNA, 1277 bp, Homo sapiens
aataatcacatcagggtaaatggggtatccatcacctcaaacatttattccaattatactcttttagttatttttaagtatacaattaaattattcttcattgtagtcaccctgttgtgctatcaaatactagatcttattcattttttctaattattttttgtacccattaaccatccccatttcccccccactgcaatgctttgtttttaaaagctgtattttagagtgttttgatcttgattgcttttattccagacgtgctgcgtgtggagcttggggaagcagcagttatttcaaaccccacaggcagtaggatgggagtcttaccatggtgtcagggttcactcagaaaacgggtggagtagaagaaaccagatgggcctcagttcttactagatgcaggcccatcctttcctcaagaagcctacatgtggattttcctgtaatgctgctgcgaagtatgaaaatcataacatttctatagaaagtaaattttagttgtccattataccaggatggctttgttcagctcaaccaggcagacaagctggagactgaggatggagactgagattcaaaaccatgaggcaggaggtggtgaatctcccaggcactgggggtgctcagaaggaagctggaccaccacttagttggaatggagacaggaggagagaatattcctgagttaaggagagagttgactcattaaccattgacagccttgatattctaggagggcgcctcccaaggggagggaagtgaacatgtaggggcaacttattggagaattggagaatcagaattgcaagttctttttgtcattgactttgtgccatttttataaaatgcctctggaactgaatgtgcttcctcactctcttttgcatatagcaacagagaggaatattattccatttacaggctttgtacctttgccaaattaagaggaagcttgcctttgtaatcagrgtatggtagaaagcacaaagcatctactgcttatgatggtttcttctagatgaacttgtccatttcctgaacaattcagaaaactgaatttagagttgagatatattaagaggcctctgcctaagagtgcttttatgctggttggtttcaaaaaagagactagaaaagtaaaaccatttcttgttcaaagagtattccctagccaacatgcagcatgtcaccaaggctgtctagacactcaagggacttcacctatgccttgttcaagattctccagaaggtctaagtaggcccctttgaatgca

SEQ ID NO: 40660 - DNA, 1216 bp, Homo sapiens
ttcctgggtcagagggtatgttcaacagaaggctgcaatagctgatgtccatgtcaactacagcagctgagaacacatccaaggaaggaatacactttcaattccataattgactttttctgattgacccagcgaatcaaattgctaccatttcaaaggagaacttttcctttttctatttctttaagcatcagcctgttagtttgagtgttatctcctagcctattctgaatttcaacagtattatccattttttttaaaaaaaagtcttagagcttcatgttttaaacttgtaaagagtactttgaggatctttattttcttctttctgttaattattattatttaactaatttattttttattcacatattttcctctggccaagatccagagattctttaaagaattttttattagaagcttctagccataagaactagagtaaaataaattatcactttcataaatttatcatcaaagaatgaaaacaaaaatgtaaagaagggatggagaatgtgttttatgacaataacgtaacacgcttctaatatttggctataaaactgattgtaaacatattttagaaccagaaacatatggaattacatgattataggacagaaaaattcacagtggttgacttataatatcatgtggcataaaaatgttcattgctaagaatggagagaagaagccaagtatggaatgaaattggaagaggaacctcctctcaatttagttttggcaggacgaggagccccatatgtgccaagttttaactgaaagctaattataatggtcacattacgaattgtgcagaaagaggaaggttgttgacttggcaccttagatacataggtaactagattttttttwaaaaaaaaagcagtgtaagcattcctttttggtaaagagcatctcattaaactgttagctacagaacgtttaagcctgccatctttaactggtattaagaagtttaagaaattacaaatgaagtattttaaagaaaaagaaagttaaaacagaaataatgtgccatactcgataattgcaatagatggaatgaatttattcgtttttacttctgtgatggtttattctcttgcttaaaatatattatttaaatggatgacagcaaaatattttggtgtctctgatacaatggaaaacacctgataaagacacaatgacttctgtggcttcaaatgca

SEQ ID NO: 40661 - DNA, 542 bp, Homo sapiens
cgckgctttatataagcagcggaggagaaaagcagattgggatgaatgcaacagaagttgggcaagggagcaaataggaaaacggcaagtaatctgaaagatttgccaaaatcacagaagagttttaaacccagaatgtttaaccgtctcctcaagctcatgttctggaaatctgccttggtatccaccatagcaggcactttcagccctacagagtaggattacattggaaatctcaggggccctctggattttcttactctgtaaaaaccatagaacagcctccctgtaacctgagcacagcccaagtactagacgcattcagaggataaggaggaatgtcacttttaaagcaacacaaatagtaattccttgccattgcacaaggcccagagtgtgaatctatccggctgtgccatgcaccttgttggctgcctctctgaacaggatcttggctgcagctcagcagaagcaaggctgctattctccagtgccatctgctcacacaggatggattgctactgctgcccatgagagtcttc

SEQ ID NO: 40662 - DNA, 542 bp, Homo sapiens
cgcggctttatataagcagcggaggagaaaagcagattgggatgaatgcaacagaagttgggcaagggagcaaataggaaaacggcaagtaatctgaaagatttgccaaaatcacagaagagttttaaacccagaatgtttaaccgtctcctcaagctcatgttctggaaatctgccttggtatccaccatagcaggcactttcagccctacagagtaggattacattggaaatctcaggggccctctggattttcttactctgtaaaaacsatagaacagcctccctgtaacctgagcacagcccaagtactagacgcattcagaggataaggaggaatgtcacttttaaagcaacacaaatagtaattccttgccattgcacaaggcccagagtgtgaatctatccggctgtgccatgcaccttgttggctgcctctctgaacaggatcttggctgcagctcagcagaagcaaggctgctattctccagtgccatctgctcacacaggatggattgctactgctgcccatgagagtcttc

SEQ ID NO: 40663 - DNA, 1069 bp, Homo sapiens
actttcagaggcctctgaatgatgaggatggatggagggctgccacagcagaggcactgctgcctgggctgagggagggagggaggagagagtgggtcatggataagtgcggagtgggtgggtacccagattatctacaccctcccccaggaagcataagccatgggagctgaggcagtgaccagagatgcaatctggagaccaycagggctgtggtgcttggtggggagcagatagtggcctaccttcgcccagccatccttctgatgggcacatttgaggagcttcctgcccatctgtgaagccagttggggatgggggttggaaaagaaagggttgtcctttttctgagtgacagcaaggagggtaggggtctgatatggtttggatctgtgtcctcacccaaatctcatgttgaaatgtaatccccagtgctggaggtggggcctggtgggaggtgataggatcatgagggtggtttctcatggcttaacaccatcctccccggcctcccctgcctggtgctgtcctcgagatagtgaattctcatgagatctcactatctcatgagacagttgtttaaaagtgtgtggaacctccctcctctctctcttcctcctgttctggccatgtaagatgtacctgcttacccttcaacttccaccatgatcgaaagtttcctgaggcctccccagaaacagaagctgctatgcttcctgtgcagcctgtaaaactgtgagacaataaaactccttttctttatacattacccactcttaggcatttctttatagcaatgcaagaatggactaacacagtgttctgggaccatcatgtgtggccatgcagacctcgcattgcacaatggtattccctgcaattactccatgcagcaaccctgggattacagtttctttacaaaagtcccacatgcccacttcaacctggatagaaatgagggaagcagatggattccccaaaaggacctattgaactcaatagaggcacctctcttgatgcactaaaaagaccccacctcggcttacatggactgaggtagaactcagat

SEQ ID NO: 40664 - DNA, 1069 bp, Homo sapiens
actttcagaggcctctgaatgatgaggatggatggagggctgccacagcagaggcactgctgcctgggctgagggagggagggaggagagagtgggtcatggataagtgcggagtgggtgggtacccagattatctacaccctcccccaggaagcataagccatgggagctgaggcagtgaccagagatgcaatctggagaccatcagggctgtggtgcttggtggggagcagatagtggcctaccttcgcccagccatccttctgatgggcacatttgaggagcttcctgcccatctgtgaagccagttggggatgggggttggaaaagaaagggttgtcctttttctgagtgacagcaaggagggtaggggtctgatatggtttggatctgtgtcctcacccaaatctcatgttgaaatgtaatccccagtgctggaggtggggcctggtgggaggtgataggatcatgagggtggtttctcatggcttaacaccatcctccccggcctcccctgcctggtgctgtcctcgagatagtgaattctcatgagatctcactatctcatgagacagttgtttaaaagtgtgtggaacctccctcctctctctcttcctcctgttctggccatgtaagatgtacctgcttacccttcaacttccaccatgatcgaaagtttcctgaggcctccccagaaacagaagctgctatgcttcctgtgcagcctgtaaaactgtgagmcaataaaactccttttctttatacattacccactcttaggcatttctttatagcaatgcaagaatggactaacacagtgttctgggaccatcatgtgtggccatgcagacctcgcattgcacaatggtattccctgcaattactccatgcagcaaccctgggattacagtttctttacaaaagtcccacatgcccacttcaacctggatagaaatgagggaagcagatggattccccaaaaggacctattgaactcaatagaggcacctctcttgatgcactaaaaagaccccacctcggcttacatggactgaggtagaactcagat

SEQ ID NO: 40665 - DNA, 511 bp, Homo sapiens
ataactcctcccccgggaggctgctgttgaatggaaggtttttactcccatttctcaaggtgtaggcgtgtcgaacagtttctatttattgaagaagaaaacaagttgtttttttatttatatatagctcttgtttttgttcatcccacaagaaaaaacagggttcctcaattggaaatagattcctgcccttccgtaagacttggaaatgggagaatctgtgtgtgaattaggtcactgtggtatagagaaagaagttgggagaactcctctaaccccttttttttttaagcacaggagcatggtttgtatagctggttcactggctattatactggaaagcagaatgagtgggtcaagacaagtagaggtatagctagcatcataatcacaatagggccgggcacagtagctyacacctgtaattccaacactttggggggcagagctttgaggactgcttgagcctaggagttcaagattagtttaggaaacatagtgaggctccatc

SEQ ID NO: 40666 - DNA, 1164 bp, Homo sapiens
tacattgcttaatctaggttgtgaataagtggatgttcactaaatattttttctacttttctatatgttgaaagttttttacaataaaaagtctaaaattagttaatcaaacaagagacstttaaaaacaaaatgtagaaaggctacagaattcaaatatcccattagctgttgccaaaaaggaccaaatattattaagacttttcctaaaacatgattaaaagataaagactgccttttatcttaggcttataagattttatatatttttatcacaagatgagaactaagacacctgagaaacaaagggagtgaataaattcttgttgtagtcaattaaacataaagatgtgttggtgtttgtgtttacatcaaagaaatatacaatatttgtcaatgaagagaatgaaattctaaaaccaataggtaaatatgcacccagctgtctgacagatatatgcccccaggggattgatacttgataaggaaaaatggcacttccatacccaaaataattataaattatataaagaatggagctaaattaaatacagttatggattaaaatgtattatagatacatgtgtatagagtatttctggtaagcagaataatggttccccgacgatgtccacatcttaatccccagaacctgttactttccatggccaaagggactttatagatatgattaagttacagatcttgagatgggaagattactctaaattatttgagtgggattactgtactcacagggtacttaaaagagggaggcaggagaatcggagttagaaaagatgtgacaatagaagcagaggttgaaatgatatggggccacaagccaaaggatgtgggcagcctctggaaactagaaagagcaaaggaatggattatttccaggagcctccataagaggcatagccctcccgacccatttcagacttttgagttctacagctgtaaaacaataaatttctgttgttttaagccactaaatttttggtaatttgttacagcagggttagaaaacataaagtgtattataagtgagggtgttgtagaggttagaaaagagataaatatatattaaataaaggagtcttcatgggagaaatgagatatgtgaaatatattaacagattttagagactagagaggctc

SEQ ID NO: 40667 - DNA, 369 bp, Homo sapiens
gatccagccatgtcagcttatttcagatctttaatacaacatgagccgtcctttgtacctgctgttccccatccctttgcctagataagtccygctcatcttctgggttgcttcactgtcccccggttggctaatctgcttcttttgtcacctgtgtaacaaattccctgcatcacattctctttgcttgaaaggctgaaagttttctgttttcccggtttggccccgaatgatgaggtgaggggatgatgcctgggtactggtggtctccaccggagactggggagggggacacgagctttcctgagcctctggctaaagtcaggtttcctttttcatacatcctcaaacagccttccctttgaagct

SEQ ID NO: 40668 - DNA, 1212 bp, Homo sapiens
tgttgatctgtgaccttgcccccaaccctgtgctctctgaaacatgtgctgtgtccactcagggttgaatggattaagggtggtgcaagakgtgctttgttaaacagatgcttgaaggcagcatgctcgttaagagtcatcaccactccctaatctcaagtacccagggacacaaacactgcggaaggccgcagggtcctctggcctaggaaaaccagaggcctctgttcacttgtttatctgctgaccttccctccactattgtcctgtgaccctgccaaatccccctctgcgagaaacacccaagaatgatcaataaaaagaaaaaagaaaaaaaaaaaaagaagaaggtactgtagttctatatatactgacactgaaagcatattaaattaaaaaaattgcaaatcatatatattatgattccatttttatttgtttacattttagacagattggatcatggatgaatggaaaaatgtctagaaagaaatacaatcttaacattgttacctctggagagtgggataagcaggaacagaagatttatatgttaccttttattgagtcaagtaataaaaatgtagtcccatccctaagcacagcaacacttctaggtaagaaaaaaatttcacaggagatcaaaagggaatggccgtagagactaggggaaaatattttaaggtcaccagggctaagagagaaaggagagaagtgtagctaatggtttcaaacatggaatgagagatctattaaaaacaagaagaggtaagtatccaatagacagagagcgtgaatagataattcttaaaggggaaaaatcacatggccaatacacatcaaaaagaaaaagtttcactcttactggcaataaagatttttttatgtttgcttattaattcagcaaaatttcagaaagacaattttcagtttttaaaaaggatttaagagatattctcatattttgttggcaaatgtaaattagtaaggcctgttaaaaagcaatgtgacaatctgatttctaagaaaactgaacttcacagaacttatcacaattgtaattaaaaaattatgtgatacaatatttaatatacacttcccctgccgaaataagttccaggagaaaaatggccattgtctaccttcttctcagccatacctcaagcatctagctgggttgatggatggatagatggataaatctacattgta

SEQ ID NO: 40669 - DNA, 568 bp, Homo sapiens
tggcagaaagaatgagtgagggactttgcaraagtgctcggcggggagcatagggtatggtaaactgaagaatccagggcagctgcaggctaggaagaagatgaacagagctgtttaggtgagttctcatgttcccatatgccatatctctagaacatgtcagcagagtaaggacacttcttcccacaagcaaatggataaaatctatctgtgtggccattctgaaaccaaaagattttgtttcagctgggtagagattatgctggtggctttggcctctacatgaatgcagcagaatattcctcagtagctatctatttattttatcattcgccacacagtgtattgccattgtatgagaaaatcatttctggttaaaatgaatgcttacaaagcagcattttatatcttttcccatctgtgaggaatttgtcacatcttaatataaaatcccttgttgccttaaagtttttaagaccaaacacattatcgttctaaggggatgtttgttcttgtccatcatcttttttttttttttacttttaaaaccatgtttatttatttttgt

SEQ ID NO: 40670 - DNA, 568 bp, Homo sapiens
tggcagaaagaatgagtgagggactttgcaaaagtgctcggcggggagcatagggtatggwaaactgaagaatccagggcagctgcaggctaggaagaagatgaacagagctgtttaggtgagttctcatgttcccatatgccatatctctagaacatgtcagcagagtaaggacacttcttcccacaagcaaatggataaaatctatctgtgtggccattctgaaaccaaaagattttgtttcagctgggtagagattatgctggtggctttggcctctacatgaatgcagcagaatattcctcagtagctatctatttattttatcattcgccacacagtgtattgccattgtatgagaaaatcatttctggttaaaatgaatgcttacaaagcagcattttatatcttttcccatctgtgaggaatttgtcacatcttaatataaaatcccttgttgccttaaagtttttaagaccaaacacattatcgttctaaggggatgtttgttcttgtccatcatcttttttttttttttacttttaaaaccatgtttatttatttttgt

SEQ ID NO: 40671 - DNA, 568 bp, Homo sapiens
tggcagaaagaatgagtgagggactttgcaaaagtgctcggcggggagcatagggtatggtaaactgaagaatccagggcagctgcaggctaggaagaagatgaacagagctgtttaggtgagttctcatgttcccatatgccatatctctagaacatgtcagcagagtaaggacacttcttcccacaagcaaatggataaaatctatctgtgtggccattctgaaaccaaaagattttgtttcagctgggtagagattatgctggtggctttggcctctacatgaatgcagcagaatattcctcagtagctatctatttattttatcattcgccacacagtgtattgccattgtatgagaaaatcatttctggttaaaatgaatgcttacaaagcagcattttatatcttttcccatctgtgaggaatttgtcacatcttaatataaaatcccttgttgccttaaagtttttaagaccaaacacattatckttctaaggggatgtttgttcttgtccatcatcttttttttttttttacttttaaaaccatgtttatttatttttgt

SEQ ID NO: 40672 - DNA, 538 bp, Homo sapiens
gacatctttttcccttaaatatttactttcttgaaaaacctaacctaattgtttgtagtaattaccagtgattttttaaaaatcccacattcaggtactttttttcaactatcatttctttattatttgaacttgtactataattcctacagcctgtttttccaccatggaaatttttaagattcctaaattctaaggtttctaagttttggtcctgaaggtgattttaggaccattcagggacaggatttttcttttccatatgcagtcaagggattcccactctctgggaatcctctaacttgtaagatttagctgaaaaggtcacaggcctggattttcatatcatctaatcacatactacttasaaattctcacaaatcaaaattttcctaacaaccactgggaccctgaaatgtattatgggttgttttttccttattgtggatatttagatggtctctaagatataaagcaaaccatacgtattgcaccatttctacattaaagctgcatctttgtaggacacaggcggtgt

SEQ ID NO: 40673 - DNA, 596 bp, Homo sapiens
  misc_feature (1)...(596): n = A,T,C or G
atggtaaaagagacatgaaaactaaatgcaatataagaatattgattgtatgccaattctaaaaatagccatcagatatcttgaggacaggtgggaaaatctgaatattgaccaattgtatattatattagagaaataatgttaacttttgtagacatgataatgtggttaggcaggagaatatctttttttaacttttaagttcagggtaaaagtgcaagtttgttacgcagrtaaacttgtgtcatgggggtttgttgtacagattatttcagaacccaggtattaagcctagtacctattagttatttttcctgatcccttccctcctcccacccttcaacctgtgataggcccaagtatctactgatgcatgtgttcattgttctcttcatttctctcccacttataaatgagaacatgtggtatttggccctctgttcctcccttagtctgctaaggataatgggctctagctcactctagtttcagcaannnnnnnnnnnnnnnnnnnnnnnnnnnnnnnnnnnnnnnnnnnnnnnnnnnnnnnnnnnnnnnnnnnnnnnnnnnnnnnnnnnnnnnnnnnnnnnnnnnna

SEQ ID NO: 40674 - DNA, 511 bp, Homo sapiens
ttaatccattttgaattaaattttgtataaggtgtaaggaagggatccagtttcagctttctacatatggctagccagttttcccagcaccattaattaaatagagaatcctttccccattgcttgtttttctcaggtttgtcaaagatcagatagttgtagatatgcggcattatttctgaggactctgttctgttccmttgatctacatcactgttttggtaccagtaccatgctgttttggtgactgtagccttgtagtatagtttgaagtcaggtagcgtgatgcctccagctttgttcttttggcttaggatcagtctttccttttcatgttgctggctttcttcaaatatctggtcattgtggattactcattaaaattttaggaataaaacaacagagaggctgactgggaagctagtgtatctgggtgggttgtcagctgacagcaactgcttcagtgtgggcagcagcacttgcttcattaaactggatgtttcccaagtgc

SEQ ID NO: 40675 - DNA, 624 bp, Homo sapiens
gggctacatgaatactctaaaggtatgtcttaatgttctgaaaattccttcatgatagcaaagctggcattttataattttcagagctataaatcatttttaaaatcatgatgatactcaaagcagatgtgaaaacatatgtttgccacagttgtataaactgcttacttgtcacagttaataaatgttgacacttctactttaactcattcccttttaataactaaactctatttcaggaaaatatatttttttcttaccgtcacaaatrtaactggaagaacttgacatagagaatcccatttttttaataaaaacctttccactataactggggtgcagtttaatatgccactcttgcttattaatgtcctcatcaggatatgtgaccaacttatttgagttaaacaagtaatattctaccattccacagcaagaaattcagaaataccagtgcatactactatatattttatgaaaatcagatactgtacatctgtagtaatgcttgaactgatttttcataagacacaatagtgtatacttgagtgctgcagtacgtgggacagtcccaaatgccattttgacttatggggtttgcagctctgattgtatcatatgcat

SEQ ID NO: 40676 - DNA, 624 bp, Homo sapiens
gggctacatgaatactctaaaggtatgtcttaatgttctgaaaattccttcatgatagcaaagctggcattttataattttcagagctataaatcatttttaaaatcatgatgatactcaaagcagatgtgaaaacatatgtttgccacagttgtataaactgcttacttgtcacagttaataaatgttgacacttctactttaactcattcccttttaataactaaactctatttcaggaaaatatatttttttcttaccgtcacaaatgtaactggaagaacttgacatagagaatcccatttttttwataaaaacctttccactataactggggtgcagtttaatatgccactcttgcttattaatgtcctcatcaggatatgtgaccaacttatttgagttaaacaagtaatattctaccattccacagcaagaaattcagaaataccagtgcatactactatatattttatgaaaatcagatactgtacatctgtagtaatgcttgaactgatttttcataagacacaatagtgtatacttgagtgctgcagtacgtgggacagtcccaaatgccattttgacttatggggtttgcagctctgattgtatcatatgcat

SEQ ID NO: 40677 - DNA, 624 bp, Homo sapiens
gggctacatgaatactctaaaggtatgtcttaatgttctgaaaattccttcatgatagcaaagctggcattttataattttcagagctataaatcatttttaaaatcatgatgatactcaaagcagatgtgaaaacatatgtttgccacagttgtataaactgcttacttgtcacagttaataaatgttgacacttctactttaactcattcccttttaataactaaactctatttcaggaaaatatatttttttcttaccgtcacaaatgtaactggaagaacttgacatagagaatcccatttttttaataaaaacctttccactataactggggtgcagtttaatatgccactcttgcttattaatgtcctcatcaggatatgtgaccaacttatttgagttaaacaagtaatattctaccattccacagcaagaaattcagaaataccagtgcatactactatatattttatgaaaatcagatactgtacatctgtagtaatgcttgaactgatttttcataagacacaatagtgtatacttgagtgctgcagtacgtgggacagtcccaaatgccattttgacttatggggtttgmagctctgattgtatcatatgcat

SEQ ID NO: 40678 - DNA, 551 bp, Homo sapiens
agaacctgcaattccctgccaaatggctccacacctgctcctgagtctgtgtaagcttcttctcagtacttcctttagagaatggactgtcccactggggttgtggacagagcttggacatgcgggctgggtgtccacatgtgtgtgagtccctcaagggcaagacagagcmcagtgtgggaagaggtggggggcagcctgggggtgggaagtcatccttctccatagctccatttgccagtgcaagctcccaggagcctggaaattctaaatttaaacttctcaggcttatgaaggtatatttatcaaggtaggagggtagagtatatttttcttaacagtttgttaacttgatttataattttaaccatcgtgctcctggctaagtgtttggggtgggcccaagtgcaggtggtggtgagagcaggctctatttatcatctaagtgtctcagagaggccaggccaagggccatgctttcagactggcaagccaagtgcccagtgaggaggcagacactgcgtgtcttctccaggccctgcagaaaaggc

SEQ ID NO: 40679 - DNA, 590 bp, Homo sapiens
atccatgtcacaccccactcctcgcccacatcacaggacaagtcagtatctccagggtgttctgtgtcttctaccagacctctgctaggccaggccagaaggctatggttaaaagtcaagtgtgatcaaacactgggagcagccacgtatcatgagaacagaactctgggtggctcacatgatcaacaaggcttcccaggtcctgttaacaattgatccaatttcacctcccttttttagtcctggtgtagctcagccctcaagcmgtcacttttaagatagccagccccaggctcttctgatggcccccggtgctggatattgccacccggtacctattttgagatatggctactcctccacgaatgggctcttcttcctgcaaggagtctttcccctgacacccactcatgcacacgtatgtacagtcagaccactgcatattatccagtggcctctcctctccatccttgaggaaatgcagggactatatggagccctcccaaaaaaaatccctaactgtgcacacggaaagttttctagaatgaaagccgtaaatggtgcagtggccatttatggctgtaatccca

SEQ ID NO: 40680 - DNA, 1346 bp, Homo sapiens
tgcttttcattatttaatgtagattacaagttctatttgacatgtatataaaaatttgatcatcaaaaaggagaaaaccagatacttaatgcagtttaagttgtaaaaacatctttttaaatttttttaattcaaatggaataaataattagaaaataatgaagaaattaactttttgattaaaagtttagaagctagtctcttacataaaattcatttttagattaaaaaaaaaagacaaggcaaagatactaggaatgaacacccgttctctcctgcttcctctttctcttcagttaatgcacctctccctgagtattatgagaggttgtggtgtttctaatccagaacactctggcagggttttcttggtagacagttgtctcacccaggatgcttactctatactacttgttcatggctgagcagcaaaataagaggtccatggtctgacctgcacagcaggagccatgaccttttttctccctacagcagtaacaaggcaagagcatattaaatacacctaagtatttctggacaatatttttctatttaaggataaaacccatctggcaaataatctaatttttccttctgtttttgtttgagtttgtttttttcaatgtagggtagggggacactcctgtctctctttctttggctatttccacattcacacaaataaaaaattcagtctcattattttcacagctatttgatatgtattcacacacttatgtatgaaaataacagaatggggcaaaaaacaggaaaaaagatctagaattgaggttgtaatgtttcattgtatgaatatgaaaacaagaaaaacacattaggggtttttgtttttgcaggaggcggcatagatcttgaagcactaggaattttggttcaggaagtaaaatgttttaaaaggattccacccatattagagattccaccatgtggttttcactatttacagaggatttatgaagtaaaatccagatacagcatatcctgttataggtaagtgagccttttaatacttaaaatagtaaagctgcattgatacacattaagtgttcttatagatccaataaatctgcccctggccaaaataaagttatttgataatcrtaattacaaaaacaataccagcactacataacttaatttcattttgtagaggttactagtctaatacataaaaattagacaatagacacattttctttatttcataactttttcataaatatatgtgacaacttggcatcaatattagaatcagcctaagacagagctgattatactctaatacatgcttttattcagtcacagctattatggaaaccaaggca

SEQ ID NO: 40681 - DNA, 1372 bp, Homo sapiens
tgcattgttaagtgattgtcactgtgcaaacatcagagtgtacttacacaaacctagatggtataccccaccacacacctctgccataaagtatagcctattgttcagaccaccacgtatatgcagtctgttgttgactgaaaagttatgtggtgcatgactgtattaaaaaaattaaattgctgataccaaatctattggtaactatcgggaatatctgaacaaacaaaatagagtagctattataaatatcaattgtttggaaatcatctgtacatacctgatatccagtttcattagttttcactgtcatcaagtcatcttgtttacttatgatcttctgcagctaaaaagattacaaacatgagtttacatgtgtgcctaccagatttttcaaaacaacctaaaaaatagatgccaacttattgttataaaatatatactagttatttgctaaatattaacttctttttttttttgagatggagtcttactctgttgcccaggctggagtgcagtggcgcaatctcggcttactgcaagtttcgcccccaggttcatgctattctcctgcctcagcctcccaagtagctgggactacaggcgcccgtcaccactcccgttaatttttttttttttttgtatttttagtagagacggggtttcaccgtgttagccaggatggtctcgatctcctgactttgtgatccacccgcctcggcctcccaaagtgctgggattacaggtgtgagccaccaccttaaattttttctaatcataactcctattatctttttctcttagacaatgcaagaatcaaaggacaaaagagataacaaagtattaacattattattactacaatcttctactaagaaagctagtttacttaatagatacatgttcttaggcagcactctataagaacttcaagattatgctgtcctttcaagataatttttattcataattagttgtatcactagtttatggtgacattttcaagtatatagtttttttttttttttttttgagacrgagtctcgctctgtcacccaggctggagtgcagtggcacgatcccggctgactgcaagctccgcctcccgggttcacgccattctcctgcctcagcctcccgagtagctgggactacaggcacccgccaccatgcctggctaatttttttgtatttttagtagagatggggtttcaccgtgttagccaggatggtcttgatctcctgaccttgtgatccacctgcctcggcctcccaaagtgctgggattataggcttgagccactgtgcccggcctatagttttaaaaaagctatttatatcatacacatagtcttccttttccctttatgca

SEQ ID NO: 40682 - DNA, 793 bp, Homo sapiens
cagaaatagctctgtctagccaatctgtactctttgtatatatacatataaaaaaagtactgagccctatcaggtgtcctaggttagcatacatatgaactattagtaataaattttcaagtttagaattgtacagcttttattttacaatattggtactgttttagcagattattgtcatgtcaaaagactttaatatggctccgaactcttgtttaatctcatcattagtattattcaccatagacttaaacacaagcaggttcattgattgcttgagctacctagctgtagatgttttcttctcgtttaatgtagacattcacaatatcattctctctcatatatacctctacgcctttgcataatcctcrtcttctaaagataatgttctgcagttttcctttacttgacttatatttgttcatcttctgaaatttgggtcattttattccatttttatcacatgcatatccattccatcaacaaacatttattgggcagatggcatatgccaacacacagagattaaaacaaacaaacaaacaacccagccctgacatttatgagtttacagactggtggagaggcagagaagtaaacagcaatgtatatcaggtgtaatagaggtctgtatgagaactgtggtgaggcaacacaggggaagccctaacctagctgtaacctcatcccagtaaatgcaaagtggaagcaacattctgctgccattacccacacctatattacatacccacacctatattacatacccacaccagtttatacatttaaa

SEQ ID NO: 40683 - DNA, 1861 bp, Homo sapiens
  misc_feature (1)...(1861): n = A,T,C or G
tgcattaaaaaaaaaaattctcacattctgaaggcaccatagagatgtttggtgattagaatgaggaaaggaggagaggggatggcctctctggagggctaagaggcaggagtggagtgaggcagtagttcccttagaaggcagagacaagaggagcccggggctaaggaagaggaagacttgcccttctctcagctgtccntggcaaggacgaaaacagctcagctcaaatgctgggctcctggcatggcttcctctggtaaaaacgttttctgacaatgagatgtgaggttggaccatgtcctcttggttaattaacatgtagctgtgatgccttctctgtggcgggcacgccttgttggtatcaggctccgccagccctctagggtatattagttactgtggggggcagtcttaacctcgctatttctcggccaggagaaagaagcactggtgcatcccggcaaaacaaaaggtcggcggtctcacannnnnnnnatcacaatgccccttcacctacctcagatcttcccctatacccacgccatacacccacaccatggggcagagagcagctccccaaacagcaccctggatcaatcaagcccagagctgtttccttgggaagtgttctagatctatacctatggaagataatcagcccatagccaacaaagggttttgctgcttcaaataacaaagaaatagagggaaagnctatataggaaaagtactgtactagacagtaaaagaaaaaaatgagaccatggaaatgaacttcctattagaggcctgacccagggcctttatgactcttggtatctgctcctgagcctcccagtttaaaaaactgacaggagttcagcagataaatttgacctagagttgaaagaagacatcaaatttcccaaaagacaatggcttccagggacacttgtgggggtttctgttacttcatagtttgaacctttaaatcttatagtacaggggatacgatagaactctcttagattcgaataaaccctcagattctatttctacccctcaaaacaacagccagggcagwctttttcacaattctcatgctcatcttggctgatcctggtgtgttttctttgctttgattttcacatgtaccatctcctgcagctaagcttctgtgttaacctcctgtcatcgtctctttcatgggcagcccagtaagccacacctcctgagactcatgcgcttgtacagtcttctcctcttgaagctgggctggccctgtgactgttttgagcaatgcatacaatgtggtgaaaattatttctgggactcctgagtccaggcaccaagatcaggaagcttctcctcttgtatttaggggaagctggccacattgtaagaagtgggactatgctgagactgtcatgatgacagaaaacccaagctagccaggtggagagatcacacagaaagagatgcctggccagctgtgacctgatatgccatcatgtaagtaaaaagtccaccttggatggtccagctcatagatgccatgtacagcagaggtgagccattcctgccaagccctgcccaattgcagaattgtgagtaaataaataattactattggtgtaagccactatattttgggatgagttgttacatagccattgaaaaccaaaacacctcgcgacaccaagccatttccataacttcctgcagacggaggcgaaggacctacattggaaacgtacctgacaagctcaatacagcnnnnnnnnnnnnnnnnnnnnnnnnnnnnnnnnnnnnnnnnnnnnnnnnnnnnnnnnnnnnnnnnnnnnnnnnnnnnnnnnnnnnnnnnnnnnnnnnnnnnggc

SEQ ID NO: 40684 - DNA, 532 bp, Homo sapiens
  misc_feature (1)...(532): n = A,T,C or G
tcagccttgctttagctagcattaactcacagatagtgtcacatatcaccatggactgtgcactcacatatagacattgttggatgctattatttcttggcactggccactaattcctgggcctcttgagaaatgtggagttgtgcttttgctctttgaaaccccctgggaccccactgtgctgttccctctgacatgtcagctgtggcaggtccaggttcattaccgatttccctgggctctctggaaatcgggccctgctwatttgcctgcatcccagctgcccgagctccaccccctttctggcggctgctccctgcagctttctgatcatattgcagtagctcctaattganccaggatctgtctttctttttctctgtgagtgaagctcagtgagtggatcattttgtattaatagtttatttaatagaccttccatttgtcaatgggcttccatctgcctgttctttccttttagtctggggcaggtatacaaaaaaagcccttaattttcctctcccttatgtgt

SEQ ID NO: 40685 - DNA, 596 bp, Homo sapiens
gaggcaggcagatcacgaggtcaggagatcgagaccatggtgaaagcctgtctctactaaaaatacaaaaataagctgggcrtggtggtgtgtgcctgtagtcccagctacttgggaggctgaggcaggagaatggcgtgaacccgggaggcagagctttcagtgagctgagatcacaccactgcactccagcctaggtgacagagcgagactctgtctcaaaaaaaaaaaaaaaaaagaaagaaaatttagtaaaaatggacaatatggtcaaggtgacagatcagtccagttttgttcaggggttaagaagaaaaccagttaaatctctaccagacaagacagagttggcacatctattatttacctgcaatttttaaagatgagagatcccatgaaagtttctacaagaataatgcaactacaaagggaatttgtgtctgtgtaaaacaagataaaagtcaatccaaaaaaaagtttagacaaaatatctatgaatataataattaaccctattttcaaagaaaagtggatattatatctaatttataaaaatggatgaacattatctttaccaaaaaaatcttcggatttac

SEQ ID NO: 40686 - DNA, 1171 bp, Homo sapiens
taaatttagataaatatgttctcttaccaacacctcagtcaagacataggaccatttttatccccctaaagttccctccagatttttttttgccatcaattctccttcatcccatccctagacaaggcagtttttttttggtgtgaaatgaatgaatcttgaattgtcagggactggccccagatttgcggagagctattcacatgtgtgcatagcaccctactgttcacaatgcctttccactttctgtttttttctttggttttgttttgtttttaatggagtctcactctgtcaccaggctggagtgcagtggcacgatcttggctcactgcaacctctgcctcccgggttcaagcgattcttctgcctcagccttctgagcagctgggactacaggcgcgtgccaccatgcccagctaatttttgcatttttaatagagatggggtttcaccatgttggccagactggtctcagactcctgatctcgtgatctgcctgcctcggcctcccaaaatgctgagattacaggcgtgagccattgcgcccggccgcctttccactttcatctcatgtgcctctcacatatgaggccatggatgctcagatggattaggtgacatgtgacagaaggtctccaaagcaagaggagaccttttggatgctcaagttgcctccccatctggggtcccaccctgggccagggaggaacccgtccctgggccagggaggaacccgtccctgggccaggggcctcacatggtaggcaggctgtgggtgttccaggcttgggtgtgccacgaagcctggggaaaggccactgtggccccatctctaacccccctggcctaggcctccagcccagccaagaagatgcctctggtgtccagatgccagctagctccagctagctcctacctgggcagarcaagaccctgcagtttgggctatgagaaaaacgacaagaggttatcagcatcacttgcttctggttgctcagagagaatcagacactgggtgccaggagacttggcctttggccaggttctccctctgcctcactgtgtgcccttagcaagtcactttccctctctgggcctcagtttccacctctataaaaggaaactagtgatccctaaccagcatgacttcaactccacctgatgatga

SEQ ID NO: 40687 - DNA, 2217 bp, Homo sapiens
tcctccagacaacccgggacacccaaaagctccagccctggaggatgtgygcctgggggcctaaagcacggcctacagagagagacaggagctcagcggcgggcccgcacccagcacaggagacacagtgatggagatgagcaggggagccttggcaatgaaaccctccttcctctgaccctcctgcctcgcaacaggctgaccacctctaaccttggcctgcgctgggccttctggggctggggggtgtcctctggtgtcacagccacagaggagctctgccctctgtctgctggggaagcccttgactcccagggctggtgagcagctgccagaggctgggagggagcaccaggtgggggtctcaccacgtgaaggagggcaggggcagggagccctacatacctggagtgactctgtgtccagggacttcctctttaactccagctgtgtcagctgcaataactcagtttctattaacttaatctaaacagaagacgagacagggtttttttttactcacattaaccacagttcagttttgtgctgctactctctggtgaccaagtgggtctaagaagcctttctggggaggctggggaggctctggaatgaggggaacctgcgggcctgggaacctcgtcaaggggcttgaacaagaattcgttccttcatggcctcgcgttcctggggtcatggacgtgcttgttgtggccaaaattgtttaccaagaggccagcacaggatctctcctagagtgggatcaggataaaggcttgtgcaatggagagggggctttccttggggattcaggccagagtaaagcacagacagagctatcacccagtctcctgctggtcaagttctcttgtccctcgcatcgctgttgcaggggagagcagagggtagtggaagtgactgagtaacagtggtagtagtagctggtatgtcttgagcacctactatgtgctaggcctgtgctgcacacttgatgtatcatatttcatcaattctctggctgctaggaggtattattgcctccattttatagacaagaaaactgaggctcagagaggttctcacttgctcaaggacacagagcaggtaagggagagatccctttctctgggatgcctcagctcagggtttaagggcaatagctgacctggtcaaaaccatctgcagtgagaatgtggggggccctcacaggctctccagggtgtgtctaggggattttagccctgggcaggggtgggggtcagaccccatagccagtacttctctatcctgtgcccatgaccctgtgaccctcatccctaagtccctatgacaccaccaacccctggtcagaggaatgagcttcatgtccggcaatgtggaattgaaattaaagagggaaattaaaaaggtaaattggtccaaaaaaagaaagaaagaaagaaagaaagaaaaatagagaaagaaaaaaaccatgcaaaaatgcaaaattcagtgtgctgaacatgatgcaggagtactcccatagcctgacgctcacttcagccccagccccagccccactccacaggcggtgaccaccaagccgtgtaggtgggcttgcccaaggatagcttgaaggtcagcagccggcctgcggggggtggggggtatcttgtcacatgagggagggtctaagaggaggaccgcctcctcctgggccgaggtcacttttcagcaggcgtcaggaccacggtggctcacagctccccctgccctcttctgggggaaatactatatgcccctgagacgcctctgtctgtctgagctgtaggagcgctggggcctgcgccggctgcttttcccagtggggaagtcctgcctggagcagggacagcagaggcagctggagcagtcaaagccacacatcagcaccagcctccctggcccaggcgtggtggagacccgcctcgctggcaagaccctcgccagaccccggaataggaggtctctagacaccctcccagcagccccgacacaaggctgggagcaaagggaggttctgagggcaaggcctcgacctcttgttgggctagcaagccaaggagctggggttcaaacctcaactgctgcgacctgccgccctggagggccactctgcaagtctctgagagagcaggtccagggaccccagccccagcgctcacctggctcctgatctgccgatgcatcaggtctttc

SEQ ID NO: 40688 - DNA, 2217 bp, Homo sapiens
tcctccagacaacccgggacacccaaaagctccagccctggaggatgtgcgcctgggggcctaaagcacggcctacagagagagacaggagctcagcggcgggcccgcacccagcacaggagacacagtgatggagatgagcaggggagccttggcaatgaaaccctccttcctctgaccctcctgcctcgcaacaggctgaccacctctaaccttggcctgcgctgggccttctggggctggggggtgtcctctggtgtcacagccacagaggagctctgccctctgtctgctggggaagcccttgactcccagggctggtgagcagctgccagaggctgggagggagcaccaggtgggggtctcaccacgtgaaggagggcaggggcagggagccctacatacctggagtgactctgtgtccagggacttcctctttaactccagctgtgtcagctgcaataactcagtttctattaacttaatctaaacagaagacgagacagggtttttttttactcacattaaccacagttcagttttgtgctgctactctctggtgaccaagtgggtctaagaagcctttctggggaggctggggaggctctggaatgaggggaacctgcgggcctgggaacctcgtcaaggggcttgaacaagaattcgttccttcatggcctcgcgttcctggggtcatggacgtgcttgttgtggccaaaattgtttaccaagaggccagcacaggatctctcctagagtgggatcaggataaaggcttgtgcaatggagagggggctttccttggggattcaggccagagtaaagcacagacagagctatcacccagtctcctgctggtcaagttctcttgtccctcgcatcgctgttgcaggggagagcagagggtagtggaagtgactgagtaacagtggtagtagtagctggtatgtcttgagcacctactatgtgctaggcctgtgctgcacacttgatgtatcatatttcatcaattctctggctgctaggaggtattattgcctccattttatagacaagaaaactgaggctcagagaggttctcacttgctcaaggacacagagcaggtaagggagagatccctttctctgggatgcctcagctcagggtttaagggcaatagctgacctggtcaaaaccatctgcagtgagaatgtggggggccctcacaggctctccagggtgtgtctaggggattttagccctgggcaggggtgggggtcagaccccatagccagtacttctctatcctgtgcccatgaccctgtgaccctcatccctaagtccctatgacaccaccaacccctggtcagaggaatgagcttcatgtccggcaatgtggaattgaaattaaagagggaaattaaaaaggtaaattggtccaaaaaaagaaagaaagaaagaaagaaagaaaaatagagaaagaaaaaaaccatgcaaaaatgcaaaattcagtgtgctgaacatgatgcaggagtactcccatagcctgacgctcacttcagccccagccccagccccactccacaggcggtgaccaccaagccgtgtaggtgggcttgcccaaggawagcttgaaggtcagcagccggcctgcggggggtggggggtatcttgtcacatgagggagggtctaagaggaggaccgcctcctcctgggccgaggtcacttttcagcaggcgtcaggaccacggtggctcacagctccccctgccctcttctgggggaaatactatatgcccctgagacgcctctgtctgtctgagctgtaggagcgctggggcctgcgccggctgcttttcccagtggggaagtcctgcctggagcagggacagcagaggcagctggagcagtcaaagccacacatcagcaccagcctccctggcccaggcgtggtggagacccgcctcgctggcaagaccctcgccagaccccggaataggaggtctctagacaccctcccagcagccccgacacaaggctgggagcaaagggaggttctgagggcaaggcctcgacctcttgttgggctagcaagccaaggagctggggttcaaacctcaactgctgcgacctgccgccctggagggccactctgcaagtctctgagagagcaggtccagggaccccagccccagcgctcacctggctcctgatctgccgatgcatcaggtctttc

SEQ ID NO: 40689 - DNA, 2217 bp, Homo sapiens
tcctccagacaacccgggacacccaaaagctccagccctggaggatgtgcgcctgggggcctaaagcacggcctacagagagagacaggagctcagcggcgggcccgcacccagcacaggagacacagtgatggagatgagcaggggagccttggcaatgaaaccctccttcctctgaccctcctgcctcgcaacaggctgaccacctctaaccttggcctgcgctgggccttctggggctggggggtgtcctctggtgtcacagccacagaggagctctgccctctgtctgctggggaagcccttgactcccagggctggtgagcagctgccagaggctgggagggagcaccaggtgggggtctcaccacgtgaaggagggcaggggcagggagccctacatacctggagtgactctgtgtccagggacttcctctttaactccagctgtgtcagctgcaataactcagtttctattaacttaatctaaacagaagacgagacagggtttttttttactcacattaaccacagttcagttttgtgctgctactctctggtgaccaagtgggtctaagaagcctttctggggaggctggggaggctctggaatgaggggaacctgcgggcctgggaacctcgtcaaggggcttgaacaagaattcgttccttcatggcctcgcgttcctggggtcatggacgtgcttgttgtggccaaaattgtttaccaagaggccagcacaggatctctcctagagtgggatcaggataaaggcttgtgcaatggagagggggctttccttggggattcaggccagagtaaagcacagacagagctatcacccagtctcctgctggtcaagttctcttgtccctcgcatcgctgttgcaggggagagcagagggtagtggaagtgactgagtaacagtggtagtagtagctggtatgtcttgagcacctactatgtgctaggcctgtgctgcacacttgatgtatcatatttcatcaattctctggctgctaggaggtattattgcctccattttatagacaagaaaactgaggctcagagaggttctcacttgctcaaggacacagagcaggtaagggagagatccctttctctgggatgcctcagctcagggtttaagggcaatagctgacctggtcaaaaccatctgcagtgagaatgtggggggccctcacaggctctccagggtgtgtctaggggattttagccctgggcaggggtgggggtcagaccccatagccagtacttctctatcctgtgcccatgaccctgtgaccctcatccctaagtccctatgacaccaccaacccctggtcagaggaatgagcttcatgtccggcaatgtggaattgaaattaaagagggaaattaaaaaggtaaattggtccaaaaaaagaaagaaagaaagaaagaaagaaaaatagagaaagaaaaaaaccatgcaaaaatgcaaaattcagtgtgctgaacatgatgcaggagtactcccatagcctgacgctcacttcagccccagccccagccccactccacaggcggtgaccaccaagccgtgtaggtgggcttgcccaaggatrgcttgaaggtcagcagccggcctgcggggggtggggggtatcttgtcacatgagggagggtctaagaggaggaccgcctcctcctgggccgaggtcacttttcagcaggcgtcaggaccacggtggctcacagctccccctgccctcttctgggggaaatactatatgcccctgagacgcctctgtctgtctgagctgtaggagcgctggggcctgcgccggctgcttttcccagtggggaagtcctgcctggagcagggacagcagaggcagctggagcagtcaaagccacacatcagcaccagcctccctggcccaggcgtggtggagacccgcctcgctggcaagaccctcgccagaccccggaataggaggtctctagacaccctcccagcagccccgacacaaggctgggagcaaagggaggttctgagggcaaggcctcgacctcttgttgggctagcaagccaaggagctggggttcaaacctcaactgctgcgacctgccgccctggagggccactctgcaagtctctgagagagcaggtccagggaccccagccccagcgctcacctggctcctgatctgccgatgcatcaggtctttc

SEQ ID NO: 40690 - DNA, 538 bp, Homo sapiens
ttactttctctttcaagagagactcccattttttattttatatccctgttttataaggtttggagccaaaaagtgaaggagccagaaaatctctaagcaaagactcatgaaccttcaaagtgattagtaaaaaaaaatctcagccatggccgggcgcggtggctcatgcctgtaatcccagcactctgggaggtggaggcgggtggatcacctaaggtcgggagttcaagaccagcctgaccaacatggagaaaccccatctctactaaaaatacaaaaaattagctgagcgtggtggtgggtgcctgtaatcccagctactcgggaggctgaggcaggagaatcacttgaacccgggaggtggaggttgcggtgagccgagatcatgccrttgcactacagcctgggtaacaagagtgaaactctgtctcaaaaaataaataaataaataaataaaaataacttcagccaggcgcagtggctcacacctgtaatccctgcactttgggaggccgaggcaggtagatcacctgaggtc

SEQ ID NO: 40691 - DNA, 538 bp, Homo sapiens
ttactttctctttcaagagagactcccattttttattttatatccctgttttataaggtttggagccaaaaagtgaaggagccagaaaatctctaagcaaagactcatgaaccttcaaagtgattagtaaaaaaaaatctcagccatggccgggcgcggtggctcatgcctgtaatcccagcactctgggaggtggaggcgggtggatcacctaaggtcgggagttcaagaccagcctgaccaacatggagaaaccccatctctactaaaaatacaaaaaattagctgagcgtggtggtgggtgcctgtaatcccagctactcgggaggctgaggcaggagaatcacttgaacccgggaggtggaggttgcggtgagccgagatcatgccgttgcactacagcctgggtaacaagagtgaaactctgtctcaaaaaataaataaataaataaataaaaataacttcagccaggcgcagtggctcacacctgtaatccctgcactttgggaggccgaggcrggtagatcacctgaggtc

SEQ ID NO: 40692 - DNA, 533 bp, Homo sapiens
ggctggaaatgttctgttccgtctgcttcagctgctcctgcagccgctgccgctctgcgtygaggtggcgctggtgctcactcaggccctgctccagccgggactgctcctgcagccagaggtaggggtcctgagcccctgggaccccctcagacgccgtgaggggtactgactggggttaggaggctggctttcccaccctgccttgccaatcctttttgtgtgacctccggccagctcctcccagtaggctacagtgtccatctgcacacggggaggctgggctgggtgatctgtaagggccctcccaggtgctgggggacagaaggaagtgacagcttcatcccactgcctttccacatccgagggaccttggcccaagccaggaggccactggctggggggtgcagccaggctggaccctagcaggcggctcacaaacctccttgaccgtctgaaggatctcatccttctggctgctgctctgctgaaggagctgggtgtgctcccgctgccccagttccaggcgccgt

SEQ ID NO: 40693 - DNA, 533 bp, Homo sapiens
ggctggaaatgttctgttccgtctgcttcagctgctcctgcagccgctgccgctctgcgtcgaggtggcgctggtgctcactcaggccctgctccagccgggactgctcctgcagccrgaggtaggggtcctgagcccctgggaccccctcagacgccgtgaggggtactgactggggttaggaggctggctttcccaccctgccttgccaatcctttttgtgtgacctccggccagctcctcccagtaggctacagtgtccatctgcacacggggaggctgggctgggtgatctgtaagggccctcccaggtgctgggggacagaaggaagtgacagcttcatcccactgcctttccacatccgagggaccttggcccaagccaggaggccactggctggggggtgcagccaggctggaccctagcaggcggctcacaaacctccttgaccgtctgaaggatctcatccttctggctgctgctctgctgaaggagctgggtgtgctcccgctgccccagttccaggcgccgt

SEQ ID NO: 40694 - DNA, 533 bp, Homo sapiens
ggctggaaatgttctgttccgtctgcttcagctgctcctgcagccgctgccgctctgcgtcgaggtggcgctggtgctcactcaggccctgctccagccgggactgctcctgcagccagaggtaggggtcctgagcccctgggaccccctcagacgccgtgaggggtactgactggggttaggaggctggctttcccaccctgccttgccaatcctttttgtgtgacctccggccagctcctcccagtaggctacagtgtccatctgcacacggggaggctgggctgggtgatctgtaagggccctcccaggtgctgggggacagaaggaagtgacagcttcatcccactgcctttccacatccgagggaccttggcccaagccaggaggccactggctgggggrtgcagccaggctggaccctagcaggcggctcacaaacctccttgaccgtctgaaggatctcatccttctggctgctgctctgctgaaggagctgggtgtgctcccgctgccccagttccaggcgccgt

SEQ ID NO: 40695 - DNA, 595 bp, Homo sapiens
acacaaaattaccttttagctatgttttactgccctgggatttataattctgcaatttgctttattgcagaagttttcaaaagtcatgtgagaggaattcacctaatattaaactaaaacaatgatataatcatcattatctaataatactaatattaaaattctgattgtgtatgaggtactatatcaatatgttccatatatgatatcactcttttttctttttcttttctttttatttttgagacagagtctcactctgtcgcccaggctggagtgcagtggctcaatctcagttcactgcaaccccagcctcctgggttcaagcgattctcccacctcaaccttcagagtacctgggattacaggygtgcgccaccacacctgactaatttttgtagttttactagagattgggcttcactatgttggccaggctgatctctaactcctgacctcaagtgatccacctgccttggcctcccaaagcaccaggattacaggtgtgagccactgtgcatggcctcttttttttcagaatttaacatttatatggcacttactttataccaggcactgttcttggtacattaag

SEQ ID NO: 40696 - DNA, 428 bp, Homo sapiens
gccaagcaataaattcagcatgttttgtttatttgtctcatcattttgagtgatagcttcattctttgagaagatggagaaatggaacaagacagaaagggtattccaggtactagaaatagcatgggcaaagacgtggaggcacgaaagtatttggtgagttcaggaatgtagaacccttgtagtagcttcttggagttggaaatgtcagttgaagacagactttgaacttcacaggccaatataagaagtttatattttatctgctgagctttgaaggcacaatgaatattttaaaaggcaaatattataaataaatataarttttaggagctaaaaatgcagtgttaggattagtggttgaagtgtctgtgacatattcaataattatataattatggtaatctacctctataataattaaagaa

SEQ ID NO: 40697 - DNA, 793 bp, Homo sapiens
ttgtttgtttttttcatgctacgattttagcacacatgtattagagacagatggtggttgcctgtccaacataacagtttcagatctttagtatagacttgcccagtcgccctttcacaaagttgtatgtcttaagggaagctgacccttgagaggaataggcgaaggtaatcccatttcccttgtagttagttcaggaaacaaattgacaagcatcctgactaatgggatgggagtggtgtctactgaggggccagatggtcttcttcctcttgaagctgttggatctggatggtatacatagagttgctatatccatcttcataccagcctgaggagagatccaacattgaaaacagcaaagcaggaagttgaaaaaaccagagtcataggtgatattacgccataactgagttagccatttctgaagccaattgaggtttaggtttttgtgtacatgtatgtgtatgtgtgtggacgcatgtgtgttagtccattcttgtgttgctacaaagtagtacctgagactgggtaatctctaaagaaaagagatttaattggctcacagttatgcaggctgtacaggaagcatagtgctgacatctgcttctggtgaggcctcaggaagctttcagttgtggtggaaggtcacagggagccagtgtgtacacagcgagagtgggagcaaaagaagtggggagttccacactcttttaaacaaycagatatcacatgtgaactcagagcaagaactcactcattatagggaggatggcatccagccattcatgaa

SEQ ID NO: 40698 - DNA, 1086 bp, Homo sapiens
agtgctttctgtgtggtacagatggcacagggattcagggcaaacaaagcatcaatttctgcatactcgtagctgctcagtcgtaatagccagaggcccaaaactccagggctttgagatgattcaactagacctcttctgccaaaatccgctggatctatagagcttccatcataatattgagggtgaagggatagtaggaaatgtgggttgcctttgctttaacatccatggagaaagctttagttattggaaaatgaccatttaaattccaattagagattcatttatgaaggaataatgtttttgcaggaaaggaggaacagacaaaaatttcttacatagtttaatccaaaaattttaacaaaaattaagcaaatggaaaattgtgcacattttaatcaggcagaatttgttaactgattacaggaaatggtctgagatgtttaagaagcaacctggttttttgttgaacacaggggtatgaccttatcacttagagcttattctttgcataatagcttggagaaaagaaagagccaaatggcatcatctttctccctgtcttactgtcaggggagagctaatactcatatagtataataaaaaagagtattaaactgcatctttgaacaatcaaaaatgatgcactaaatgaatactgaataaatggccaaaagctttttttttaacaggagatcattttaccatttgcattgtgtcagaataatagaccagacttcccattctacagacacttgattgagtgcctactatgcgccatgtactattaggtgctacagaaaaaatgcagaagtcagtagaagaatgcctttcttccaagcctagtagatargatgaaacgagaaacaatgtaaccaaagtctgcatacggcatcagtaaaagagtttcgagcaaaatttcagagactatatcatcacgggttgtaaatctgggagggtttgatggtggaggatggtaagaaaggaattgtaaagaactggaagggtttgaaatgacagaaatgggagagaactttttgtagaaagaaatcagtaatgccaaaagaatagaagacagaaaag

SEQ ID NO: 40699 - DNA, 511 bp, Homo sapiens
tgcattaaaatgcaaaaagaaactctcaccagtgccacgacagtttacaagtgccatggcaactccaagaagttactttatatgcttttaaaaggggaggaaccctcagttctgggaactacacactcttttccagaaaactcacaaataacccatcccttatttaacatacaataaaggaatcgccataaacacagctagccagcaatccacgagggctgttgctactactctctctgtgtagcagccattttcctatactctgttgctctaataaatttgctttgctttgctccatctgcttgctcttgaattctttccagcacaaagccaagaaccctcttgagctgagctcyaatgatgaggttcacctgtatcacctggacatagtctggaatattacagtcaccacatctaatattgagaggtgaagccggctcagcttctgggtcgggtggggatttggagaacttttctgtctagctgaaggattgcaaacacaccaatcagc

SEQ ID NO: 40700 - DNA, 638 bp, Homo sapiens
cattgttttctcagatataatgctattgcacacttaatagattacagtgtaatgtaaacataactttcatatgcactgggaagccaaaaattatgtacgatttgctttattgcagtcatctggagcagaatccgcaatatctccgaggtctgtctgtacctgttggycatttgtgtgtcttcttttgagaagtgtctatatgtcttctgctcattttaaaatcaggttatttgtgtgtgtgtgtttttgctactgagttgagttctatatatattttgaatatcaatccttttcgaatgtatagcttgccagtattttatcctatttcataagtcatcgctttactctgtggattgtttcttttgctgtgcagaaagtttttactttgatgagatcccatttgtctacttttgctttgttgcctgtgcttctggtgtccattatttgaacaatccaagggatggctgtaatgatcagatgaaatcatattgcaaaaccctcagtgcagtgaatgaagccatagcacataacacttgataaatgagggttaccatcgccaatatgattattattttattcccactcctatcatggcattaactgcccctctttagtctagtctacatctatcagtaacc

SEQ ID NO: 40701 - DNA, 638 bp, Homo sapiens
cattgttttctcagatataatgctattgcacacttaatagattacagtgtaatgtaaacataactttcatatgcactgggaagccaaaaattatgtacgatttgctttattgcagtcatctggagcagaatccgcaatatctccgaggtctgtctgtacctgttggccatttgtgtgtcttcttttgagaagtgtctatatgtcttctgctcattttaaaatcaggttatttgtgtgtgtgtgtttttgctactgagttgagttctatatatattttgaatatcaatccttttygaatgtatagcttgccagtattttatcctatttcataagtcatcgctttactctgtggattgtttcttttgctgtgcagaaagtttttactttgatgagatcccatttgtctacttttgctttgttgcctgtgcttctggtgtccattatttgaacaatccaagggatggctgtaatgatcagatgaaatcatattgcaaaaccctcagtgcagtgaatgaagccatagcacataacacttgataaatgagggttaccatcgccaatatgattattattttattcccactcctatcatggcattaactgcccctctttagtctagtctacatctatcagtaacc

SEQ ID NO: 40702 - DNA, 638 bp, Homo sapiens
cattgttttctcagatataatgctattgcacacttaatagattacagtgtaatgtaaacataactttcatatgcactgggaagccaaaaattatgtacgatttgctttattgcagtcatctggagcagaatccgcaatatctccgaggtctgtctgtacctgttggccatttgtgtgtcttcttttgagaagtgtctatatgtcttctgctcattttaaaatcaggttatttgtgtgtgtgtgtttttgctactgagttgagttctatatatattttgaatatcaatccttttcgaatgtatagcttgccagtattttatcctatttcataagtcatcgctttactckgtggattgtttcttttgctgtgcagaaagtttttactttgatgagatcccatttgtctacttttgctttgttgcctgtgcttctggtgtccattatttgaacaatccaagggatggctgtaatgatcagatgaaatcatattgcaaaaccctcagtgcagtgaatgaagccatagcacataacacttgataaatgagggttaccatcgccaatatgattattattttattcccactcctatcatggcattaactgcccctctttagtctagtctacatctatcagtaacc

SEQ ID NO: 40703 - DNA, 519 bp, Homo sapiens
agttggtctcagaagcataatcaatgatctccatgttctggaatgaatgaacatttattagtccttctccaccttgacccattgccagaatttttccctgttgaccaacttattctgttttcggtttccatgactccacgcaatcctagttatccttttacctctcttcctactcctattttttggactccttttcaggtttaacttcctccaaactcagccatgaagtgttggttgtctttgagagcagccctaggccatgatcttctctcaccctttgcagstgccccaaaaactctgaccacatccattgcttcagatatcatctgtgtggaggtcattcacattcctcccctctgtgctgtggagtctcttaacctactgacccactgggcccatcaccattggatgtctcaaagccatcacaaactcaaaatgtccaggttcaaataatcggtctttttccccaaacacccagctccactatccattctgtatttgatgagtgagaaacttaga

SEQ ID NO: 40704 - DNA, 519 bp, Homo sapiens
agttggtctcagaagcataatcaatgatctccatgttctggaatgaatgaacatttattagtccttctccaccttgacccattgccagaatttttccctgttgaccaacttattctgttttcggtttccatgactccacgcaatcctagttatccttttacctctcttcctactcctattttttggactccttttcaggtttaacttcctccaaactcagccatgaagtgttggttgtctttgagagcagccctaggccatgatcttctctcaccctttgcagctgccccaamaactctgaccacatccattgcttcagatatcatctgtgtggaggtcattcacattcctcccctctgtgctgtggagtctcttaacctactgacccactgggcccatcaccattggatgtctcaaagccatcacaaactcaaaatgtccaggttcaaataatcggtctttttccccaaacacccagctccactatccattctgtatttgatgagtgagaaacttaga

SEQ ID NO: 40705 - DNA, 818 bp, Homo sapiens
ctgagattgccgtggttgctctatggattaagacagcactggagtctgtagcctccatcttctgaattctttattttttgtagcacttacttccagaaccagagggcccataataataataattgaggattactaacaattacaatacattttcacaagctttgtcatcttttacctttgtgacaactgatttataggggttgtttttattctcattttttatagtaggaaattgagattacagaaggcaagtggcctatattctgtgatccctcttgtaagcttagtttcaaacacagctttttggactctaaaactaatgatttttctattacattttaaaaattacttgtcttaagtttccatattgttatggacagacttgtatctccccacaagttcatatgttgaagccctaactcgccatgtgactctatttgaagataggacctttgcggaggtaattaaggttaaatgcggcatgagggtagaatcctaatccaacagaactggcgcccttataggaggaataggcaccagagatctctctctgtctctcccttgcaagctcagagggaatgccatgtgagggacacagcaagaaagcaggtgtctgcaagccaggaggagaggcctcaccacatacaaccrtgatgacactatcttggacttctagaccccagaaatgtaagaaaataaatgactgttatgtcagccacacatattgttatggtggcctgaacagactaagacacttgtcaagtcagactacagcacaagaggatgggggtgggtatcaaactggtgacaaggcaagg

SEQ ID NO: 40706 - DNA, 541 bp, Homo sapiens
agtcttccatccacagagtaactattgaaagagtccaggcccaggagcaaagaaagtcctgattttatctttgctttgctgaaagaaaaacgttagaacactcatgcgcctgtcacttttctcctttgatacaggaaaatacaaccccgcactcaccatcccactgcttgagaaatctggtgtggaggcctgtcttgctgcttctttcaaattctgcttcctccatctatggccagcatatatatatatattttcacttcagaaacgggcagcaggagaccaccagctcatgtgtgcaccatcctaatgtgtgctggcagcccatttctaggtttatcttatacttcctccagtaaytattccttaaagaactgactgatggcaatgaaactatcaggtccacccagtgacttggttcttaccatcctttgtgacttccttgatgaaaactatgaaaatgttcagataaatgaccatatacatacatagatatacatgtaatttttgcggacaaattctgaggatttccaaaccatatgag

SEQ ID NO: 40707 - DNA, 318 bp, Homo sapiens
gcgttagaaaaattttcaatttcaggtgatcagggtgattgaatcgtctggattgaataggttaccyattgtcaaaaatgatagactggattaagaaaatgtggcccatatacaccatggaatactatgcagccataaaaaggatgagttcatgtcctttgtagggacatggatgatgctggaaaccatcattctcagcaaactattgcaaggacaaaaaaccaaacactgcatgttctcactcataggtgggaattgaacaatgaaaacacatggacacaggaaagggaacatcacacaccagggcctgttgtgggg

SEQ ID NO: 40708 - DNA, 559 bp, Homo sapiens
aaattagccgggcgtggtggcaggatcctgtagtcccagctactggggaggctgaggcaggagaatggcatgaacctggaggcggagcttgcagtgccgagatgcgccacagcactccagcctgggcgacagagcgagactctgtctcaaaaaaacaaaaacaaaaacaaaaaaaccctagtatccaagtgctaaaggccagtagcatgcctaattagaagaatctccacatactataggagccctctgggtctggcagtacttgcagttgtaaaccattactttaaactgtgtgtatctttccacaaattctgatttcatttcttggataatatatcattcccagtatgtcatttttaacatttacataagagatttggcaaagttgtaattcaactgatgttataaattgacaaccatagagttgtatgccagcttctttttttgcattcttattcctatggytgcaagtgataaaaaattcatttagcacagtcaccaaaaatccctgattttctgactctgctttgaattaaaaaatttgagtttgccatccttt

SEQ ID NO: 40709 - DNA, 548 bp, Homo sapiens
tagagtcattcttcagattgaaatataattgttaggtgaaacaagtatttccactggaaaaatacaagcttggggacttcagtagtgattgttttgaccagatgaagattatctgcagaataaaatgaaataaaagctagcagaggtgtttgtgtatgcatgtgtatgtttgtgtatatgtgtgttgcgggggttggcgtgggggaagagagaaagcgcatgagcacaagacagtgatctagacccacctgcataaagagaactaatacattcccttgttgcttaagcttctttgagtttttgccasttgcaaatttttctaagtcctgatgaataggctaaaatcatcccaactttttctataaaaagattgatattcagagagattaaataatataactaatgtcacacagccagcaattgctgagctaggatttgaatccaagtgggcctaactccaaagtccatgcttttcctacaacatcatgcttctgccacacttaatgttaaggaaactaagccgtaatatgagggacccaacttgtccc

SEQ ID NO: 40710 - DNA, 548 bp, Homo sapiens
tagagtcattcttcagattgaaatataattgttaggtgaaacaagtatttccactggaaaaatacaagcttggggacttcagtagtgattgttttgaccagatgaagattatctgcagaataaaatgaaataaaagctagcagaggtgtttgtgtatgcatgtgtatgtttgtgtatatgtgtgttgcgggggttggcgtgggggaagagagaaagcgcatgagcacaagacagtgatctagacccacctgcataaagagaactaatacattcccttgttgcttaagcttctttgagtttttgccacttgcaaatttttctaagtcctgatgaataggctaaaatcatcccaactttttctataaaaagattgatattcagagagattaaataatataactaatgtcacacagccagcaattgctgagctaggatttgaatccaagtgggcctaactccaaagtccatgcttttcctacaacatcatgcttctgccacacttratgttaaggaaactaagccgtaatatgagggacccaacttgtccc

SEQ ID NO: 40711 - DNA, 1011 bp, Homo sapiens
ttaaagctaaatttattaagattatatactcatctctaggactattacaatgagcaagactgacaacaggtaagagctccacttttgtggarcttacgtgaaatgtcccaaacacttcatattcagattgcgatttctcagatgacttctgctgggaaacaatttctcattaatttctcatgtttcttcccatcttgtaagcagaggcacagatggccttatttttggactgtcttcctctagagcagagaacagatttgtttattgtacagtataataaaaatgtctttctccaaggcaaaggccaggcaggtatgcacacattccattatagaagatttgagtttcctaggcttgggattcctcagctctggcaaaaactcatgacatatacagcattgattctgcatcacctctgtggaatttgaggagcatggggaatggatatgaaactgacattcatgctgccactatgctatgattaatagagtcgtttgtctctgactcaggagtctcatgtcttccaccatcatccacgcaacaggataactttttagcttacatgcagagtaaaatctccagtgtttcagcttttgacaacttctagccggtatgctgttacaaaggtatcttccttaaacctaatttctactggttacatctaaatttctttatctggctttcagactccttcctacctactcagctgaatatctatttcttcttgaagaagactttctgcttcatagaccagtattttcacacgtatactgtgatgttcctttctacctctgacattaggctcaaattccactccacccccttttgttggaattcctttcctttccccttttttcctatttagtcaactcaaatccatctcttaacacctgtatcaagtccaaaactgtcaagaaacttcctcattgatcactctttctgcaaacatctgtagaacttaagaacctatacaaagagcttgaatatatattgtgttattttctagtggtt

SEQ ID NO: 40712 - DNA, 1011 bp, Homo sapiens
ttaaagctaaatttattaagattatatactcatctctaggactattacaatgagcaagactgacaacaggtaagagctccacttttgtggaacttacgtgaaatgtcccaaacacttcatattcagattgcgatttctcagatgacttctgctgggaaacaatttctcattaatttctcatgtttcttcccatcttgtaagcagaggcacagatggccttatttttggactgtcttcctctrgagcagagaacagatttgtttattgtacagtataataaaaatgtctttctccaaggcaaaggccaggcaggtatgcacacattccattatagaagatttgagtttcctaggcttgggattcctcagctctggcaaaaactcatgacatatacagcattgattctgcatcacctctgtggaatttgaggagcatggggaatggatatgaaactgacattcatgctgccactatgctatgattaatagagtcgtttgtctctgactcaggagtctcatgtcttccaccatcatccacgcaacaggataactttttagcttacatgcagagtaaaatctccagtgtttcagcttttgacaacttctagccggtatgctgttacaaaggtatcttccttaaacctaatttctactggttacatctaaatttctttatctggctttcagactccttcctacctactcagctgaatatctatttcttcttgaagaagactttctgcttcatagaccagtattttcacacgtatactgtgatgttcctttctacctctgacattaggctcaaattccactccacccccttttgttggaattcctttcctttccccttttttcctatttagtcaactcaaatccatctcttaacacctgtatcaagtccaaaactgtcaagaaacttcctcattgatcactctttctgcaaacatctgtagaacttaagaacctatacaaagagcttgaatatatattgtgttattttctagtggtt

SEQ ID NO: 40713 - DNA, 894 bp, Homo sapiens
gaaactatctgttcatgttatttattgttaatcacactgtttctggctaattctatgtttcctaccatgagtaaaaggtagcaacattgttattactcacaataccgcggctctttggaactcttttgtgttgaaacaatatggatcttcctgcttgtacagttcccaaatgccttttgttggatgctgactgcatccttactcatgaagctgcatcagctttctttccacctgtaaakgctggcttccaacttctctttagaaggttattactatgactatgttaataatgaccacaaatgtaagtcatatccacagtatgtaggaaaatgtgtacaggttaacatttttttttttttttttttttgagacagagtctctgtcacccaggctggagtgcagtgatgcaatctcagttcactgcagcctctgcctcccgggttcaggtgattctcctgactcagcctctagagtagctgggagtacagctgtgcaccccatgcctgcctattttttttgtatttttagtagggacagggtttcgccatgttggccagcctggtcttgaactcctgacctcaggtgatccacctgcgttggcctcccaaagtgctaggattacaggcatgagtcacagcgcctggctaggttaactttttcagtcaagttaaatttactatttgaaatttaatagcataaatgtagaataacacatctagcaatatgttcttctgaactctttagagtgtaatcattggattcgtaaaatgtgatttcttcattggcagacgtagcctctccaataatttttatatttttcagtccaaacctattcctgaatctgtgtaaccatcccctacttgcaatatatgggttggtgtcaatcatttcaga

SEQ ID NO: 40714 - DNA, 894 bp, Homo sapiens
gaaactatctgttcatgttatttattgttaatcacactgtttctggctaattctatgtttcctaccatgagtaaaaggtagcaacattgttattactcacaataccgcggctctttggaactcttttgtgttgaaacaatatggatcttcctgcttgtacagttcccaaatgccttttgttggatgctgactgcatccttactcatgaagctgcatcagctttctttccacctgtaaatrctggcttccaacttctctttagaaggttattactatgactatgttaataatgaccacaaatgtaagtcatatccacagtatgtaggaaaatgtgtacaggttaacatttttttttttttttttttttgagacagagtctctgtcacccaggctggagtgcagtgatgcaatctcagttcactgcagcctctgcctcccgggttcaggtgattctcctgactcagcctctagagtagctgggagtacagctgtgcaccccatgcctgcctattttttttgtatttttagtagggacagggtttcgccatgttggccagcctggtcttgaactcctgacctcaggtgatccacctgcgttggcctcccaaagtgctaggattacaggcatgagtcacagcgcctggctaggttaactttttcagtcaagttaaatttactatttgaaatttaatagcataaatgtagaataacacatctagcaatatgttcttctgaactctttagagtgtaatcattggattcgtaaaatgtgatttcttcattggcagacgtagcctctccaataatttttatatttttcagtccaaacctattcctgaatctgtgtaaccatcccctacttgcaatatatgggttggtgtcaatcatttcaga

SEQ ID NO: 40715 - DNA, 894 bp, Homo sapiens
gaaactatctgttcatgttatttattgttaatcacactgtttctggctaattctatgtttcctaccatgagtaaaaggtagcaacattgttattactcacaataccgcggctctttggaactcttttgtgttgaaacaatatggatcttcctgcttgtacagttcccaaatgccttttgttggatgctgactgcatccttactcatgaagctgcatcagctttctttccacctgtaaatgctggcttccaacttctctttagaaggttattactatgactatgttaataatgaccacaaatgtaagtcatatccasagtatgtaggaaaatgtgtacaggttaacatttttttttttttttttttttgagacagagtctctgtcacccaggctggagtgcagtgatgcaatctcagttcactgcagcctctgcctcccgggttcaggtgattctcctgactcagcctctagagtagctgggagtacagctgtgcaccccatgcctgcctattttttttgtatttttagtagggacagggtttcgccatgttggccagcctggtcttgaactcctgacctcaggtgatccacctgcgttggcctcccaaagtgctaggattacaggcatgagtcacagcgcctggctaggttaactttttcagtcaagttaaatttactatttgaaatttaatagcataaatgtagaataacacatctagcaatatgttcttctgaactctttagagtgtaatcattggattcgtaaaatgtgatttcttcattggcagacgtagcctctccaataatttttatatttttcagtccaaacctattcctgaatctgtgtaaccatcccctacttgcaatatatgggttggtgtcaatcatttcaga

SEQ ID NO: 40716 - DNA, 536 bp, Homo sapiens
agagacaagccctggttattaggccagtctctgcaagaaaggagcactggccctgccaagaacttcccctgggcttacctccagacaactgcattgcagttgccctccctgatggtcctgttgcaaatagtggctttgaaatagctgctgttgctctgtctgcccctctaggtgaattacaagaaaggctttgaacactcaaaggygcagttccatctgccgttggacatggccgccctggtgcatgccaagaaggctcagaccctggccagcaatcaggactacaaacatccactgccccagtacacttccttggcagaagacctgaggctgagctgtgccaagaaagctcacaaattgcagagtgaggtaaggagacctggcctctttctcagggccccttcttctcttaggacctcagggtggtgacctccaggctcctgttggctcagtgaaatctctggaagtgagaaatcctaaacccaagtcttattttgaaacccagtctgagagttcctgcacatcccttaagcaca

SEQ ID NO: 40717 - DNA, 536 bp, Homo sapiens
agagacaagccctggttattaggccagtctctgcaagaaaggagcactggccctgccaagaacttcccctgggcttacctccagacaactgcattgcagttgccctccctgatggtcctgttgcaaatagtggctttgaaatagctgctgttgctctgtctgcccctctaggtgaattacaagaaaggctttgaacactcaaaggcgcagttccatctgccgttggacatggccgccctggtgcatgccaagaaggctcagaccctggccagcaatcaggactacaaacatccactgccccagtacacttccttggcagaagacctgaggctgagctgtgccaagaaagctcacaaattgcagagtgaggtaaggagacctggcctctttctcagggccccttcttctcttaggacctcagggtggtgacctccaggctcctgttggctcagtgaaatctctggaagtgagaaatcctaaacccaagtmttattttgaaacccagtctgagagttcctgcacatcccttaagcaca

SEQ ID NO: 40718 - DNA, 699 bp, Homo sapiens
gtttgctgctggacaatattgactgtcaaactgactttggcccaggtactgccatctctgtgccaaataaatccttgatttcaagttcatatgtggccacagtctccatgtgttgtctgcctggctatggcactctgtgggtgaccagcatagatctctaccagtggggttgttggcctctggccagatggagtggcgagcagaattttctccactgcggctcatagctgcaaagggagactcgaacccagagccaaaggactaggagtgcatgatgtggaaggggtggccctgcttagcttgcgcacgctgtgggcacaaggccgaggacacaggaaagggagacaataagagagcgagtctgtgagacagagagcccttgtgaagatacaggacccacctggtggtagacgcgtcgagcctgaggaagcaaaccatttgggcagagaagacaacagcagaggtgctggtgtgagggtatcaccagggcaggtcagcccggaggccgccctcgcacaraaagaggtggagcggcctgcctggagccatgcatttttcatctcgccctcactttgcctcagcctttcacctcatctcagcctccaattcgctgtgtggccaggagtaaattgcttcccctctaggcctcagttctttataaaatcaagggttttaagtacgtaggcagtatttcccttg

SEQ ID NO: 40719 - DNA, 699 bp, Homo sapiens
gtttgctgctggacaatattgactgtcaaactgactttggcccaggtactgccatctctgtgccaaataaatccttgatttcaagttcatatgtggccacagtctccatgtgttgtctgcctggctatggcactctgtgggtgaccagcatagatctctaccagtggggttgttggcctctggccagatggagtggcgagcagaattttctccactgcggctcatagctgcaaagggagactcgaacccagagccaaaggactaggagtgcatgatgtggaaggggtggccctgcttagcttgcgcacgctgtgggcacaaggccgaggacacaggaaagggagacaataagagagcgagtctgtgagacagagagcccttgtgaagatacaggacccacctggtggtagacgcgtcgagcctgaggaagcaaaccatttgggcagagaagacaacagcagaggtgctggtgtgagggtatcaccagggcaggtcagcccggaggccgccctcgcacaaaaaraggtggagcggcctgcctggagccatgcatttttcatctcgccctcactttgcctcagcctttcacctcatctcagcctccaattcgctgtgtggccaggagtaaattgcttcccctctaggcctcagttctttataaaatcaagggttttaagtacgtaggcagtatttcccttg

SEQ ID NO: 40720 - DNA, 726 bp, Homo sapiens
tttccacaggtgaatcacaccaatgctgccctggatggcctcatcttgtacaaaaacatccattcttatgattagaaatgggtctatgagccaggcgtggtggctgatgcctataatctcagcactttgagtggatgaggccagtggatcacsaggtcaggagttcgagaccagcctggccaacatggtgaaacctcgtctctactaaaaatacaaaacttagggccaggcgtggtggttcatgcctgtaatcccagcactgtaggaggctgaggtggatggatcatctaaggtcaggagttcgagaccagcctgaccaaaatggagaaaccccatctctactaaaatactaaattagcctgacatggtggcgggcgtctgtaatcccagatacttgggagtccgaggcaggagaattgcttgaacccaggaagcagaagttgcagtgagcaaaaatcgcggccactgacacttccatcctgggtgtacattatcgtggactctgttctcaaacaaacaaacaaacgaacaaaaacaaaacataacagaaaacaaaaaaaaattatccggggcatggtggcaggcgcctgtaaccccaggtactcaggaggctgagacaggaaaattgcttgaacctggaaggcggaggttccagtgagctgagatagcaccactgcactccagcctgggtgaaagagcgaaactccgtcaaaaaaaaaaaaaaaa

SEQ ID NO: 40721 - DNA, 1427 bp, Homo sapiens
  misc_feature (1)...(1427): n = A,T,C or G
aaaggatttccctttcctcaatcccttcaacctcttatgaactgttgtatcatgtttctttccatcttgctacctacaaatcactcctcaggaaggaagcgacaagtgacaaagcagaaagagctgttggaaaagaacttacatctttcaagggcaccagtttcatagctgtttgataggaaggcgtgagagtggctgggtagttgtagtcgacaatatcatgtttataatcagctttgtaggcaacctaaaacaggaagaaaagaagaagaatggagaaatcaatttctactttcttttggctttgtttgaatgccataagaaatattttttaaatacccagaaacgaattcagtttcatcaccttcaaggaaaattaaattatgttcacacttttgtctttaatgaatctgaattcctmttaattagtccaaaattagttaacttccatctgtagcacatttactttatatttcatattaattatgaagctgcttgtcatttttgttgaaaagaagcattttcacatggataggcaatggaagagctccttggctaaccccaagaaaatagatggaaaggtgaagagtcttcagagtatttaattttttttctaaagatcaaattgacattcttaagcagagaaaatccgacatttgtatgttttaataatgaaatcagtttcctttaagtgtcctttacctccaggatttacaatctggtatttgtaaatctataaactggattgacgaagctaaagagagattaatagagtatatgctacaggggaaaacaaggacttgatctactctgttatcccactaccctgaccagtgccaggccacagtaggttttcaatgaatacaatgatcaaaaaaatgaatgaaggaacaaaccagcttaccaaccaaccaactctcaataaatcacaaaagctttggaaccctggggaatttggaataagaatcataattattcatttctctttttctctcagaaattgaaagtgttaaccacactggattcattataatagactgaagtactcttcaaattagagaaagctaatataaacaaattgaagcctttgaaaattttcagggatcttacctagccttggttgtatccgctaacatttagaaactcttttgggtcagtctttacacagtctttaaaatagaagacagatttttttttaaggggaatttaaaaagaattggctgaattcttcatgccctgccccactccatcccaacagaccctggcataaaaggactcacgttgcttgccaggctgccaactntcatagcatgcagagtgcgtctgnnnnnnnnnnnnnnnnnnnnnnnnnnnnnnnnnnnnnnnnnnnnnnnnnnnnnnnnnnnnnnnnnnnnnnnnnnnnnnnnnnnnnnnnnnnnnnnnnnnna

SEQ ID NO: 40722 - DNA, 1427 bp, Homo sapiens
  misc_feature (1)...(1427): n = A,T,C or G
aaaggatttccctttcctcaatcccttcaacctcttatgaactgttgtatcatgtttctttccatcttgctacctacaaatcactcctcaggaaggaagcgacaagtgacaaagcagaaagagctgttggaaaagaacttacatctttcaagggcaccagtttcatagctgtttgataggaaggcgtgagagtggctgggtagttgtagtcgacaatatcatgtttataatcagctttgtaggcaacctaaaacaggaagaaaagaagaagaatggagaaatcaatttctactttcttttggctttgtttgaatgccataagaaatattttttaaatacccagaaacgaattcagtttcatcaccttcaaggaaaattaaattatgttcacacttttgtctttaatgaatctgaattcctcttaattagtccaaaattagttaacttccatctgtagcacatttactttatatttcatattaattatgaagctgcttgtcatttttgttgaaaagaagcattttcacatggataggcaatggaagagctccttggctaaccccaagaaaatagatggaaaggtgaagagtcttcagagtatttaattttttttctaaagatcaaattgacattcttaagcagagaaaatccgacatttgtatgttttaataatgaaatcagtttcctttaagtgtcctttacctccaggatttacaatctggtatttgtaaatctataaactggattgacgaagctaaagagagattaatagagtatatgctacaggggaaaacaaggacttgatctactctgttatcccactaccctgaccagtgccaggccacagtaggttttcaatgaatacaatgatcaaaaaaatgaatgaaggaacaaaccagcttaccaaccaaccaactctcaataaatcacaaaagctttggaaccctggggaatttggaataagaatcataattattcatttctctttttctctcagaaattgaaagtgttaaccacactggattcattataatagactgaagtactcttcaaattagagaaagctaatataaacaaattgaagcctttgaaaattttcagggatcttacctagycttggttgtatccgctaacatttagaaactcttttgggtcagtctttacacagtctttaaaatagaagacagatttttttttaaggggaatttaaaaagaattggctgaattcttcatgccctgccccactccatcccaacagaccctggcataaaaggactcacgttgcttgccaggctgccaactntcatagcatgcagagtgcgtctgnnnnnnnnnnnnnnnnnnnnnnnnnnnnnnnnnnnnnnnnnnnnnnnnnnnnnnnnnnnnnnnnnnnnnnnnnnnnnnnnnnnnnnnnnnnnnnnnnnnna

SEQ ID NO: 40723 - DNA, 1427 bp, Homo sapiens
  misc_feature (1)...(1427): n = A,T,C or G
aaaggatttccctttcctcaatcccttcaacctcttatgaactgttgtatcatgtttctttccatcttgctacctacaaatcactcctcaggaaggaagcgacaagtgacaaagcagaaagagctgttggaaaagaacttacatctttcaagggcaccagtttcatagctgtttgataggaaggcgtgagagtggctgggtagttgtagtcgacaatatcatgtttataatcagctttgtaggcaacctaaaacaggaagaaaagaagaagaatggagaaatcaatttctactttcttttggctttgtttgaatgccataagaaatattttttaaatacccagaaacgaattcagtttcatcaccttcaaggaaaattaaattatgttcacacttttgtctttaatgaatctgaattcctcttaattagtccaaaattagttaacttccatctgtagcacatttactttatatttcatattaattatgaagctgcttgtcatttttgttgaaaagaagcattttcacatggataggcaatggaagagctccttggctaaccccaagaaaatagatggaaaggtgaagagtcttcagagtatttaattttttttctaaagatcaaattgacattcttaagcagagaaaatccgacatttgtatgttttaataatgaaatcagtttcctttaagtgtcctttacctccaggatttacaatctggtatttgtaaatctataaactggattgacgaagctaaagagagattaatagagtatatgctacaggggaaaacaaggacttgatctactctgttatcccactaccctgaccagtgccaggccacagtaggttttcaatgaatacaatgatcaaaaaaatgaatgaaggaacaaaccagcttaccaaccaaccaactctcaataaatcacaaaagctttggaaccctggggaatttggaataagaatcataattattcatttctctttttctctcagaaattgaaagtgttaaccacactggattcattataatagactgaagtactcttcaaattagagaaagctaatataaacaaattgaagcctttgaaaattttcagggatcttacctagccttggttgtatccrctaacatttagaaactcttttgggtcagtctttacacagtctttaaaatagaagacagatttttttttaaggggaatttaaaaagaattggctgaattcttcatgccctgccccactccatcccaacagaccctggcataaaaggactcacgttgcttgccaggctgccaactntcatagcatgcagagtgcgtctgnnnnnnnnnnnnnnnnnnnnnnnnnnnnnnnnnnnnnnnnnnnnnnnnnnnnnnnnnnnnnnnnnnnnnnnnnnnnnnnnnnnnnnnnnnnnnnnnnnnna

SEQ ID NO: 40724 - DNA, 1427 bp, Homo sapiens
  misc_feature (1)...(1427): n = A,T,C or G
aaaggatttccctttcctcaatcccttcaacctcttatgaactgttgtatcatgtttctttccatcttgctacctacaaatcactcctcaggaaggaagcgacaagtgacaaagcagaaagagctgttggaaaagaacttacatctttcaagggcaccagtttcatagctgtttgataggaaggcgtgagagtggctgggtagttgtagtcgacaatatcatgtttataatcagctttgtaggcaacctaaaacaggaagaaaagaagaagaatggagaaatcaatttctactttcttttggctttgtttgaatgccataagaaatattttttaaatacccagaaacgaattcagtttcatcaccttcaaggaaaattaaattatgttcacacttttgtctttaatgaatctgaattcctcttaattagtccaaaattagttaacttccatctgtagcacatttactttatatttcatattaattatgaagctgcttgtcatttttgttgaaaagaagcattttcacatggataggcaatggaagagctccttggctaaccccaagaaaatagatggaaaggtgaagagtcttcagagtatttaattttttttctaaagatcaaattgacattcttaagcagagaaaatccgacatttgtatgttttaataatgaaatcagtttcctttaagtgtcctttacctccaggatttacaatctggtatttgtaaatctataaactggattgacgaagctaaagagagattaatagagtatatgctacaggggaaaacaaggacttgatctactctgttatcccactaccctgaccagtgccaggccacagtaggttttcaatgaatacaatgatcaaaaaaatgaatgaaggaacaaaccagcttaccaaccaaccaactctcaataaatcacaaaagctttggaaccctggggaatttggaataagaatcataattattcatttctctttttctctcagaaattgaaagtgttaaccacactggattcattataatagactgaagtactcttcaaattagagaaagctaatataaacaaattgaagcctttgaaaattttcagggatcttacctagccttggttgtatccgctaacatttagaaactcttttgggtcagtctttacacagtctttaaaatagaagacagatttttttttaaggggaatttaaaaagaattggctgaattcttcatgcccygccccactccatcccaacagaccctggcataaaaggactcacgttgcttgccaggctgccaactntcatagcatgcagagtgcgtctgnnnnnnnnnnnnnnnnnnnnnnnnnnnnnnnnnnnnnnnnnnnnnnnnnnnnnnnnnnnnnnnnnnnnnnnnnnnnnnnnnnnnnnnnnnnnnnnnnnnna

SEQ ID NO: 40725 - DNA, 1070 bp, Homo sapiens
tagaaggcaaaggtcagccacagtggggttgcctcccgctcttcctggacggaccacaaagccatcacttgggacatgcagacaaagggagcttccctgtccaagacaggtatggaagcccagaactccaggatcatgacaccctatcatccagaaataggtttggagagggaagcaatcataaaagggaccccaacgaaatttcttcctaatggactgagaagtgttctttgttgaagacattgagccagactaagaagcctctaggcttcacaggaactgggcagacagaacaagagggaggacagagcagaggccaatgccacagcacaatgccactatcacgggcatccgggaaaatgtgccaaatgggtgactaggccaggaaggccagcgtttgagtgacagacatgcttgccccatcttgtagccagcttccttctccgtcccagtgtatagctgtgggtagctttctcaatgagggcaaagggcgagaggagtgagaaccatcttcttgaagctctgtgggcacactcctgcaggtggacaatgagcacctctgaggcctttgtccttggctggggtgcagtcrtcttgatcctagcaaggaggcagcacaggatgggaaggatattaaaactcctgcaagacaggccggaggcacgaagccccttcactgaagcacagccatggagaactcctgctatgccaaaattcagggactggatactaagacaacagtggaaatcactgtgacgagacaatcagctagagccacgcggaggcacactggctgggccgactaaagctccggtgctggacggcaggcagctgcccctttaaacaatggctactgcgcggtagcagatgggctcctgttgcagcctcggcagcgactggatccagggtaaagtttgcagcggcctggtagaggctgtggccggtgtcctgtcccagggcgaaacccccagaagtcctgtcctcaggacctccttgagccgactcccaccaagggagggagagctacaggatgtctgctgggttctcgggactccccttcagatccgatt

SEQ ID NO: 40726 - DNA, 589 bp, Homo sapiens
aaaccaggaggagagccattgggagaaaggttagagtcagacactgtggttatttgtttatgcatgtcttgtagggctagagttatactgctagaatgatcaggaataaatacacaacattcygtcttaatcatggcaaaagcttttccttgtgcagcagttaatacatcgaataccatgtaattttgtagaatagccttcagtatgggggtcatctcagagttcattaaaaaataccttggaggctgtcattgagaaaaagctgagtatagttaatgtgttttcaatgcctacaaatggcacagagattgaagctaaataatcataccaataaaagaaagcccttatccacctactagtcacatatgggaaattaacaggtttatcagtttgcttttcccatcatccttggaccaatagaaaacctaacatgtagtgtcctagccatcccaatggtgaccaaggccagagattaaatccatacaaccattcagtaccatttggagctgccaatttattccaggttgttgagatgagtctgtagtaacccagtccatggcttgcagtattacaatgtgttggcattgtt

SEQ ID NO: 40727 - DNA, 1105 bp, Homo sapiens
tctggaaattcttctcaacgtcctttacatacgtgattaatcacatttccaaaataacataccaaaatgaataacagaaaatcattttaagttgtggttccttcatgcacaaaacatttcatgtgtgtctggcactcttccggccacagatttcatcttaacctaagtattgaaatgcttgtgccctttgattaatttttctatgtaaatactttgataataagctacactgaggccggtgcagtggctcacacctctcatcccagttctttgggaggccgaggccagcggatcacgaagtcaggagatcaagaccatcctggccaacacagtgaaaccccgtctcttcaaatatacaaagaattagccaggtgaggccaggctctggctcatgcctgtaattccacactttgggaggctgaggagggtggatcacctaaggtcaggagttcgagaccagtctgcccaacatggtgaaaccctgtttctactaaaaatacaaaaaattagcaggttgttgtgtcaggcacctgtaatcccagctactcgggaggttgaggcagaagaatcacttsaacccaggaggcggaggttgcattgagctgagatcatgccactgcaccgtccggcctggggacaagagtgaaactctgtcaaaaaaaaaaaacaaaactggtctatactaaaaatacaaaaattagaccctgaaggtcatgtccaaatgagaaagacattgtttggctcaaattgtctgacactaaggaatagtgcagactggacaaatgaggtgactgacacctgtaatcccagcactttgggaggccgaggccggtagatcacctgaggtcaggagttggagaccagcctgaccaacatcgtgaaactccatctctactaaaaaaaaatacatgaaaattagccggctatggtggtgcatgcctgtgtatcccagctactcaggagtctgaggcaggagacttacttgaaactgggtggcaggggttgcggtgagtggggatcacaccactgcactacagcctgggcaacaagagtgaaactctgtctcagaaaacagaatagtgcagagtaagagcagatttatata

SEQ ID NO: 40728 - DNA, 1063 bp, Homo sapiens
catgttaatgattgctaagctgcttcaacctcattaaattcagaattcttttccaattggtacgaacatagcatatttcataattttataaactagttatactacctgtagtacaaattaaccccttgataattgtgtttttcttttcatatagctgctcgacaaccattattcttaaacctccttttccaaatataaataaatttatattgaatataaaagtatgtaaaacatagaaaaagaaaaaaatgcaaaatcataggtagtgccattaaacaaggacagctatttagctttttaattactgctatatacatttatatacacatattttctgtatataatattttttgcattttgatgaaatagattggattcacatttctttttgcttttcattccctagctgtgtgactttttgacaagtcatttaagctctctgtgctttattcttctcatccgtaaggttagaaaaatatcatctacttctccatataatcgtgaagattaaatgaaatgatccatgcctggctttgagtaagaactcaatgaatacttagctgctattaccactggtactactaataataccatcaccagtaccaccaccaccactactacgtgcttttgtgttctgcaattatttactttaaagttattataacaaacatttccccagtttatcaggaactttgtatgaaccatttgagggctgcatacagatgtatttaatttgctttagcattcttgcttgtatcttttataaacaacaccttgatgaacctctttggacataaaacatttaaagtttttttttatttttaaaataatccataacccattccatctagtggcggtctcaattgctttaattcattgctgagttatatagattatatggatttttgttatctgaccttggaaactatattatttttatataggaaaartaattctacatttcaattactaaagtaaacaatgcctttggaaactaattactttataaagtggtgattgcatataggtatgagttttgtcttcatgtttgcacatacatgca

SEQ ID NO: 40729 - DNA, 1170 bp, Homo sapiens
ggatccaaagtgaatttaagaaagatcaaagactatgtagtatgcataataaaatttagttttaaaaacgaattctacaactataaagtaagagagatayaaattctacaactatagagtaagagagatataaatttaaaaaaactttcatcaaaaaatgaggtgtttcataaacttatgagtatgataaggaaatatgagtatgataaggaattcaaaaataattgattttatttcagttaagcatggctagaagaatagggttcagaaaaagggaggttacatgtcttcttttcattgattaaatagatgtcagaattctaaagtcctgtcatattctgcctgaaatactaagttccattccaggtacagcattttaagcaagatattgagaaactgatatatacccagagaactaagatcaaatggtgacagagaatttagactcaagtatttgtggaatccttaaatagtctgtctgacctggagaagacagagctcctcttaaatatttaagaaatgtccttgtatacacaggattgaaatccttctaggaggcttccagaaattaaaaaacaattagtgttaacaatcataagctactgttacccaaatgaccccaagtcccttagctttttatgatcatctttttcttcactatccaaacaaaataaccttacttccttccccatatctccacaactccctagaggtaggagaaagttgctgacattccacaatgcatttcctcgactctcatctgttggttctgctccaggctttttgtcatgcatttttagtatgtctggttgcctcaccctcttcctataactgtcctagattttccaccccaagtcacctctttttttttatttcacaaagtaccattctgcaatgttactttgtaacagactttagctaaaaactttggttcatagagcagccttacagcacaaaaccgaaagatataatcaaacatcaaaaaagcaatattcttggagtcaatctgcccatcatcatgtttttggacatggttttcttgtttctttcctgagttccacaaccccaatttctagcttttggactaccatcaaatcaaagccaactttctactcctttgtccaactttatttcttttattcatttgctccttatttcatataatatcct

SEQ ID NO: 40730 - DNA, 1170 bp, Homo sapiens
ggatccaaagtgaatttaagaaagatcaaagactatgtagtatgcataataaaatttagttttaaaaacgaattctacaactataaagtaagagagatacaaattctacaactatagagtaagagagatataaatttwaaaaaactttcatcaaaaaatgaggtgtttcataaacttatgagtatgataaggaaatatgagtatgataaggaattcaaaaataattgattttatttcagttaagcatggctagaagaatagggttcagaaaaagggaggttacatgtcttcttttcattgattaaatagatgtcagaattctaaagtcctgtcatattctgcctgaaatactaagttccattccaggtacagcattttaagcaagatattgagaaactgatatatacccagagaactaagatcaaatggtgacagagaatttagactcaagtatttgtggaatccttaaatagtctgtctgacctggagaagacagagctcctcttaaatatttaagaaatgtccttgtatacacaggattgaaatccttctaggaggcttccagaaattaaaaaacaattagtgttaacaatcataagctactgttacccaaatgaccccaagtcccttagctttttatgatcatctttttcttcactatccaaacaaaataaccttacttccttccccatatctccacaactccctagaggtaggagaaagttgctgacattccacaatgcatttcctcgactctcatctgttggttctgctccaggctttttgtcatgcatttttagtatgtctggttgcctcaccctcttcctataactgtcctagattttccaccccaagtcacctctttttttttatttcacaaagtaccattctgcaatgttactttgtaacagactttagctaaaaactttggttcatagagcagccttacagcacaaaaccgaaagatataatcaaacatcaaaaaagcaatattcttggagtcaatctgcccatcatcatgtttttggacatggttttcttgtttctttcctgagttccacaaccccaatttctagcttttggactaccatcaaatcaaagccaactttctactcctttgtccaactttatttcttttattcatttgctccttatttcatataatatcct

SEQ ID NO: 40731 - DNA, 1170 bp, Homo sapiens
ggatccaaagtgaatttaagaaagatcaaagactatgtagtatgcataataaaatttagttttaaaaacgaattctacaactataaagtaagagagatacaaattctacaactatagagtaagagagatataaatttaaaaaaactttcatcaaaaaatgaggtgtttcataaacttatgagtatgataaggaaatatgagtatgataaggaattcaaaaataattgattttatttcagttaagcatggctagaagaatagggttcagaaaaagggaggttacatgtcttcttttcattgattaaatagatgtcagaattctaaagtcctgtcatattctgcctgaaatactaagttccattccaggtacagcattttaagcaagatattgagaaactgatatatacccagagaactaagatcaaatggtgacagagaatttagactcaagtatttgtggaatccttaaatagtctgtctgacctggagaagacagagctcctcttaaatatttaagaaatgtccttgtatacacaggattgaaatccttctaggaggcttccagaaattaaaaaacaattagtgttaacaatcataagctactgttacccaaatgaccccaagtcccttagctttttatgatcatctttttcttcactatccaaacaaaataaccttmcttccttccccatatctccacaactccctagaggtaggagaaagttgctgacattccacaatgcatttcctcgactctcatctgttggttctgctccaggctttttgtcatgcatttttagtatgtctggttgcctcaccctcttcctataactgtcctagattttccaccccaagtcacctctttttttttatttcacaaagtaccattctgcaatgttactttgtaacagactttagctaaaaactttggttcatagagcagccttacagcacaaaaccgaaagatataatcaaacatcaaaaaagcaatattcttggagtcaatctgcccatcatcatgtttttggacatggttttcttgtttctttcctgagttccacaaccccaatttctagcttttggactaccatcaaatcaaagccaactttctactcctttgtccaactttatttcttttattcatttgctccttatttcatataatatcct

SEQ ID NO: 40732 - DNA, 1166 bp, Homo sapiens
ttcatgatgtcatgaacaacccatgatcttaaagtaaaatttactatgcaagtgtttaacatctttgtacaaaatactatatcccatttgtaaacaaaataactatgttagaaaaatattttttaaatgaatcagtttttttcatgttagaggccaatgggggcactccaacaggaataaaatagatgaaatcaggccgggcactgtggctcatgcccgtaatcccagcactttgggaggccgagatgggtggatcacaaggtcaggagttcaagaccagcctggccaacatggtgaaaccctgtctccactaaaaatagaaaaattagctgggcgtggtggcgcccacctgtaatcccagctactcaggaggctgaggcaggagaattgcttgacccgggaggcagaggttgcagtgagccaagatcrtgccactgcactacagcctgggcgacagagcaagacagcatctcaaaataaataaataaacaaaaataaataaaataaaatagacgaaatctgaacacataaagagtactgttgttaattttgatctttctgaagagtcaaaacataggacaggatgtatttatatattataaagaagacactgagtatagatagtacagatatgattcctcctgtaagtcagaaagtgaaaaaaaattggctgtcttcaaacaatttagaaaaaaaaagttaaagatttgccttcagtttcttcacattctttatccaaagaaggacagaaaacctgagaataaagaatattctctgagcctcaaaagcaaggaaggaaagtggtcaaagacacgaatgagaggaggcaatgagaagtaagccacaaggctttctgagggaaagggaccgagttcacaacgtatcaataaaataagaaaggccagaaaatagtggtatggaagagagaagcttagtgtaaatattgaaagaggactctcatatttgctgtgatatctaagagtcagcagtgaatgtttgacatgcactaccttagacttttggctccactaaatggcagttaaaaaaaaatcaaaacaaaacaatcatttaaaaagaccaaatctgcttctagaatgtctccaatctgttatattttatagccccactaaaaatgaattaagtatgcttctaatctaatcggatcc

SEQ ID NO: 40733 - DNA, 1166 bp, Homo sapiens
ttcatgatgtcatgaacaacccatgatcttaaagtaaaatttactatgcaagtgtttaacatctttgtacaaaatactatatcccatttgtaaacaaaataactatgttagaaaaatattttttaaatgaatcagtttttttcatgttagaggccaatgggggcactccaacaggaataaaatagatgaaatcaggccgggcactgtggctcatgcccgtaatcccagcactttgggaggccgagatgggtggatcacaaggtcaggagttcaagaccagcctggccaacatggtgaaaccctgtctccactaaaaatagaaaaattagctgggcgtggtggcgcccacctgtaatcccagctactcaggaggctgaggcaggagaattgcttgacccgggaggcagaggttgcagtgagccaagatcgtgccactgcactacagcctgggcgacagagcaagacagcatctcaaaataaataaataaacaaaaataaataaaataaaatagacgaaatctgaacacataaagagtactgttgttaattttgatctttctgaagagtsaaaacataggacaggatgtatttatatattataaagaagacactgagtatagatagtacagatatgattcctcctgtaagtcagaaagtgaaaaaaaattggctgtcttcaaacaatttagaaaaaaaaagttaaagatttgccttcagtttcttcacattctttatccaaagaaggacagaaaacctgagaataaagaatattctctgagcctcaaaagcaaggaaggaaagtggtcaaagacacgaatgagaggaggcaatgagaagtaagccacaaggctttctgagggaaagggaccgagttcacaacgtatcaataaaataagaaaggccagaaaatagtggtatggaagagagaagcttagtgtaaatattgaaagaggactctcatatttgctgtgatatctaagagtcagcagtgaatgtttgacatgcactaccttagacttttggctccactaaatggcagttaaaaaaaaatcaaaacaaaacaatcatttaaaaagaccaaatctgcttctagaatgtctccaatctgttatattttatagccccactaaaaatgaattaagtatgcttctaatctaatcggatcc

SEQ ID NO: 40734 - DNA, 581 bp, Homo sapiens
atacgttgttatctggcttcattatgtcctcagggtgtggtgcctgtccaaagctggctatctctccgtccagtggtctgcccacaactccctttcagtcctggccttcaggtgatcaastcctgctctgggatcattctgctcctctagttgaaccttatggatgggattccttttaagatatccccagctggctcccttgtgctggacccacacaccttttccttgtcttcactttttgctctactctctcagatacaatcatcaacctcagcctctttccttagtcttgacctctgacttcttccacctcttttatatcctcagggtgacgtttagcacaagtttcacaatcttttagcaagctctgcataggtggtctgggctctggggcctgttcgaaacctccaagataggaagagccctatggtaacattctgttacatgtggctgaaacagagagtgtgtatggtaggagtgcaggtggacagcgctggctagggctaaataaatttttactctccaggcaacgaagagtcatcaaaggcttttgagcagagagttccaagtcaggagaaggt

SEQ ID NO: 40735 - DNA, 319 bp, Homo sapiens
gggccctcctccagtgccttctcagagccccccactgtcccctttccactgggtccttggttctgctcatcctctctccttggcaaagaatgagaactyggggtcagctgtaggtaggatgactcacttgtacacaggtcttgatgctgagctccaaacagtcagtatcacgtaatgcacctgccactgtctcctccatgccagccacagagccaccctggccaccagactcagatgctgctcatttgagctctgaagggaaatgcagggccctggtttcttgagaaagtgattcccttctctccagcagagctgccaa

SEQ ID NO: 40736 - DNA, 319 bp, Homo sapiens
gggccctcctccagtgccttctcagagccccccactgtcccctttccactgggtccttggttctgctcatcctctctccttggcaaagaatgagaactcggggtcagctgtaggtaggatgactcacttgtacacaggtcttgatgctgagctccaaacagtcagtatcacgtaatgcacctgccactgtctcctccatgccagccacagagccacccyggccaccagactcagatgctgctcatttgagctctgaagggaaatgcagggccctggtttcttgagaaagtgattcccttctctccagcagagctgccaa

SEQ ID NO: 40737 - DNA, 1537 bp, Homo sapiens
  misc_feature (1)...(1537): n = A,T,C or G
ttgacttctcacccccgtttaaataattatttttggtatctgtaacatccataataggatcacaagtaccaatctatgaacttacacccactttcccttctcatctgtacaaatttcattaacaaagtagaaggggattctccctcaccctttcaaagaattttgaatgtattttgtgtgggcttattccaaagcagaactcagcgaacattttctgtaaagcgaagacagtaaatattttagtctttgtggaccacatacagtctctgttatatatactttttttttctttctttctttttttttttttttttttcatttgcagcttgaagggccatacatagataggtcagatttggcctgtaggcgaagttcactgactcttgttccaaagcatatggttctttatcactacagcagtggtctccaaaattttttaaaagtgtatccctcttaaaaaagcttcaagaatgtactcacagcctagatactgaaatgtttatttttatttataaaacattagatgtttttatcaaactaataaattatgtacattataaaacatgctcaaaaatataaatttaaaaagcatgagatgaaatgtgaatgtaaatagaagttctaaaagttctttctgtgccccaggagatcatcttgcctactttttgagcaatctgcatttcatcttggagttctccctgttggaggaaaaagatgatgcttgtcacatgacactggcccacaattttctagaagatcttaatatcagcctttatcttgagcctacttaaacccaagggaacttgattcatttggacctgccaaaataaaggttgaaaaacattacaagaatagacttaaaaaattagttctcaaagctattcagaaaatagactatratagaaaataagctcttcaagattataaaagtctccttcagggtcataatttattaaccatttcatttttttcactggtgaatgtacagtcttttaatgtgatatatcacttgaaatgccaaggctaccttttgggaaacagcatggaatccaggtaaatgcatttacttatgaaaccggactgttaagtgacnnnnnnnnnnnnnnnnnnnnnnnnnnnnnnnnnnnnnnnnnnnnnnnnnnnnnnnnnnnnnnnnnnnnnnnnnnnnnnnnnnnnnnnnnnnnnnnnnnnnaacaacgccccctccctagccttgttgggttttgacagtatcagggtatcagaaaagggaaaaacagtggcatagtaaagtagtaaaagaggctcagagagaagttgttatacacaacacagattagtgacaagctaggctattaacgatccaatattggacccatgacaattttttgtgatatgtagtatatggtaggtactttacgggggggagctaagtgctttacacacatttcctcattcctcctcagtcttatgagataagtaccaccacacccttttaggttaattttctaaatggtgtagaaaaagagcacacaacagagctacttttaggtaccaa

SEQ ID NO: 40738 - DNA, 1259 bp, Homo sapiens
tttctagctgaacataacagaaacatcttgacacagcttctttttctctagagaaattccaggtatggagtttcctagactgagttatgaatcctgtaaagattgttacagctctccaataactcattttctgaatttccttccccctttagtagaggcacttcttccttttaggcatacttaggctttcttgtggcatrcattcccctacaccctaccctagtagggtaggtaagtctctgattcctgtgatagatgctatttgcctgcttgactttgaatcagcctcagtaaaccaagcacgtgcacattaatttgaattatcacaagaaagactccatacctctcttccctaccttgatttcatacgtcatcgaccacgtaaggagatggaggagggaagggtaaggggttcactgcaattaagtgttgatagtttcttttgagcactttctttggatttattgaggttgagcctgttaacccaaacaaggaaaaaaaagtgactaattatctttaattttggaattggatgtaaactctactgttgaaaaatacatttaataacacttcctcttaacctatgtgaatttgaaaagaagttacttcttgtgctctaggaacttgctatggtttggatgtttgtctccccagatctcatgttgaaacttgatccccagtgttggaggtgagacctaaggggaggtgcttgagtgattcttgggtatagatctctcatgaatggtttggtcccatcctcatggtaatgagtgagttcttgcactattagctcctatgagaactggttgtttaaaaaacctagcatctccctgccctcctcccttgctgcttctctcaccatgtgatttctgcacatgccctttgtttcccaccttgagtggaagacacctaaagtccttaccgggagcagatactagtaccatacttcttttacagcctgcagaaccatgagccaaataaacctcttttctttataagttactcagcctcaggttattcctttatagtaacacaaataggctaagacagaactagaacctaaactctgtttccaaaacgacgagcaagtttgaataaaatcaagtaagtgttagaaaaaaattcttattgcgtttgcatgaatgtgtacacatatgcctgtgtatatctactatctacacacacatgtatgtccacttatatgtaggaaacagtcagtattttttgacaaatttgatattttaggcatttacatgggg

SEQ ID NO: 40739 - DNA, 1259 bp, Homo sapiens
tttctagctgaacataacagaaacatcttgacacagcttctttttctctagagaaattccaggtatggagtttcctagactgagttatgaatcctgtaaagattgttacagctctccaataactcattttctgaatttccttccccctttagtagaggcacttcttccttttaggcatacttaggctttcttgtggcatgcattcccctacaccctaccctagtagggtaggtaagtctctgattcctgtgatagatgctatttkcctgcttgactttgaatcagcctcagtaaaccaagcacgtgcacattaatttgaattatcacaagaaagactccatacctctcttccctaccttgatttcatacgtcatcgaccacgtaaggagatggaggagggaagggtaaggggttcactgcaattaagtgttgatagtttcttttgagcactttctttggatttattgaggttgagcctgttaacccaaacaaggaaaaaaaagtgactaattatctttaattttggaattggatgtaaactctactgttgaaaaatacatttaataacacttcctcttaacctatgtgaatttgaaaagaagttacttcttgtgctctaggaacttgctatggtttggatgtttgtctccccagatctcatgttgaaacttgatccccagtgttggaggtgagacctaaggggaggtgcttgagtgattcttgggtatagatctctcatgaatggtttggtcccatcctcatggtaatgagtgagttcttgcactattagctcctatgagaactggttgtttaaaaaacctagcatctccctgccctcctcccttgctgcttctctcaccatgtgatttctgcacatgccctttgtttcccaccttgagtggaagacacctaaagtccttaccgggagcagatactagtaccatacttcttttacagcctgcagaaccatgagccaaataaacctcttttctttataagttactcagcctcaggttattcctttatagtaacacaaataggctaagacagaactagaacctaaactctgtttccaaaacgacgagcaagtttgaataaaatcaagtaagtgttagaaaaaaattcttattgcgtttgcatgaatgtgtacacatatgcctgtgtatatctactatctacacacacatgtatgtccacttatatgtaggaaacagtcagtattttttgacaaatttgatattttaggcatttacatgggg

SEQ ID NO: 40740 - DNA, 1259 bp, Homo sapiens
tttctagctgaacataacagaaacatcttgacacagcttctttttctctagagaaattccaggtatggagtttcctagactgagttatgaatcctgtaaagattgttacagctctccaataactcattttctgaatttccttccccctttagtagaggcacttcttccttttaggcatacttaggctttcttgtggcatgcattcccctacaccctaccctagtagggtaggtaagtctctgattcctgtgatagatgctatttgcctgcttgactttgaatcagcctcagtaaaccaagcacgtgcacattaatttgaattatcacaagaaagactccatacctctcttccctaccttgatttcatacrtcatcgaccacgtaaggagatggaggagggaagggtaaggggttcactgcaattaagtgttgatagtttcttttgagcactttctttggatttattgaggttgagcctgttaacccaaacaaggaaaaaaaagtgactaattatctttaattttggaattggatgtaaactctactgttgaaaaatacatttaataacacttcctcttaacctatgtgaatttgaaaagaagttacttcttgtgctctaggaacttgctatggtttggatgtttgtctccccagatctcatgttgaaacttgatccccagtgttggaggtgagacctaaggggaggtgcttgagtgattcttgggtatagatctctcatgaatggtttggtcccatcctcatggtaatgagtgagttcttgcactattagctcctatgagaactggttgtttaaaaaacctagcatctccctgccctcctcccttgctgcttctctcaccatgtgatttctgcacatgccctttgtttcccaccttgagtggaagacacctaaagtccttaccgggagcagatactagtaccatacttcttttacagcctgcagaaccatgagccaaataaacctcttttctttataagttactcagcctcaggttattcctttatagtaacacaaataggctaagacagaactagaacctaaactctgtttccaaaacgacgagcaagtttgaataaaatcaagtaagtgttagaaaaaaattcttattgcgtttgcatgaatgtgtacacatatgcctgtgtatatctactatctacacacacatgtatgtccacttatatgtaggaaacagtcagtattttttgacaaatttgatattttaggcatttacatgggg

SEQ ID NO: 40741 - DNA, 1259 bp, Homo sapiens
tttctagctgaacataacagaaacatcttgacacagcttctttttctctagagaaattccaggtatggagtttcctagactgagttatgaatcctgtaaagattgttacagctctccaataactcattttctgaatttccttccccctttagtagaggcacttcttccttttaggcatacttaggctttcttgtggcatgcattcccctacaccctaccctagtagggtaggtaagtctctgattcctgtgatagatgctatttgcctgcttgactttgaatcagcctcagtaaaccaagcacgtgcacattaatttgaattatcacaagaaagactccatacctctcttccctaccttgatttcatacgtcatcgaccacgtaaggagatggaggagggaagggtaaggggttcactgcaattaagtgttgatagtttcttttgagcactttctttggatttattgaggttgagcctrttaacccaaacaaggaaaaaaaagtgactaattatctttaattttggaattggatgtaaactctactgttgaaaaatacatttaataacacttcctcttaacctatgtgaatttgaaaagaagttacttcttgtgctctaggaacttgctatggtttggatgtttgtctccccagatctcatgttgaaacttgatccccagtgttggaggtgagacctaaggggaggtgcttgagtgattcttgggtatagatctctcatgaatggtttggtcccatcctcatggtaatgagtgagttcttgcactattagctcctatgagaactggttgtttaaaaaacctagcatctccctgccctcctcccttgctgcttctctcaccatgtgatttctgcacatgccctttgtttcccaccttgagtggaagacacctaaagtccttaccgggagcagatactagtaccatacttcttttacagcctgcagaaccatgagccaaataaacctcttttctttataagttactcagcctcaggttattcctttatagtaacacaaataggctaagacagaactagaacctaaactctgtttccaaaacgacgagcaagtttgaataaaatcaagtaagtgttagaaaaaaattcttattgcgtttgcatgaatgtgtacacatatgcctgtgtatatctactatctacacacacatgtatgtccacttatatgtaggaaacagtcagtattttttgacaaatttgatattttaggcatttacatgggg

SEQ ID NO: 40742 - DNA, 777 bp, Homo sapiens
gggcttggccatatatttgccttgatcaatggaatatttgcaaacatgatacaagcagaggctttatacatcagctcactccctcttaagaggcttactgccatctgtaaggacgtactagctatcctgctaaagaaagaggccatgtgacaaaccaaggtgtcccaaccaagctctcagatgaatacggctgcatgagtgatcccagtcaaccctatgtgtgataaaagaatcactgcagaaccacaagaaagaatcaatgttgtttgaagaccctaaatttggaggtagccggacacaaaatagataactgaaatgcaaccctatcacatataaaayactttacctggaaacttgaaaaactgtaaagtgtttctaaaataaagggcattttgatcctgttagacaatagggtatctgatatccttgatttcaatcagataaagccattgacatctaaatgaatcatacaattaatgattcttacaatagaaagactgaattttacagattatggaaattatcattcttataccatggctaactaatgcttggacttcctctaaaacatcatttcttaaactgtagtttgaggtccattgattgatttcaggggccacatgaaaaagacgcctaactattttgtctttaattttttctgaatagtttaaaacataactttgtaataagtatttcatttacaagacattaagttaaagtattgttaactctagataacttagaatatcagtacactatttgtactatacatggtca

SEQ ID NO: 40743 - DNA, 777 bp, Homo sapiens
gggcttggccatatatttgccttgatcaatggaatatttgcaaacatgatacaagcagaggctttatacatcagctcactccctcttaagaggcttactgccatctgtaaggacgtactagctatcctgctaaagaaagaggccatgtgacaaaccaaggtgtcccaaccaagctctcagatgaatacggctgcatgagtgatcccagtcaaccctatgtgtgataaaagaatcactgcagaaccacaagaaagaatcaatgttgtttgaagaccctaaatttggaggtagccggacacaaaatagataactgaaatgcaaccctatcacatataaaatactttacctggaaacttgaaaaactgtaaagtgtttctaaaataaagggcattttgatyctgttagacaatagggtatctgatatccttgatttcaatcagataaagccattgacatctaaatgaatcatacaattaatgattcttacaatagaaagactgaattttacagattatggaaattatcattcttataccatggctaactaatgcttggacttcctctaaaacatcatttcttaaactgtagtttgaggtccattgattgatttcaggggccacatgaaaaagacgcctaactattttgtctttaattttttctgaatagtttaaaacataactttgtaataagtatttcatttacaagacattaagttaaagtattgttaactctagataacttagaatatcagtacactatttgtactatacatggtca

SEQ ID NO: 40744 - DNA, 441 bp, Homo sapiens
cacttaccctgatgctgacttcagaggcttccttttgttgtgactatttttattgccaattagataaaagatagtactcagtgacactggaagacagcatattacagtggaaaagttacaggttttaagccaaaagacrtaggatttagtttatttgtcagtggaattgccacatggctttagccagttgacttaaactttctgtccctcatctaaaaaaagtgagactaataatatctggcttacctaccacataggatttttgtgaagatcaaatcaatattagaaagtgtttggtaaagtataaaacactcaatgaatgctagttaaaaacaacagaattactcaatagtcaaatagtgtgttgtaaaatctgcagatggtgtaatgaattaccttaaacacttattaaagtaagcattcaaatgagtattgcatttc

SEQ ID NO: 40745 - DNA, 441 bp, Homo sapiens
cacttaccctgatgctgacttcagaggcttccttttgttgtgactatttttattgccaattagataaaagatagtactcagtgacactggaagacagcatattacagtggaaaagttacaggttttaagccaaaagacataggatttagtttatttgtcagtggaattgccacatggctttagccagttgacttaaactttctgtccctcatctaaaaaaagtgagactaataatatctggcttacctaccacataggatttttgtgaagatcaaatcaatattagaaagtgtttggtaaagtataaaacactcaatgaatgctagttaaaaacaacagaattactcaatagtcaaatagtgtgttgtaaaatctgcagatggtgtaatgaattaccttaawcacttattaaagtaagcattcaaatgagtattgcatttc

SEQ ID NO: 40746 - DNA, 1116 bp, Homo sapiens
tgatttttcacaatgttcatctaggtgggaacaaattctagatttctcagaaatctcattttatagaaatatagcattaggagtatactgatttggccttggcttttaaaattccttagaaagatagacagagagagagagagagagcaagaagaaaaagaaagaaagggagagacagagaaagaaagaaggaaagaaagaaagrgaaagacaaaagacgaagaaagagtgagactttattatttccagcttttcactgtcccaggagggcaggaaccctttaagaagcactttgtgagaatccaggagattgcttctcacttgaatggtatttgaaatttcctgtggactgtggatctgaaatcttagggtcaggatgaaggatttgtgatctaaggcttcttgatcctacctcctaaaaaaacacaaattaatattggtagagctcatcaccacaggattactatccagctgcatcaaatccagataaaactgagtaataaattcacaaagttgaatgttctttgtttttgaagcatcaagttaaaccttttatgtctgacactgttattcaaaacctaaaccagttctaagtttaaaaaccattgtaagaaaacttcaactttttaaggtttttagaatgatatttaaaatttggctgaacctaatttatggcttaaaaaaaagaggaaagccggaacatattcatgccctacctttgtatatggttcacattctgtgaaatagtttccacggggttgcgctaacaagggatactgaaaaaagaagcttcttgaggtcagtgtctcctcttgtttttactagcaatcagctagttttgccagttatgtgaccttgaacaaaatcacctttccatgccttagttttctcaaccgtgatacgggaataataatagtgatatcttatagagttgcataaggattaaaataataaatacaataaagcactagaacagtgccagaaacaaaagaaacactacattaggtgtcgtggttatgactgagatgatgctaattgtacaagaaaaaagatgaataaagagaatgtaagagagaggagagagagagagagagagagagagacagacagacagac

SEQ ID NO: 40747 - DNA, 1116 bp, Homo sapiens
tgatttttcacaatgttcatctaggtgggaacaaattctagatttctcagaaatctcattttatagaaatatagcattaggagtatactgatttggccttggcttttaaaattccttagaaagatagacagagagagagagagagagcaagaagaaaaagaaagaaagggagagacagagaaagaaagaaggaaagaaagaaagggaaagacaaaagacgaagaaagagtgagactttattatttccagcttttcactgtcccaggagggcaggaaccctytaagaagcactttgtgagaatccaggagattgcttctcacttgaatggtatttgaaatttcctgtggactgtggatctgaaatcttagggtcaggatgaaggatttgtgatctaaggcttcttgatcctacctcctaaaaaaacacaaattaatattggtagagctcatcaccacaggattactatccagctgcatcaaatccagataaaactgagtaataaattcacaaagttgaatgttctttgtttttgaagcatcaagttaaaccttttatgtctgacactgttattcaaaacctaaaccagttctaagtttaaaaaccattgtaagaaaacttcaactttttaaggtttttagaatgatatttaaaatttggctgaacctaatttatggcttaaaaaaaagaggaaagccggaacatattcatgccctacctttgtatatggttcacattctgtgaaatagtttccacggggttgcgctaacaagggatactgaaaaaagaagcttcttgaggtcagtgtctcctcttgtttttactagcaatcagctagttttgccagttatgtgaccttgaacaaaatcacctttccatgccttagttttctcaaccgtgatacgggaataataatagtgatatcttatagagttgcataaggattaaaataataaatacaataaagcactagaacagtgccagaaacaaaagaaacactacattaggtgtcgtggttatgactgagatgatgctaattgtacaagaaaaaagatgaataaagagaatgtaagagagaggagagagagagagagagagagagagacagacagacagac

SEQ ID NO: 40748 - DNA, 1116 bp, Homo sapiens
tgatttttcacaatgttcatctaggtgggaacaaattctagatttctcagaaatctcattttatagaaatatagcattaggagtatactgatttggccttggcttttaaaattccttagaaagatagacagagagagagagagagagcaagaagaaaaagaaagaaagggagagacagagaaagaaagaaggaaagaaagaaagggaaagacaaaagacgaagaaagagtgagactttattatttccagcttttcactgtcccaggagggcaggaaccctttaagaagcactttgtgagaatccaggagattgcttctcacttgaatggtatttgaaatttcctgtggactgtggatctgaaatcttagggtcaggatgaaggatttgtgatctaaggcttcttgatcctacctcctaaaaaaacacaaattaatattggtagarctcatcaccacaggattactatccagctgcatcaaatccagataaaactgagtaataaattcacaaagttgaatgttctttgtttttgaagcatcaagttaaaccttttatgtctgacactgttattcaaaacctaaaccagttctaagtttaaaaaccattgtaagaaaacttcaactttttaaggtttttagaatgatatttaaaatttggctgaacctaatttatggcttaaaaaaaagaggaaagccggaacatattcatgccctacctttgtatatggttcacattctgtgaaatagtttccacggggttgcgctaacaagggatactgaaaaaagaagcttcttgaggtcagtgtctcctcttgtttttactagcaatcagctagttttgccagttatgtgaccttgaacaaaatcacctttccatgccttagttttctcaaccgtgatacgggaataataatagtgatatcttatagagttgcataaggattaaaataataaatacaataaagcactagaacagtgccagaaacaaaagaaacactacattaggtgtcgtggttatgactgagatgatgctaattgtacaagaaaaaagatgaataaagagaatgtaagagagaggagagagagagagagagagagagagacagacagacagac

SEQ ID NO: 40749 - DNA, 354 bp, Homo sapiens
tcttatagtacagactaccctctcgtttaactgatcagttaggaatctcagagctgtagtttgttttgttgtgtagttggtttttgtaattcacctgtaaatcacagctgtctagctgaacacagcatccaggcaagcmacgtatcttacccaatcatgtgtccaaacttcatattttataattatctgcattatctcaatttgtattaccttaaaactacttcaaggggaggctcgattctacaatgaagctctaaaatgtgcaatgttaggttactgtttttgtaattccacagtaaaattccatatatacccttgagggtaaggattatgcttaatcatgatcatgcttaa

SEQ ID NO: 40750 - DNA, 367 bp, Homo sapiens
gccaaaattatatttttaaaaggatactatgctcaggaacatcagttttctcaaaaattcaagctattcattaattcatttacttcacaaatatttgagtacatactatatgcaaggaaatgtgtcaaatactgtcaagtaaaattatacaaaagttagctggccctctcccctaaaaggcttatgatccaytgagatcagcactcacatccctttaaaatactttatccccttgagctagaaaatttgagtgaggaagtattagaaaatatttgggcattccttaagtggtaattacctgatcttgcaatgacatcactggattattttaggtagtgttgatatgaaggacatggtatttattctt

SEQ ID NO: 40751 - DNA, 1290 bp, Homo sapiens
atgcatttaatcttcacaacaaacttctgaaccccaaatatggattgtatactatcctcgtattttaacagatgagaaaactaagacttggagatgtaaataatatgtctgattgactaagacttagagattaaatcatatgccttattggcctaataaaccaaggactttatgtgcacagtgctgcaagaaaaatacataagaactgattcttgttccccaactttccactgccagtgatctctttcattttctcctttctctgtggactccatgtcttaaaagtttttatttcccattgaacggcattactagttttaaaatattaaaatggatccctgcatgggagatctcaaaatcctggagtccctagtttggaacagttgaactaacactgcctccttgttttgcaattaaagaaacaggattccagaaaaggccagttatttgctaaggtaacacagctcctacttagaaaggaaagcactaaagcccacctctcattattccctggagccattactttttccatgacatatttctgcttctggaacatggcaccagccacagggacaatttggaacctaaccaccagtaagaggaaacagaaacagaatcactgaagaggtgtgtctggttttcacagcggccaatctgtgtgtgccacacctttcaccatagaggttatttacccaaagggaaggagtaaggagctccccactttgaaaccatgcagaataaagggggaaaaaaatcaaatacatttttaaagatagatgaactccaaagcagatttaaaatatgtgtaaaactcattcacatattacttgactaggcggcttcatatgaagayataatggtgtgtgctgagagggacaccaaactaggccattcttcctttcaatttagggtttgttttataagatgacataatgccttctagcttggtgctataaaggctgaaaaagtgaaagaaagtttcatgcaataaatgagacaaggtgaatttgagagtcaggtgagatcttgcccagggaaaattggggctcaagatctctcaccccattcctaggcacccactaagtcctgattacctgggtctaccaggacagctgaaaggaaataggaaaggggaaggaaaacaaccattaatgtctacagagcatctacttcctacatgataaacagtggactaggatttagaagaaatgaacagacttactcttcagagcggcaacccccggtgacaggctgactgtgtcaaagggcagcaaagtacgatggctatgc

SEQ ID NO: 40752 - DNA, 1290 bp, Homo sapiens
atgcatttaatcttcacaacaaacttctgaaccccaaatatggattgtatactatcctcgtattttaacagatgagaaaactaagacttggagatgtaaataatatgtctgattgactaagacttagagattaaatcatatgccttattggcctaataaaccaaggactttatgtgcacagtgctgcaagaaaaatacataagaactgattcttgttccccaactttccactgccagtgatctctttcattttctcctttctctgtggactccatgtcttaaaagtttttatttcccattgaacggcattactagttttaaaatattaaaatggatccctgcatgggagatctcaaaatcctggagtccctagtttggaacagttgaactaacactgcctccttgttttgcaattaaagaaacaggattccagaaaaggccagttatttgctaaggtaacacagctcctacttagaaaggaaagcactaaagcccacctctcattattccctggagccattactttttccatgacatatttctgcttctggaacatggcaccagccacagggacaatttggaacctaaccaccagtaagaggaaacagaaacagaatcactgaagaggtgtgtctggttttcacagcggccaatctgtgtgtgccacacctttcaccatagaggttatttacccaaagggaaggagtaaggagctccccactttgaaaccatgcagaataaagggggaaaaaaatcaaatacatttttaaagatagatgaactccaaagcagatttaaaatatgtgtaaaactcattcacatattacttgactaggcggcttcatatgaagacataatggtgtgtgctgagagggacaccaaactaggccattcttyctttcaatttagggtttgttttataagatgacataatgccttctagcttggtgctataaaggctgaaaaagtgaaagaaagtttcatgcaataaatgagacaaggtgaatttgagagtcaggtgagatcttgcccagggaaaattggggctcaagatctctcaccccattcctaggcacccactaagtcctgattacctgggtctaccaggacagctgaaaggaaataggaaaggggaaggaaaacaaccattaatgtctacagagcatctacttcctacatgataaacagtggactaggatttagaagaaatgaacagacttactcttcagagcggcaacccccggtgacaggctgactgtgtcaaagggcagcaaagtacgatggctatgc

SEQ ID NO: 40753 - DNA, 1290 bp, Homo sapiens
atgcatttaatcttcacaacaaacttctgaaccccaaatatggattgtatactatcctcgtattttaacagatgagaaaactaagacttggagatgtaaataatatgtctgattgactaagacttagagattaaatcatatgccttattggcctaataaaccaaggactttatgtgcacagtgctgcaagaaaaatacataagaactgattcttgttccccaactttccactgccagtgatctctttcattttctcctttctctgtggactccatgtcttaaaagtttttatttcccattgaacggcattactagttttaaaatattaaaatggatccctgcatgggagatctcaaaatcctggagtccctagtttggaacagttgaactaacactgcctccttgttttgcaattaaagaaacaggattccagaaaaggccagttatttgctaaggtaacacagctcctacttagaaaggaaagcactaaagcccacctctcattattccctggagccattactttttccatgacatatttctgcttctggaacatggcaccagccacagggacaatttggaacctaaccaccagtaagaggaaacagaaacagaatcactgaagaggtgtgtctggttttcacagcggccaatctgtgtgtgccacacctttcaccatagaggttatttacccaaagggaaggagtaaggagctccccactttgaaaccatgcagaataaagggggaaaaaaatcaaatacatttttaaagatagatgaactccaaagcagatttaaaatatgtgtaaaactcattcacatattacttgactaggcggcttcatatgaagacataatggtgtgtgctgagagggacaccaaactaggccattcttcctttcaatttagggtttgttttataagatgacataatgccttctagcttggtgctataaaggctgaaaaagtgaaagaaagtttcatgcaataaatgagacaaggtgaatttgagagtcaggtgagatcttgcccagggaaaattggggctcaagatctctcaccccattcctaggcacccactaagtcctgattacctgggtctaccaggacagctgaaaggaaataggaaaggggaaggaaaacaamcattaatgtctacagagcatctacttcctacatgataaacagtggactaggatttagaagaaatgaacagacttactcttcagagcggcaacccccggtgacaggctgactgtgtcaaagggcagcaaagtacgatggctatgc

SEQ ID NO: 40754 - DNA, 899 bp, Homo sapiens
ttagcagattattaatgaaaagtaatagaaaattaattggcatctctaatttttaaaaatgatttctttaataagagctatttctactgggccttttttttgaaatgagcaactctttttcaaatatattatcaaaaccatttggaatcattctggaatctaatctaaaaacgaacatacctatctcttaaatcttaccaggttataatttattaatttccacttattgttaaaaaaaagtttaaaggtaaactctggtagcgactaccttgtggatataataataagtaatattaaatagtttcatataatacagagcattctctgctattttctataatggtaaatgtggtaagagtaacttgagaaggaagtaaagcagcaaagctccttggttagtcaaagccatcagtgctgcgtacagacaatgttcagaatctgacctagggcatcaataaaacaactaagacagggactctttcaatgacacaaaagcgttatgtcattaatggagcttggattgtagcaatgtattcttataaggtgacaaattaaccatatggctacctcgtagacaacaaaactaaaatatattaaactctgtggggtaaatacacccacaggcaaatctaayatactgacatttttaatactaattgaagctgattgatttacgtattttacgttctcaactctccaaaatgatgtatttaatgttttatttttaaacacaattaaaaaataatatataaatatatacatactgcaaatgtaatacagataacaaattcatttaagcccatttatgcacattagtaacacaccatgtggcagaaagactaggactacaagaagaccccttggcgatttattttatattaaatccctaatggcctctc

SEQ ID NO: 40755 - DNA, 530 bp, Homo sapiens
tacctgacaccaaatggaatgacacttactgggggcccagatctgcctytattttatttatttatttatttatttttgagacagagtctagctctgtcacccaggctggagtgcagtggcaccatcttggctcactgcaacctctgcctcccgggttcaagtgattctcctgcctcagcctcctgagtagctgggactacaggtgtgtgccaccactaatttttgtatttttagtagagatggggtttcaccatgttggtcaggctggtcttgaattcctggcctcaagatctgcccacctctgcctcccaaagtgctgggattattggcatgagccaccacgcctgccatcaggtctgcttcttataggtcctgtttgattttggttttgtttgtgtagtttccccatcgtaagtcatcatctattacagcctctggcagccacctccctttccatcatccccttctgagaaaacaaggttggtgaacactgtgtcaaagtgcacattaaataataacctcaatgatgg

SEQ ID NO: 40756 - DNA, 530 bp, Homo sapiens
tacctgacaccaaatggaatgacacttactgggggcccagatctgcctctattttatttatttatttatttatttttgagacagagtctagctctgtcacccaggctggagtgcagtggcaccatcttggctcactgcaacctctgcctcccrggttcaagtgattctcctgcctcagcctcctgagtagctgggactacaggtgtgtgccaccactaatttttgtatttttagtagagatggggtttcaccatgttggtcaggctggtcttgaattcctggcctcaagatctgcccacctctgcctcccaaagtgctgggattattggcatgagccaccacgcctgccatcaggtctgcttcttataggtcctgtttgattttggttttgtttgtgtagtttccccatcgtaagtcatcatctattacagcctctggcagccacctccctttccatcatccccttctgagaaaacaaggttggtgaacactgtgtcaaagtgcacattaaataataacctcaatgatgg

SEQ ID NO: 40757 - DNA, 559 bp, Homo sapiens
gatgattctatactgagccttataactgatttcaagacagtgtgctaattttcagagatatggaagaaattttttttttcttttgtttgttttgagacagggtattgctcagttgcctaggctgaagtgcagtggcactattatggctcactgcagtctcttcttccctggctcaagtggtcctcccacctcagcctcctgggtagctggaactaaaggcatgcaccagcacactgggctaattttttctattttttgtagaggtggagtctcactatggtgcctaggctggtctctaactctgggactcaagcaattctcccacctcagcctcccaaagtgctgggattataggcttgagctgctgcgcytggccagaggagattatttcttaagattgttctgatgaaaccctaaaaagtgaaatcaacattctcagaaaccaataaaataagacaaatcttctggctttggcagggatgtgggaaacttacaggaaaaattatgggtttgccaatgaaaatcatctagacactgtgggttaaggaatctgtgggac

SEQ ID NO: 40758 - DNA, 583 bp, Homo sapiens
gtattctatttctactatagcatctccaaaggcaaaaaaaaaaaaaaattctatctcttgtaaccagcttctactccagttctgcatacagttgttgctccacacatgctgtttactgaatgtactcctactgaagagtgtccttggacttttatgattccagatttatacacaggaagtcaacataaaaaggcagaacatttctctgaatgctttctcaaatagcctgtgtggtattatgttgtgcttttttgtgcatgtgtggttaaaacatagatgatgactcatggaacaatgtcacatttcagacttagaaatgattatgaataattatccctgggctttggtttgaaaggtaaattgaaagttttgaatgagtcttttctttctcaccacttaatgatacctttaaaaaaaaaatcagggttkctggatgacctaatacagctgtttctgaaaagctgaatgtagtcaagcataagacctgagttaagtaactgcattccaaatacaagtcactaacatgaaagatttaaataaacaagtttctgacatcttaaagtcaattaatccattttaaaag

SEQ ID NO: 40759 - DNA, 640 bp, Homo sapiens
ttattgggagtttatggacaggcaggtacctctcataaactttgttcattcagccacttgaaataagccacgtgggttatgtgccacgcaaaatttcagtaatgggttttgggagtgtttagatagcaacaacttcatagactgaaccttttggtttttttttctttctctccaactcagaggttaaaaattaacctgaaaaatcmatgctgcaatatgaatgcgctgtatgtttcttgcatggacttgcagacactctgtaacggtgtttccagtctccagcagttcatattggaaggtgagctttcacatggacaagccctttgcgttgccaagtagtagtgatattacaagtttgaaagacatttagatgataattccaaaggccctcttatctccaaatccatcagaagctacctataatttcagtgcaatgagtgctgggcataggtggccattcagtgagtgagtaccccaacctttgggaagataagacaggctattctaatccagctgtacccatatagagcaattatcattttcactctggctcccaatgccttagatttactgggtcttcattgcaaggcaggaaccttggagttaattgaattcattggactatttatggctggagctg

SEQ ID NO: 40760 - DNA, 640 bp, Homo sapiens
ttattgggagtttatggacaggcaggtacctctcataaactttgttcattcagccacttgaaataagccacgtgggttatgtgccacgcaaaatttcagtaatgggttttgggagtgtttagatagcaacaacttcatagactgaaccttttggtttttttttctttctctccaactcagaggttaaaaattaacctgaaaaatcaatgctgcaatatgaatgcgctgtatgtttcttgcatggacttgcagacactctgtaacggtgtttccagtctccagcagttcatattggaaggtgagctttcacatggacaagccctttgcgttgccaagtagtagtgatattacaagtttgaaagacatttagatgataattccaaaggccctcttatctccaaatccatcagaagctacctataatttcagtgcaatgagtgctgggcataggtgrccattcagtgagtgagtaccccaacctttgggaagataagacaggctattctaatccagctgtacccatatagagcaattatcattttcactctggctcccaatgccttagatttactgggtcttcattgcaaggcaggaaccttggagttaattgaattcattggactatttatggctggagctg

SEQ ID NO: 40761 - DNA, 2598 bp, Homo sapiens
aaacaaaatatgtgattaactggaacacccccattcccataccaggctctgtaacaaagagttcattatacttcatgcagagctgctgctgcggcacacccgctaattggctccttggtagcctaaagcagcaaacatacttcctcaggaacctaccagtcagggaatgacatagaatatagctccatgactccaactagaaaagaaatggtaaaattactaagctgttaataaacagctaatgatataatagtatttagtcactttttataaattatcccttcaaaacttatctaataattttcaaaaagagctttattgccgtttactaaaacagagttgtctatctagtcatgccccaacttacaaaatgatgttccatggtcaagatcaagctcaaagttctccccattgaagaagcacttcccaatttccagtagactgaactgctcttttcatctacctttccacagtaaactccatgtacttctgtttaacacagtttattctgctttgattataggttatttcttacatatccctctccatagctggtgtggctaggactgtcatcccccatacctctccagccctagcagagctttacacacaacatttgtgaaacagttttttcttaatagcaatttgaattaaggtatactctaagaaggccaagctgattcaactaattgctttttaagtggtatcagtacttttatccaagatttctaagcttaaatatataaaatacataaagacattttgtttggtgtataatatattaaatatataagattttaatatttataagtatttattacatagaaatatattaaatatatcatgtsaaagaccaagaattaatccttaaaatataagttcaaagagataaatgtcaaatgtctggatcctaatagtcttagataccagttacatgcaggtaagaaaaatcacttcatagttaatttgtatcaccagcagctatttaaaacacctccgctacaaggtaactgtaccaccataaattaaatatacaggaatgctacctgtatttcaaaagttaaagcattattgtcatgggaaaaaagtaatcacagatgaggtgatcatagtggcccaactggaaatgttctaaacatagaagcctggaaaagtagtgtccacagaagtgagggctaattatgtaagaaatagaagttatcctcttagtgagaaactaacaaaaagtgtccaacagagacaagctttggtcaagccaaaaccacctgagagaaatatatttagtaatgtcaatgctaaggtgaaagaaacactttaaatgcatactttcacaaccagttactgaaacttccactcttgtgttcaaagaagccaaagtgtttcagtgctaaaaaacaaactttcaaaagctgctattgttttcatgctaacttgctagtctcaaacaattcaaaacacctaattcctagtctctaaaaaaaaaactaaaataatatagcacctcattaaaaaaacaaaaagaaaaaattcaaacctttctatcaagactacaatcccaagtttgattcaaagactatagacctgacattgttgtactaaattaaatgggttttaaaaatgttacatttcattaaacttaagacaccagctgaaaacataccattggaatagtttttattgtctcttctcccttaccagtccccccaatacccccctacccaaaagcagaatgggtaagtcccataatgggtaaatatttctcaaagatgttcccttcttctccctcctcactgccaaatgacctccatcaactctcactaaaacaattatattaacttcctaactagtttccctgtctcaagtccttcttccctttcccatcctctgtcctcaacagctacttcatgatagaagacattaattcaatcataccacaaaccaacttaaacattttcatggttccccagtgtctatacaatgtccaacccttaatatgaaattcagacctgatatttacacacctttttctatgagcacaaagagcaggatttatatctcaacaatatgatttccttatatacagcaaatattccaaaaataataatgaaaatatcatttgattttcagagctgaaattcagaaaaaaatcatcctgatgggctagagtagcaccactgagacagcaggtaacagaatgaatcaggagcctcgcaagggccttctttatattcttaacctttagagtataacatgttcttaataaatgtttgctgaatgtgggaattttctgagccaaaactcaagattcatacttcagaaatttcaaatttacacaggaaataactggaccaaatatttgaagttgggaatataaaatctcagacttgaaggtagcataggggcatgactggaggaacctgggcataacatgtaaaaaccaaactggtgccagggccacatctcctcgctggcctagatcctgactgttttaaagtagacaaggaaagcaaggttaatttgcaataggcaattttagccgacaagtcacaggtaaaaaataaactgaaaataaatgtttaagacaatttagaatcatac

SEQ ID NO: 40762 - DNA, 2598 bp, Homo sapiens
aaacaaaatatgtgattaactggaacacccccattcccataccaggctctgtaacaaagagttcattatacttcatgcagagctgctgctgcggcacacccgctaattggctccttggtagcctaaagcagcaaacatacttcctcaggaacctaccagtcagggaatgacatagaatatagctccatgactccaactagaaaagaaatggtaaaattactaagctgttaataaacagctaatgatataatagtatttagtcactttttataaattatcccttcaaaacttatctaataattttcaaaaagagctttattgccgtttactaaaacagagttgtctatctagtcatgccccaacttacaaaatgatgttccatggtcaagatcaagctcaaagttctccccattgaagaagcacttcccaatttccagtagactgaactgctcttttcatctacctttccacagtaaactccatgtacttctgtttaacacagtttattctgctttgattataggttatttcttacatatccctctccatagctggtgtggctaggactgtcatcccccatacctctccagccctagcagagctttacacacaacatttgtgaaacagttttttcttaatagcaatttgaattaaggtatactctaagaaggccaagctgattcaactaattgctttttaagtggtatcagtacttttatccaagatttctaagcttaaatatataaaatacataaagacattttgtttggtgtataatatattaaatatataagattttaatatttataagtatttattacatagaaatatattaaatatatcatgtgaaagaccaagaattaatccttaaaatataagttcaaagagataaatgtcaaatgtctggatcctaatagtcttagataccagttacatgcaggtaagaaaaatcacttcatagttaatttgtatcaccagcagctatttaaaacacctccgctacaaggtaactgtaccaccataaattaaatatacaggaatgctacctgtatttcaaaagttaaagcattattgtcatgggaaaaaagtaatcacagatgaggtgatcatagtggcccaactggaaatgttctaaacatagaagcctggaaaagtagtgtccacagaagtgagggctaattatgtaagaaatagaagttatcctcttagtgagaaactaacaaaaagtgtccaacagagacaagctttggtcaagccaaaaccacctgagagaaatatatttagtaatgtcaatgctaaggtgaaagaaacactttaaatgcatactttcacaaccagttactgaaacttccactcttgtgttcaaagaagccaaagtgtttcagtgctaaaaaacaaactttcaaaagctgctattgttttcatgctaacttgctagtctcaaacaattcaaaacacctaattcctagtctctaaaaaaaaaactaaaataatatagcacctcattaaaaaaacaaaaagaaaaaattcaaacctttctatcaagactacaatcccaagtttgattcaaagactatagacctgacattgttgtactaaattaaatgggttttaaaaatgytacatttcattaaacttaagacaccagctgaaaacataccattggaatagtttttattgtctcttctcccttaccagtccccccaatacccccctacccaaaagcagaatgggtaagtcccataatgggtaaatatttctcaaagatgttcccttcttctccctcctcactgccaaatgacctccatcaactctcactaaaacaattatattaacttcctaactagtttccctgtctcaagtccttcttccctttcccatcctctgtcctcaacagctacttcatgatagaagacattaattcaatcataccacaaaccaacttaaacattttcatggttccccagtgtctatacaatgtccaacccttaatatgaaattcagacctgatatttacacacctttttctatgagcacaaagagcaggatttatatctcaacaatatgatttccttatatacagcaaatattccaaaaataataatgaaaatatcatttgattttcagagctgaaattcagaaaaaaatcatcctgatgggctagagtagcaccactgagacagcaggtaacagaatgaatcaggagcctcgcaagggccttctttatattcttaacctttagagtataacatgttcttaataaatgtttgctgaatgtgggaattttctgagccaaaactcaagattcatacttcagaaatttcaaatttacacaggaaataactggaccaaatatttgaagttgggaatataaaatctcagacttgaaggtagcataggggcatgactggaggaacctgggcataacatgtaaaaaccaaactggtgccagggccacatctcctcgctggcctagatcctgactgttttaaagtagacaaggaaagcaaggttaatttgcaataggcaattttagccgacaagtcacaggtaaaaaataaactgaaaataaatgtttaagacaatttagaatcatac

SEQ ID NO: 40763 - DNA, 2187 bp, Homo sapiens
  misc_feature (1)...(2187): n = A,T,C or G
gggatcccatggaggaaagcagtgaagtctaactgggggcatcttgacaaatttcctaaagagaaggactcaggactgtttcttatagggtggctggatttctcaaggtggagaaaggggaaagagggcttgtgggccctggcagaatcttctgtgtgagcaaagacccagagatagggaatcacgtgtgcatctgcagtgtggtgaatattccagtatgacgagggcatagaggaaaaagatgacgtctaggaggtggtcttgctaagggcatactctagagttttctatgccctacttaggagtttgacttttatttctgagacaactaaaacccataaagggcacagtgatggagaaggaggccttactgatgtgtgcccttggccatgtcagaagctgtagacagtgagaataggctcagtgcagtttattcccaccgaagaggcaagcacatgacagtaagagggactaatgtttggagcagtctaccatgcccagggctgtgtgagtattttgtcctagcacnnnnnnnnnnnnnnnnnnnnnnnnnnnnnnnnnnnnnnnnnnnnnnnnnnnnnnnnnnnnnnnnnnnnnnnnnnnnnnnnnnnnnnnnnnnnnnnnnnnngttccaaagccaaccccaaaggccccttaacgggcccaaaagttgggaaaggggccgaagggaacggcttccctaacggttaatttgtgttgtggtcccttttgggggttccttagcgcttagactagcgcctgttaggcgcttaaaacctcctgtgacctggagtgtcgcttgatctcttggctttgttggcagaggagtccgcggaggcaaatgccatgtgcgctaaagtcctacacatttccgcaggagacaagccacaggccttgtcaaaagtctcctgatccttctaggtagaaatgaccactacattttggccctatttttgttgaaatcaccagtatctgtaactgtgtgctcyttgaggacctatctcctctctgtgttcctagaatctggcaaagggcctggcacagggtagatgatcagtctctgtttgtagaatgaatgagcaaattaatgatcagactgggatttttctaattcctcttggagttcatggccctcttaattggaagccaaagccaaaagcaacccttgcagttttcagaaagaggcatgctgaggctgagggctgtgaggatgacacacagttctagcatcagaaccaaatttacagcaaatagttcccataaacagcacaagcaactcagttaggctaatttatgttcacaccagggctgtcctggcccccaaagcccagaggtctttacaattccaaaatgattaaaagcatcatacaaacccatattttccatttttattaaaagcactaaggcgggcagtgctttctgcatgtcaatggggagctactttctgacccagggagaaaagccaaggcagaatctgcacatccagctctgggtatccttctgcctcaaaaccgcactatccttctgtccgttagaggagttctgcccctttcacccacttcctctgcgccatagcctgccccacccaagcccacctttgctcaaactatgttcagttagaggcacaaccctacttaaggtctttaaagactttactgtccaagcttcttaacctgacatccaaggaaggcctttcccagaatggtgcaaactgcctgcttcccctacaccttctgccatgattgattgcaagtttcctgaggaatctgcagccatgcctcctgtacagcttatggaatcgtgaatccattaaccttattttcattataaataaccagggtcagttagttctttatagcaatgtgagaacaggctaatacagtatgcttctgcattttggaatacaagctcaatgcaggtagggagttgtgtatgctttgttccttagtctatccccagaacccaaatggtgcctggcgcatagtaggcatcgaataaatatctatgaaaataataaaattacatttgtttttataacaacagaggcatctgcacctttgtttggtcgcctttcttttaaagaatttggtctcagcctcagggcaacactcccaatgcaggcagaaagcctagtttatttccagaccctccaactttcaacaaagaagctaaaggagccaaagagaa

SEQ ID NO: 40764 - DNA, 590 bp, Homo sapiens
atactcattactagctcgctcttcacgttccattcattctccaacttaccgtttgtattactccattctcacactgctataaagaaacatctgagactgggtaattcataaagaaaagaggtttaattgactcacagttctgcaggctgtacaggcagcatggctggggaggcctcaggaaacttacaatcatggaggaaggcaaagggggagtgaggaacttcacatggccagggcagcaggaagagagagaggagggaggtgccacatacgatctcggctcactgcaagctctgcctcccgggttcatgccattctcctgcctcagcctcccaagtagctgggactacaggtgcccgccaccaagcctggctaattttttttgtattttttttagtagagatgggatttcaccgtgttagccaggatggtctcgatctcatgacctcgtgatccacccacctcggcttcccaaagtgctgggattacaggcataagccaccacgcccggccaacgccacacacttttaaacaaccagatggtaggataactcactcactcactatcrtgagaacagcaccgagagggc

SEQ ID NO: 40765 - DNA, 631 bp, Homo sapiens
tttgggggttttttgttgtgttttgttttcattgcccaggctggagtgcagtggcatgaacaccgcccaccacagcctcaacctcctgggctcaagtgatcctcctgtctcagcctcccaagtagctggaactatgtgctcatgcagtcacgcctggctagtggttttgttttttgattttatgttttttgtagagacggtatctcgccaagttgccctggctactttcaaactcctgtgcttaagcaattctccctccttggcttctcaaagtgctggaattacagtagtcagccacctcttcttgtctaaatttttaacatttagttttaatagtaaacactgttacttgttcatatgcccttcctatctccttggtggttagggaaaggcactattttcatccttgctttaaaattaacctataaactaaattcctcccatagttaacatggcctatgtgcagagataaggaaggaagttaacctaaaatatataattggggagggtagcattaggagcaaaatggagttagtcatgataggcctttttttcactgttacaataacaaattgtttcagyatcatttatgaaacaatccaccaatcaatttacaacactaaccctatca

SEQ ID NO: 40766 - DNA, 525 bp, Homo sapiens
tagtattcccccatatcacataaaagaccagattagggttctaatcttcctttgtttctttcctggttccctacccagcgctcactagttgtggtgagcttttattatgtgtttgctaatccattactaaggaatggaaaaaaaaaaaacatatattcccctaggtgccatakttggaaactgatttttttttttaagttttaggttcagcagtatatgtgtagctttgttatattagcaaactgcatgtcacgggtttggagagcagtttatttcatcattcaggtaaaagcatagtacccaataggtagattttcagtgcccctcctcccatcttcatctgtcaagtaggcctcagtgtctgtttttcccttcttagtgcccatgtgtactcaatgtttggctcccatgtataagtgagaacatgcagtatttggttttctgttcctgtgttcatttaggatgatggcccccagctccactcatgttgctgcaaaggacatgatcttattctattttatggct

SEQ ID NO: 40767 - DNA, 630 bp, Homo sapiens
ccccccctcccacccctaaaaaaggctcatgtgaatccccttcctgaaacccatttaaaagatgcaccagttaggcctacattttgaaacggataacacctgctccactgaacatgacttgggaaggaataatttgcttggtggctggaaaataagtgcattaaattagcattgaacttgctttcgacccatttagtcttaaagagaacaaatcactggattatcagtagttcacagacaaggcaaaaagatacatttttgcaaagatctccattgtgggtaaacccaagatggcttaatttcagcctgatacagagtgcaaactcataaaagcaaattgcctgccacatagtaagtacacagtaaaaattagctgcaagtattcaattaaagagtaaagaattacagtctgagcataaaagtacttagtaattcattagaaaaaaatatgttataggcaggagtctgaggcccaacaaggggcagggatctgtccagggtcacacagcttgtaggagcagggccaggtttgaagttcatctggactcagatttctcacttatgacggggggaggggggagcacatctcaamgtgcttaataacctgggaattttaccgcaaaatgaatg

SEQ ID NO: 40768 - DNA, 606 bp, Homo sapiens
agcgggcaaaaagagtataatttaacctgctgtctggaagccatctgtgaagggaatcacttttcttttctggacttgtttccaggtgcagctgcaggggatgacaccgaagatacaagcactgagttcactgacagtattgaggaggaggctgcacaccatagtcaccagcaagtaagtcagtgtcagggtctgggacttccagggtggacagcacacagcccttctgaggtctgatagtctcctgcagcccttgcggacttagtgagaagatatctttttacataacctacttctcagtcatctwcctgttctccttgaacttcccagctgcctttccaacccatatcttcactccatttttctctccaatccaccctttggtttgtattgtatctctttcttctgcttccttccccctcctacccacctttgcccctatttattctctgtagctatagcttcagaagcatttttacttgcaagacgatggacacattccccttgggctttttgtaactgaaatgcaccacagaagacagggagtcatcgaagggctgctcggggaggtggcagggcggaggaactgcttgggaagaaactcca

SEQ ID NO: 40769 - DNA, 673 bp, Homo sapiens
ctatgaagggccagtagcttagggaccattttttatgaagacatttgaattcctttaagtattgaccacaaagctggggacatagcaactgtttagcaaatcttctattttactgattcatcaattggtacagatgaattattcttgcagtgccaggccatggaactgatatagagatcttagacttgttcttcatacaaaattgaaatatgcgtgtttccatttgttaatcttttggtatttgtattgcagaataaaatacagggtactcaattcaatttaaatttcagataaacaacaaacaatgttttagcgtttaagttatgtctcaaatattgcaaaggatatacttctaatgaaacaaattatttgttgtttatctgaaatttaaattgaagtagatatcttatatttttatttgctaaatctggtaatgctatttagtgttcataaaataataactttaaaggatatcctgaaaagacagggctatcattcccttcttttgaagaaattaggayattttcatctcactggatctgaatctatgttctaaccttggtcaaaaggtacctacttatgaggggaacaaacattcttctcagtatgtcactaaaaacgtactagtaatatgatctaaaatgccttgagtccaactgccttccagctctaa

SEQ ID NO: 40770 - DNA, 494 bp, Homo sapiens
ttcttaaagaatttaatctatttaaataatataatttgccaatgtgcttctctgcttccaaacactagaagccaaccaaatgttaagttcctcgaaagcaagaatgtttttcatctttgtaaacccagtgtttaccacaatgctgatatttggtggtgcttaataagtttgacttctttgttaagtgaatgattgatgaaggaggattctgttgtcaggattatgtgcttacaccataaggccatctgctttcataattccaaaaaaaaaaaaaatcacacaacattcatggaaaacttttctaaatgaaaacgtaaagtttctgttttttttttttttwaaatggaatctcactctatcccccaggctgaagtgcagtggcacgatctcagctcactgtaatctctgcctcccaggttcaagcgagtctcttgcctcagcctcctgagtagctgggattttgggtgctctccaccacgcccggcttatttttg

SEQ ID NO: 40771 - DNA, 616 bp, Homo sapiens
cactgtttttttctttcctggagaaataccctacacaataaaactatattcccctcgtgttgcccctttcttcaaagtaggtcagcaaaccctcgagcatatgttatgtggaaggaaggctctgtggcagataacagctatggacactcatctctgtcctcaaggggtttacacttcatttgcagaaaaacaacaacagctggcaggtattgaatacctcttgtgtgccaggcactattccaggcactttgcataggctatcrcattgactcctcctaacatgcttagtgaggtggtactagtgggtgagaaactgagaggctcagggaggttttgtgttttgcccaagatcacaactactgtgagtggtagagctggtctgtgtacctggcagtctgactccatgcacacctacctattaagtgctacagccagcaggtgccaccacttaacagttgctgctgtatatggattggttccccaacaagggtgcagatgcctggtagattcccaacatcttacctcttttgaatgcccaacagccccaggagcgctgtgctcccagttcaggttgactaaatgttctttgactgattgcacaggagaggggagatac

SEQ ID NO: 40772 - DNA, 616 bp, Homo sapiens
cactgtttttttctttcctggagaaataccctacacaataaaactatattcccctcgtgttgcccctttcttcaaagtaggtcagcaaaccctcgagcatatgttatgtggaaggaaggctctgtggcagataacagctatggacactcatctctgtcctcaaggggtttacacttcatttgcagaaaaacaacaacagctggcaggtattgaatacctcttgtgtgccaggcactattccaggcactttgcataggctatcacattgactcctcctaacatgcttagtgaggtrgtactagtgggtgagaaactgagaggctcagggaggttttgtgttttgcccaagatcacaactactgtgagtggtagagctggtctgtgtacctggcagtctgactccatgcacacctacctattaagtgctacagccagcaggtgccaccacttaacagttgctgctgtatatggattggttccccaacaagggtgcagatgcctggtagattcccaacatcttacctcttttgaatgcccaacagccccaggagcgctgtgctcccagttcaggttgactaaatgttctttgactgattgcacaggagaggggagatac

SEQ ID NO: 40773 - DNA, 827 bp, Homo sapiens
accatcttgtggctgcccaagtcatgacttctgtttgtgaattcctattaaatgtttatttctaagaaactggatttgtcaccctcttttttcagcctctgagctctctttctttttaaaaatagggatgggggtcttgctatgttgcccaggctggtctcaaactcctgggttcaagtgatccttctgcctcggcctctcaaagggctggaattacaggtgtgagccactgcaactggccagcctgtcagctctctyggtatttgtgggtaggattgtatagacctgcttatcatggaacagaccaacatacagaaatcttctttactgccctgtagactcagagactgagttaatagtttgttctagccattaactttttgttttcttttgtttattttcattggtttggttcatggggaccttgactaagaaacactccaaacttttggtatattgtcctgacagtcattatggtggcctccctgttgtgctgtattctctcaagctcttaaatgcacgtttgcagccatcaacgatgtaccagatggtctcccagtgattagagcaacaagaaggatatgaaccacaaaaggaatatttcttccacaagcttgacattgtgactagacagcctggctctcctaggcagcctccctgccccttatcccatctagggcagcttagcttctggaaccttccccaggaagctgagcagtttgtgctgctcaggaaggggcagacaccttgggaccctgcctcaggacctgcttgcatgggagtcagcccagccccctgccagaaggctctctgtgcctcctcccaca

SEQ ID NO: 40774 - DNA, 827 bp, Homo sapiens
accatcttgtggctgcccaagtcatgacttctgtttgtgaattcctattaaatgtttatttctaagaaactggatttgtcaccctcttttttcagcctctgagctctctttctttttaaaaatagggatgggggtcttgctatgttgcccaggctggtctcaaactcctgggttcaagtgatccttctgcctcggcctctcaaagggctggaattacaggtgtgagccactgcaactggccagcctgtcagctctctcggtatttgtgggtaggattgtatagacctgcttatcatggaacagaccaacatacagaaatcttctttactgccctgtagaytcagagactgagttaatagtttgttctagccattaactttttgttttcttttgtttattttcattggtttggttcatggggaccttgactaagaaacactccaaacttttggtatattgtcctgacagtcattatggtggcctccctgttgtgctgtattctctcaagctcttaaatgcacgtttgcagccatcaacgatgtaccagatggtctcccagtgattagagcaacaagaaggatatgaaccacaaaaggaatatttcttccacaagcttgacattgtgactagacagcctggctctcctaggcagcctccctgccccttatcccatctagggcagcttagcttctggaaccttccccaggaagctgagcagtttgtgctgctcaggaaggggcagacaccttgggaccctgcctcaggacctgcttgcatgggagtcagcccagccccctgccagaaggctctctgtgcctcctcccaca

SEQ ID NO: 40775 - DNA, 703 bp, Homo sapiens
ttttcttatagttcataatgaaactgctctatataaatcccaatctatttgataacaaatagcacaagtttccaataacctatatttctttgtctccctttgtcatcccagctcaaatacagcacttcaataacaatttgagtgacctaggcttgcagctgacatagtgtccaggtgattgccagctaatcaaagtgatgaaatttatcaatctgaaataattcacctgaagatgtacagctatagtacatattatgaaattattgggaaggtgcaaattatatattgtggaagtgagtgatctaaataaaaaactgcaaagtaagttaactaatacatgaagcattttaaatcaagcaattttaagatgttgagtgagaaataaactatctataaaaataaaagtaagggaatctatgaagacagttgcaacacattataaaatacaattatactataataattttgggaaagattattatacaaaatactaatacctagtttctatgtggtattctatgtattgtgctaagtgctttacacacattatcagaattaattctcaaagttaattcttaatttattctcttactattgaagtggccacattgtctggtgtatacaccctggggttagtcatctcatkctgggaaaatttaggacagggacacacacgaggagtttaggagtggaggtttaatag

SEQ ID NO: 40776 - DNA, 2142 bp, Homo sapiens
ccttcctcctgttctgaatccagggaaactaaatattccttcctcaccccttcctgctggcatgacagcttttatggaaattactgaggctctagcagttgagagaagggataaacatttgtaattttatcagttatttataagtctgtttttataagtcaggaaatgtgtatattgataaaatttctaaaatccccaactaaaatggtgacaaataaactcctttctcaaatatcaagtgaatgtttaaaaatcaaatcaataaatggaaaacatgcttctttgaaccattttgctcttacattgtttctgatcttctgaaaaggccaaagtgggagggaaagaaaatacaaaaagtaaaagagattcttaatatccacttacttaagaactgacaagcacatgatttgggagattaccagaaactgcaatgttttcatgttcttttgagcttttcaaaatgtgattttgaagaaattaaaacaagaactgcaattttccagaaattgctcaatattggagaaatatatatatatacacatatacatgcacatacatacacacataaatatggaaattacctaagtgtatatgaatttatgtatatatgcatgtgtatatgcatgtatacatacatatgtctatgtgtgtacataggtacacatgcacacatagttggattttttctaaatccgtatactttatcatccaacttactcactcatgataattgagaagatcattttgtaatcctttgcattggaatattagcatttttatactactggtcacagaagatcaaaaacagcaaatatggttaaccttgggctgaaactgaaagttacagcttttgtcctgtaccatgcagttctgttaacaccaaaacttttaaactattatgtaaataacttccaaaagaaataaaatatgcagttactctctctcatggctgaatttgagatctgggttaacaaaggttatttctattatacgccatggcaacaataaccaaaataccaaacacatattcttscaaatatctagaatcatcctaatctaaactattaaagggtcttcctttactggctcagcaaaagctccctaaacaggaaactgttttggtggtagagaccccatcaaagacttgaaagaagactatataatctttccttaacagtcgtttttttttccgggcatcttcctcactgttggaagctaccttaaggagatttaggaaattattaatagtaggcaaaaatcaacaaaatgggaaagggaaatagaaacatcccagtgcttccctttgcctaggaaaagctgtacttctccagtgatgtgaccttccccctgccattgggccagatcaccattcagtgaatatgccgtcttctctccaacagtcatgtgctctgaaactccgtctgtcagtaccaggaagatgtatgttttctctgtacaattcaaccacaggttgaatcaagggaagaagggttgggtagtagaaagagtctggagtcagatatcgctgaattccaatcctacttttgccaatcattaggtgtgtggccaagggtacatttctgagcctccattttctcatctgtgtaatgaaaataatatagcctgtctcataagttgttggtgtgttatttatgtgatgcacctagcatacagcagtaagggtggctgtggaccttactagagtggccataatataatgacccaagagctccaatctaccctagtctgctctttataatctgggaggattttatggtttttgtgcattaagactgttcttctgggtgaagtgtcatatgacagaataactgagatgccttttataagctcttcagacaggtaggattctagaatagaaatgggacaatgtaataattgagtttgaacttttacctaataagttaacatttttaaacattagcaaagcgatttggtgaaaacagtatggaatttgttccctcttcattgtctcccattaggagcccccggattaagcccagttcctccacttattaactacatggccttgaacaagttcacttacatcttgaaacttcagtttcctcatatgtaaaaatatcttactcatctctcagggctgtagtgagcattaaaataaca

SEQ ID NO: 40777 - DNA, 1502 bp, Homo sapiens
ccagacgaaaccacaactcagacacaagccaccaaagcaaagcaactcggccacaaagagtgtaaaatcccacaaaacgtgttcattcaacagtcttgatgcccatcaagctggacaatgtaaaaagtacttgtttacttaaaaggatctcagcaagtatactctaaaacagatttttcagagtcacagaatgattctgaatggataatctgaaaataagtatgaagacagttctgtaatggatgtataagtgaatactatctctggaaaatctgctctttggagatactgagtgccgcaattcgatcggctaattctggcatcaccttcctcctgaacagtcccccaggaccaaagaacacagtggaatttgcactaatgatccccaatggggctccaggaaggctgcattttggataataacttacatgttgaagcaggtttgatcatcctggttgagtgtacttgctaagaatgaatgaataaaatttataatgaaaataaatatagaaagcattgggttttgattaaaataccccatataaaattaagtatatcatagtaaattaactccactcttctctgccacactctcccctttctttgaacaatctcttctgtctccatattaagtttctatatggatggccatattctttggttaatctgacctcaatttatagcctctctcaataactgttctcctctcctcttcccagaattagtcttcctgacttaaattattatttaagtatgtcttaaagcattcctattcaaactaaatacgtaaccaaaaggaaagagcaggaagagtacaacagaactactcatttttactctttattctttttccctttactttttctggatcccatctaagtaattttcaaaataagtatcttaaacggaaattattctcctagtgaacagggatcaatttttgaaggggagggaaaaaaacccacttttctattgttattgtatgtttgatggaaagaaattattgacatatttttggcttttgtttttaagtatgtaggaccttgaagttcagtgaaggacaaagtccaaaaatcatggtgccttagaatatttattacagttcttctgtaagattaaaagtattatgcccgtgtaagaatcttagtagtgattcttacttggttaaaatcttaatattagcacttgttaaagtcttcttcagacagtgtttttgttagcaccrccctgagcatgtggttggctaacagtgccatgacagcaaaattggaaggtatattctcaaggccaccagaagccctagcccataccttcaactaaatcaaattaatttgattacactgatagaaaaacaatgactcatggtcaagatgtggtggttaggaaatgggacagaaagaatcctcagtaaagagcatccaccaaatcaaagacatcagaaaaaaacatttaaagcacatcaattagccaataaaatccaaggaagccaagaaggaataccg

SEQ ID NO: 40778 - DNA, 777 bp, Homo sapiens
aaccctccaaatcccagcactattgatttaaaacaacttgaaaagtttgaggagttgcctcatttttttgcttctattgtttcctgtatataaatagccttgcatggcctcatttatcactgtgacttctctggggaacttccatttcctgctaccttagcctcctacttgtacaaaaacatggaacagggagctaaatatcccaaatagaacaagtcattgaaaaaaaaagcaatcaatgatgtgtgtaaatcatctatctgcaggcaggggtatttagcaagggaatctcagtgagggtgtggaggagaaagatctgtataacacagcactagagaaatctgcacactcaagcctatctctgtccaagtgatgactggaaatcttggaagtgctgtctggctgtggaagaaaaccaggtggtggtaactgcttcaccatgtggcactgaggggcaaggcttggggaccagcatgaattaatcacaggcttttagaatgtcatcacattccttgggtctggctttggtgaattccaaagcaaaagctggaagagaaaggccatttcagcttcagcattttctttttcaaatgccagtgttgtggtttcaggttccctttgatgtcagtagcccagagcctttgcagagcgggaacccactgcacgtggcagatgtgttcagtgttttctgtagaaagagaygcggggatgagttctccaccattgaagaggccagtgaatgtgtagggccctcactgttgagcagctggctcagga

SEQ ID NO: 40779 - DNA, 665 bp, Homo sapiens
tccacctgcaatgggagtgagtgagattgagccactcctcaggtgaatggaaaattaaggccaaccaaggcccaccccatgccccactgtggggtctaaaaggagcaggcactggcctgctttctttttccctaaagaaagctctttggggacccagcagaaacagcagaggtggggatgcgagcttccgcctgcatttgttccagggtgggccagtgaggatttgggaggaatggtgtggaaaggccctgcccaagaaggctggatgctggctggggaatgcccagggtgccagctccctaccctggggaaaggccaggctggcatatgccggagccagggtccaaggtcacagagaggccacacctgggcacccctcccagcaagggaaggtccaagctgggaattacttctctttggaaagtgaggggagtggtacagaaataktgctattgttgctgttgtcctgtcacttctggcattggaaatggtgttgagcttctacgtgacgggcattggaggtcaaacctgaaacaggtgaggcccatccctttactaggctcacgttctaggtagggaggaggcaggtacctcctccacctaagaaacaacaagagatagagaatgcagtaactgtcctaaagagaaaaaccaggggatggaga

SEQ ID NO: 40780 - DNA, 1670 bp, Homo sapiens
  misc_feature (1)...(1670): n = A,T,C or G
catgacacgtaaccaccattatagtatcacacagaatagtttcatggccctaaaaatcctccgtgtcttacctatttatcacctcctttcctgttaaaccctggcaaccaccgatctttttaccatccccgtagttttgccttttccggaaagccatgtagttggaataatactgtawgttgtctttcatattggcttttttcacttaataataagcatttaaagttcctccatttcttttcatggcttgacagctcatttctttttagagctgagtgatattccattgtctggatgtgccaaaatttatttatccactcacctactcgaggacatcttggttgcttccaagttttggcaatgatgaataaagctactgctgtaaacatccatgtgcaggtttttatgtgaacataagctttcaactcctttgggtaaatatcaaggagtacttttgctggattgtatggcaatggtgtgtttagttttgtaagccactgccaaacttcagccgattcctggtttccctattctcggcaggctggcctcacaaagttcgtctcctgcagagctccaaggaagctggttttggctgaatctgaagatgatcaacactggtaggatgctgctgtgtcatagactggaaccccagctcctgatcatgctggagtggggctgctgctccctgcaaccccacctgcctcccccttgagctggaagagaagggctgacggccagagttctgccataccccactacgatcagatcaagctctgatcccaccaggccaggggctgtgcttccttgatcatataagcccaaggtccggggtcgctctcctggagtctgacatcagcccggctaggtcccagtgcgctgctctggaagggtcagaacgcttgttcctgagcttatctctgtggattttccctgatgaactctgatctagcaggcagtgtatgggctgctaagtacttttcccttgtttgctcaaggagtttgcggccccaagatcatttccaaagccttttgcttcagcttgctaaagggaagctgctgtcactctcttcagcttgctaaagggaggcggagttctgaggaaggcaggcaccttaagggatgttgaaagttgcctctgtttgctgtgcctaccacctacttctagtcctcctctcgccgcccagatcatcccctacaatgcattacccatgcctgccccccaccacccagaagctatgggggctctggtccaagccccacacttgtccgaaagaggtgcctgggccccacagaagccttgtcagatgatggcagctctcttctgatagttcaatggatctgccacctacacagagaggtctccaagtagctaactctctttgagtacncagctaaccatagtagtcaaatgaagggtttgaaccagaatattttcaagaatttgtgctcttctaagagtccatggtttttttaaaagttaatttaagttttaaaatttattttttattttatttaaacatttttatttattttttaaaatctttaattttaggtttncagggtacatnnnnnnnnnnnnnnnnnnnnnnnnnnnnnnnnnnnnnnnnnnnnnnnnnnnnnnnnnnnnnnnnnnnnnnnnnnnnnnnnnnnnnnnnnnnnnnnnnnnnctg

SEQ ID NO: 40781 - DNA, 1670 bp, Homo sapiens
  misc_feature (1)...(1670): n = A,T,C or G
catgacacgtaaccaccattatagtatcacacagaatagtttcatggccctaaaaatcctccgtgtcttacctatttatcacctcctttcctgttaaaccctggcaaccaccgatctttttaccatccccgtagttttgccttttccggaaagccatgtagttggaataatactgtaagttgtctttcatattggcttttttcacttaataataagcatttaaagttcctccatttcttttcatggcttgacagctcatttctttttagagctgagtgatattccattgtctggatgtgccaaaatttatttatccactcacctactcgaggacatcttggttgcttccaagttttggcaatgatgaataaagctactgctgtaaacatccatgtgcaggtttttatgtgaacataagctttcaactcctttgggtaaatatcaaggagtacttttgctggattgtatggcaatggtgtgtttagttttgtaagccactgccaaacttcagccgattcctggtttccctattctcggcaggctggcctcacaaagttcgtctcctgcagagctccaaggaagctggttttggctgaatctgaagatgatcaacactggtaggatgctgctgtgtcatagactggaaccccagctcctgatcatgctggagtggggctgctgctccctgcaaccccacctgcctcccccttgagctggaagagaagggctgacggccagagttctgccataccccactacgatcagatcaagctctgatcccaccaggccaggggctgtgcttccttgatcatataagcccaaggtccggggtcgctctcctggagtctgacatcagcccggctaggtcccagtgcgctgcyctggaagggtcagaacgcttgttcctgagcttatctctgtggattttccctgatgaactctgatctagcaggcagtgtatgggctgctaagtacttttcccttgtttgctcaaggagtttgcggccccaagatcatttccaaagccttttgcttcagcttgctaaagggaagctgctgtcactctcttcagcttgctaaagggaggcggagttctgaggaaggcaggcaccttaagggatgttgaaagttgcctctgtttgctgtgcctaccacctacttctagtcctcctctcgccgcccagatcatcccctacaatgcattacccatgcctgccccccaccacccagaagctatgggggctctggtccaagccccacacttgtccgaaagaggtgcctgggccccacagaagccttgtcagatgatggcagctctcttctgatagttcaatggatctgccacctacacagagaggtctccaagtagctaactctctttgagtacncagctaaccatagtagtcaaatgaagggtttgaaccagaatattttcaagaatttgtgctcttctaagagtccatggtttttttaaaagttaatttaagttttaaaatttattttttattttatttaaacatttttatttattttttaaaatctttaattttaggtttncagggtacatnnnnnnnnnnnnnnnnnnnnnnnnnnnnnnnnnnnnnnnnnnnnnnnnnnnnnnnnnnnnnnnnnnnnnnnnnnnnnnnnnnnnnnnnnnnnnnnnnnnnctg

SEQ ID NO: 40782 - DNA, 1670 bp, Homo sapiens
  misc_feature (1)...(1670): n = A,T,C or G
catgacacgtaaccaccattatagtatcacacagaatagtttcatggccctaaaaatcctccgtgtcttacctatttatcacctcctttcctgttaaaccctggcaaccaccgatctttttaccatccccgtagttttgccttttccggaaagccatgtagttggaataatactgtaagttgtctttcatattggcttttttcacttaataataagcatttaaagttcctccatttcttttcatggcttgacagctcatttctttttagagctgagtgatattccattgtctggatgtgccaaaatttatttatccactcacctactcgaggacatcttggttgcttccaagttttggcaatgatgaataaagctactgctgtaaacatccatgtgcaggtttttatgtgaacataagctttcaactcctttgggtaaatatcaaggagtacttttgctggattgtatggcaatggtgtgtttagttttgtaagccactgccaaacttcagccgattcctggtttccctattctcggcaggctggcctcacaaagttcgtctcctgcagagctccaaggaagctggttttggctgaatctgaagatgatcaacactggtaggatgctgctgtgtcatagactggaaccccagctcctgatcatgctggagtggggctgctgctccctgcaaccccacctgcctcccccttgagctggaagagaagggctgacggccagagttctgccataccccactacgatcagatcaagctctgatcccaccaggccaggggctgtgcttccttgatcatataagcccaaggtccggggtcgctctcctggagtctgacatcagcccggctaggtcccagtgcgctgctctggaagggtcagaacgcttgttcctgagcttatctctgtggattttccctgatgaactctgatctagcaggcagtgtatgggctgctaagtacttttcccttgtttgctcaaggagtttgcggccccaagatcatttccaaagccttttgcttcagcttgctaaagggaagctgctstcactctcttcagcttgctaaagggaggcggagttctgaggaaggcaggcaccttaagggatgttgaaagttgcctctgtttgctgtgcctaccacctacttctagtcctcctctcgccgcccagatcatcccctacaatgcattacccatgcctgccccccaccacccagaagctatgggggctctggtccaagccccacacttgtccgaaagaggtgcctgggccccacagaagccttgtcagatgatggcagctctcttctgatagttcaatggatctgccacctacacagagaggtctccaagtagctaactctctttgagtacncagctaaccatagtagtcaaatgaagggtttgaaccagaatattttcaagaatttgtgctcttctaagagtccatggtttttttaaaagttaatttaagttttaaaatttattttttattttatttaaacatttttatttattttttaaaatctttaattttaggtttncagggtacatnnnnnnnnnnnnnnnnnnnnnnnnnnnnnnnnnnnnnnnnnnnnnnnnnnnnnnnnnnnnnnnnnnnnnnnnnnnnnnnnnnnnnnnnnnnnnnnnnnnnctg

SEQ ID NO: 40783 - DNA, 1306 bp, Homo sapiens
ccgtgtggagtgtgggcgacatgggcaggggtaggggcagccgcgggcaactctcgcctctccacctctgcctccccaccccccagctccgcagggctccttcccaggctgccttagaagcgggtagggtggccccagggtgaggggtcacaacctgcccgccgcctccctgcagcggtggtgccctgtcccatggggctgaggcctctcatggacagagggcaggggccatacctgcctgtctttgctccaggcccgcagcccttaattttggagcaatgaagggaccccccgtaggcccaggtgggtctcaggatcggtctcctcgccaggggctcggaggagctacgtgcccccagtcccaccccaatgggcaagaggctccgagaccccacagacccacagctgggggaatgagggaggggtgtgggtgccttcctgagcctccctgcgaggcagggacagctgagaggccccagcagctcccggaacatccccatctgggctctggaggttactttggagcccctggagtgggggttcaagttttctttgggagcttggaaggcctgggggaccaggggtctgggggtggggagggcagggcccccgcccggtccgggaagcgcccctcccatggcaaagtgtttgcttctcgcatctcccagaggaagagcccataatgaaacgacaaacggtctgtaattagcccgaccagcagagaggtcccagcggaccccacggttttccataatgagctctgggagctcggtcaggagcctcatcaccgtgggcctgtgcccggggctcctggctctcttctcgctggaaactggtcctgggggcaccggtgacctctgacccactgcccttgccccaacagtccctcccccggacagtcagrgcccggcccactctgatgcccactcaggtgtctgtgtggggcaggtgggggtggggtcaggacacacccggcgggtgggctcttgtcttctggggagactaaggcaccgcccacacctccaaatccagagtctgctgttggcatccaagtgggagaaggctggacccccgtctcgggctcacacccccactacccgcacgccgcctcactcactggtcccaggtgtggcccttggccccctgcacggcgggacctgcctgggagctggttgatttttgggacaggtgtagtcagatttcatggagcgatgggggcggctggtgagccaccgcacgccatggggaccaggcagagtcaagcttccctggggctgtgtccacacgctgcgttgttccacggctg

SEQ ID NO: 40784 - DNA, 1306 bp, Homo sapiens
ccgtgtggagtgtgggcgacatgggcaggggtaggggcagccgcgggcaactctcgcctctccacctctgcctccccaccccccagctccgcagggctccttcccaggctgccttagaagcgggtagggtggccccagggtgaggggtcacaacctgcccgccgcctccctgcagcggtggtgccctgtcccatggggctgaggcctctcatggacagagggcaggggccatacctgcctgtctttgctccaggcccgcagcccttaattttggagcaatgaagggaccccccgtaggcccaggtgggtctcaggatcggtctcctcgccaggggctcggaggagctacgtgcccccagtcccaccccaatgggcaagaggctccgagaccccacagacccacagctgggggaatgagggaggggtgtgggtgccttcctgagcctccctgcgaggcagggacagctgagaggccccagcagctcccggaacatccccatctgggctctggaggttactttggagcccctggagtgggggttcaagttttctttgggagcttggaaggcctgggggaccaggggtctgggggtggggagggcagggcccccgcccggtccgggaagcgcccctcccatggcaaagtgtttgcttctcgcatctcccagaggaagagcccataatgaaacgacaaacggtctgtaattagcccgaccagcagagaggtcccagcggaccccacggttttccataatgagctctgggagctcggtcaggagcctcatcaccgtgggcctgtgcccggggctcctggctctcttctcgctggaaactggtcctgggggcaccggtgacctctgacccactgcccttgccccaacagtccctcccccggacagtcagggcccggcycactctgatgcccactcaggtgtctgtgtggggcaggtgggggtggggtcaggacacacccggcgggtgggctcttgtcttctggggagactaaggcaccgcccacacctccaaatccagagtctgctgttggcatccaagtgggagaaggctggacccccgtctcgggctcacacccccactacccgcacgccgcctcactcactggtcccaggtgtggcccttggccccctgcacggcgggacctgcctgggagctggttgatttttgggacaggtgtagtcagatttcatggagcgatgggggcggctggtgagccaccgcacgccatggggaccaggcagagtcaagcttccctggggctgtgtccacacgctgcgttgttccacggctg

SEQ ID NO: 40785 - DNA, 1306 bp, Homo sapiens
ccgtgtggagtgtgggcgacatgggcaggggtaggggcagccgcgggcaactctcgcctctccacctctgcctccccaccccccagctccgcagggctccttcccaggctgccttagaagcgggtagggtggccccagggtgaggggtcacaacctgcccgccgcctccctgcagcggtggtgccctgtcccatggggctgaggcctctcatggacagagggcaggggccatacctgcctgtctttgctccaggcccgcagcccttaattttggagcaatgaagggaccccccgtaggcccaggtgggtctcaggatcggtctcctcgccaggggctcggaggagctacgtgcccccagtcccaccccaatgggcaagaggctccgagaccccacagacccacagctgggggaatgagggaggggtgtgggtgccttcctgagcctccctgcgaggcagggacagctgagaggccccagcagctcccggaacatccccatctgggctctggaggttactttggagcccctggagtgggggttcaagttttctttgggagcttggaaggcctgggggaccaggggtctgggggtggggagggcagggcccccgcccggtccgggaagcgcccctcccatggcaaagtgtttgcttctcgcatctcccagaggaagagcccataatgaaacgacaaacggtctgtaattagcccgaccagcagagaggtcccagcggaccccacggttttccataatgagctctgggagctcggtcaggagcctcatcaccgtgggcctgtgcccggggctcctggctctcttctcgctggaaactggtcctgggggcaccggtgacctctgacccactgcccttgccccaacagtccctcccccggacagtcagggcccggcccactctgatgcccactcaggtgtctgtgtggggcaggtgggggtggggtcaggacacacccggcgggtgggctcttgtcttctggggagactaaggcaccgcccacacctccaaatccagagtctgctgttggcatccaagtgggagaaggctggacccccgtctcgggctcacacccccactrcccgcacgccgcctcactcactggtcccaggtgtggcccttggccccctgcacggcgggacctgcctgggagctggttgatttttgggacaggtgtagtcagatttcatggagcgatgggggcggctggtgagccaccgcacgccatggggaccaggcagagtcaagcttccctggggctgtgtccacacgctgcgttgttccacggctg

SEQ ID NO: 40786 - DNA, 1027 bp, Homo sapiens
cctgtggcctcctggccctcccagcccctgcactcccggcctctccatgctgctttgtggcctctgacccctgaccctcctgggtcagccagtggagaaggtctgcccctgagcctcagacgccctggcaggccccaccctggcaccacctctgccaacgtcaaaggccgctccccctggctctgccggacctgcagcccctccggcctcctggactcacctgggctctgcccctgcccccagccctcggccttctgggagccctcctggggggtcagccatgaggtcaggggggtcagtgaggtcatgaggatcagccatgaggtcagatsgggtcggccatgaggtcaggtggggttggccatggggtcactggggtgagccataaagtcaggtggggtcagtcatgagatggggttgggtcagccgtgcggtcaggtcaggtcggccatgaggtcaggtggggtcggccatgaaggtggtgggggtcatgaggtcacaagggggtcggccatgtggtcaggcgattacatgccctccttgccttccttccccgggcggccctcagctgctcccgcctgtcccctggcagggcgtgtcctctggagatacgggcggggctctcggggcagaggctggatggacggggccaggtccggtgctggagttcaagtgacactgactgaggttcccggggagcacaggccaggaggggccacggtgtcagccaggagggactgtggttgggtgtggaggggaggagcggggggctgtggggtgagacccctcccggctgactgggtgctgtgggcactgccggccgcatgccagggttctgcctcgtggggactccggcctgggcgagtgcaggtctcagagcgcaggtgcggcagtgaccccaggcctcagtcctctcccctcctgggggtgggaagggaggggagagaggcccggaaggccggggactcccgccaggggactgagggaggcctcggaggggtgggtggcctgtctgggaagctgctct

SEQ ID NO: 40787 - DNA, 1027 bp, Homo sapiens
cctgtggcctcctggccctcccagcccctgcactcccggcctctccatgctgctttgtggcctctgacccctgaccctcctgggtcagccagtggagaaggtctgcccctgagcctcagacgccctggcaggccccaccctggcaccacctctgccaacgtcaaaggccgctccccctggctctgccggacctgcagcccctccggcctcctggactcacctgggctctgcccctgcccccagccctcggccttctgggagccctcctggggggtcagccatgaggtcaggggggtcagtgaggtcatgaggatcagccatgaggtcagatcgggtcggccatgaggtcaggtggggttggccatggggtcactggggtgagccataaagtcaggtggggtcagtcatgagatggggttgggtcagccgtgcggtcaggtcaggtcggccatgaggtcaggtggggtcggccatgaaggtggtgggggtcatgaggtcacaagggggtcggccatgtggtcaggcgattacatgccctccttgccttccttccccgggcggccctcagctgctcccgcctgtcccctggcagggcgtgtcctctggagatacgggcggggctctcggggcagaggctggatggacggggccaggtccggtgctggagttcaagtgacactgactgaggttcccggggagcacaggccaggaggggccacggtgtcagccaggagggactgtggttgggtgtggaggggaggagcggggggctgtggggtgagacccctcccggctgactgggtgctgtgggcactgccggccgcatgccagggttctgcctcgtggggactccggcctgggcgagtgcaggtctcagagcgcaggtgcggcagtgaccccaggcctcagtcctctcccctcctgggggtgggaagggaggggagagaggcccggaaggccggggactccygccaggggactgagggaggcctcggaggggtgggtggcctgtctgggaagctgctct

SEQ ID NO: 40788 - DNA, 1192 bp, Homo sapiens
atattatacaaatatgtgccagtagataattcaaaacaatcagattacaaggtaccagtggaaaagaaagctgttttctgatcaagcctatgcttcaagtttttaatgaacctatttgattgcccatcccatttcaacaattatacttttaagtactgttggagtcacacaccaattatagactgctagatgctggctatggtaattactaatgtattccaccaaccccgtagttgacattcatgagttgtctgtttagaatcaaactcccccaacttcatccagagcgctcaggttttcctttgcaaaattacccaccaactattctcagttgtgtaacagttaggtaagagtaaccaaatatttgtcatagattagtttagcaactgatacatggtacaattctagctaacttgaatgaagcagctgtttgctggcagattctgagaaaggtaacaatctggaagtatagttattgttggtgctaccatgaaggagataacttgagaatctagatcacagagtaaccaacacaactgcaaagaagtgcaggaggaatatataaaacgttgcaactctcttgaattttgcaaatctctagatcatgcctgaaatcagatttaactgtatttttctgttatgtgagtcgttaaagtcacttttaaatttaagctagacttcataagatacaatcacatagaagaggatttcttaatgccagcactatttacattggctcaggtaaatctttgttgtggggatgggtgctgtcctgtgcattgtaggatgtttagcagaatccctagcctttgccctctacatgcttgtagatgcctccagtgactacaattaaaactgcttccagacattgccaagtgtttcctgtagtamaacatcactctctattgagaaccactaccacagagtgctaaaagacatcacgtgtgccttctcaccaaacattctctttttaactacaatgattttcattcacggatccacatattctttgtttgatgcctaaactaagccacatgactttactctttgaccatagatttgttaggagactgataaatgatgaaatttgggctgataaattttatgaaaagtttgtgtttacatctagagaaacaacagttcctttatcttctgaaaataggtaattcaattagatttgtgggattatgca

SEQ ID NO: 40789 - DNA, 1192 bp, Homo sapiens
atattatacaaatatgtgccagtagataattcaaaacaatcagattacaaggtaccagtggaaaagaaagctgttttctgatcaagcctatgcttcaagtttttaatgaacctatttgattgcccatcccatttcaacaattatacttttaagtactgttggagtcacacaccaattatagactgctagatgctggctatggtaattactaatgtattccaccaaccccgtagttgacattcatgagttgtctgtttagaatcaaactcccccaacttcatccagagcgctcaggttttcctttgcaaaattacccaccaactattctcagttgtgtaacagttaggtaagagtaaccaaatatttgtcatagattagtttagcaactgatacatggtacaattctagctaacttgaatgaagcagctgtttgctggcagattctgagaaaggtaacaatctggaagtatagttattgttggtgctaccatgaaggagataacttgagaatctagatcacagagtaaccaacacaactgcaaagaagtgcaggaggaatatataaaacgttgcaactctcttgaattttgcaaatctctagatcatgcctgaaatcagatttaactgtatttttctgttatgtgagtcgttaaagtcacttttaaatttaagctagacttcataagatacaatcacatagaagaggatttcttaatgccagcactatttacattggctcaggtaaatctttgttgtggggatgggtgctgtcctgtgcattgtaggatgtttagcagaatccctagcctttgccctctacatgcttgtagatgcctccagtgactacaattaaaactgcttccagacattgccaagtgtttcctgtagtaaaacatcactctctattgagaaccactaccacagagtgctaaaagacatcacgtgtgccttctcaccaaacattctctytttaactacaatgattttcattcacggatccacatattctttgtttgatgcctaaactaagccacatgactttactctttgaccatagatttgttaggagactgataaatgatgaaatttgggctgataaattttatgaaaagtttgtgtttacatctagagaaacaacagttcctttatcttctgaaaataggtaattcaattagatttgtgggattatgca

SEQ ID NO: 40790 - DNA, 565 bp, Homo sapiens
aaaataattgaaattaaaattcaaaggaaagcagaaagaatactttctatctcattctatgaggctatttttctaatgccatcaccaccatagcaaaaacaaaacaacaacaaaaacctgtagggaaatatctctcataaacaaaaagcaaaaaaccttaacacaatattagtgatactgacaaatgaatcctaaaatttatatgaagaggcaaaagacccagaatagctaacacaatactaaagaataaagttggaagactgtcacaacctgacttcaagacttactaaaaatctacagtaatccagacagcctggtgttggtgaaacaaaagatacaccgatcaacagaatagaagattagcactataagacagggtgagaaaaaaaaaaaaattagaagagcccagaatcagacccacatmaatacagtcaactgatctttgacaaaaaagcaagggcaattcaatggggaaaaggtatctttcagcaaatcttggaatgactggaagttcatttgtgtatgtgtaagagagagaatctagacatagagcttacacctttca

SEQ ID NO: 40791 - DNA, 796 bp, Homo sapiens
tttttttgtatttttagtagagacggggtttcaccgtgttagtcaggatggtctctatctcctgacctcttgatccgcccgcctcggcctcccaaagtgctgggattacaggcgtgagccaccgcgcccggccggaaactgaagtttttatttattgtttagcccttccaccataactttctttcccattattctaccagacacttgacaaatttcctaataatcttcacttaaaaaaaaatctcatggacacacccttatcctcgcctagcttggcctcacaatagcatttaacaaaatctctgcttccttttgaaacgtgaagttctctggctttcctcatttcatgattctttctgctcttgatatacatttgtatatgttgtctcctctacttctaaatattggagttcctgccaactggmttttggcttctttttcttcttcttcctataaaacctcatccattttctcggctttaaaaaccaccaatatggtgctgttaacatttatacctattgtctctagccctggtctctcccttggaatccaattacttaatcaatatctttacttagatgtttctatagactatatatttatgtccctcctaaattcacatgtggaaatcctaactctcaatgtgatggtatttggaggtggggccgttggtaggcagagcccttatgaatgggataagtgcccttataaaagagcccccagagagctccctcaccccttgtgttatgtgaggacacagcaagaagaaagctgtctataagctaggaattgagcc

SEQ ID NO: 40792 - DNA, 1900 bp, Homo sapiens
tgaaagacagatgcagaagccagaggccttgctgcttcacagtttgaaacggtaactgttttgcgtcctgtcccctttctagtttctgattccaggagctagaactcatgagggccagctgtacttttttattttttcctcctttaatctatggtactttgaattggtttctgtttcctccaactaaatgctccttaagacagacacccatattatctcaaacctaatctcgttgtctgcctgaatttagaaatatagccacatttctgggagagttctgaattgggaatcaggaggcctaatttctttcttttcttttcttgttttttatttttttgagacacagtttcgctctagttgcccaagatagagtgcaatggcacaatctcggctcactgcaacctccgcctcccaggttcaagcgattctcttgccttagcctcctgagtagctgggattacaggcatgcgccaccacacccggctaattttgtatttttagtagagacagkgtttctccatgttggctaggctgatctttaactcctgacctcgggtgatctgcctacctcagcctcccaaaatgctgggattacaggcatgagccaccatgcctggccaggaagcctaatttctatctgtttttactttcaccagtgagtagcactggacaagtctcttcaacccctgtgtcaccatctccctgtcagtaaaaatgcaatggccaccccaagtaagagttctaaaattaaagacaaaatgagattatgtttgtgtgtgcgctttgaagaaaggcagcatctgccaatggggatgttggaaaaggattgaggaagaaggaaactgcctttccaggacctgaactatctggttacatctccactgtcaaccctgctcactgtcccacctggtggcattaggagtatttgagcactcacctgtgaatagaatggagaaaaaatggccctgaaggcggatacctgacttctggcttctggcacaacactggtaggtcccactgtgcaacggtgtgacttggcttatggtgaacatcaactgagatgatatttcaccaacaccatctatcccaggatcccttttaagtctcagctgttttaaactggtctcaggagaacagtctccagacctgtccttgcacaaaaacactacaaacccctcagcctcttctttcttatgccatacagtacagattaagtttagtcgcgttccttcctgggaagctgagctggtgatgttaatgcatcctggaatggaaagggaagaattacccagaggtcaggtagcattctgtgaatttcaccgtaactgctccttatcactagaagtcttcaaggaaggactgaagcagaacctggcagtagtgctggcagacaggaaatacaaattccagctctatcgatggctgtgtgactgtaagcaagttacctaactccttgggcagtagtttattcatctggaaaatgaaaattaagggactaaataatatgctcaaagcatccattaattcataggtttatttgttcctccacttaacaaatatgtttaggtattcactctgccaagccctgctggggctgtgaggactaggacgtgagccctactgtcagaacttttttttcccctaaccattagatgaccggggatttttaatttaaaaaatttttttttaaaacaaggtcttgctgtgtcacccaggctggagggcagtggcacaatcgtaactcactgcacctttgaactcctgggctcaagcaatcctcctgcttccgccttccgaatagctaacactacaggtatgcaccactatgcctggctaattttttattttgtagagacagattctcactatgttgtccaggctagtcttgaactctaggcat

SEQ ID NO: 40793 - DNA, 536 bp, Homo sapiens
acttttgtttgttgagacacggtcttgctctgttgcccaggctggagtgcaatggtgtatttatacctcactgcagcctggcacttgtaggctcaagcaaacctcctgccccagcctcctgaatagctgggaccacaggagtgcaccagcatgatcagctaatttttaaatttttttttgtagagtaggaatgtcaccttgttgcccaggctggtctcaaactcctagcatcatgggaacttcccacctcagccttccaaagttctggaatgacaggtgtgagccatgcactcagccagatgttataattatattactagtatttaacaaaaatattttaattaagtaaaatgatacaattattgctattttgcaggatgatttaaagattaggtcacattttagcatatctgatattggagyggtatttataattcataatttttatatggtagcatttataattggtagcatttaaaaatcatcttattaatatagaaaatagtagggtatcacacaatccatgaggtcttaca

SEQ ID NO: 40794 - DNA, 564 bp, Homo sapiens
gtgacctagtcattggaagcctagtcagtggggacctggtcagtggtgctcttattagtggggcctgatcggttggaacataaacaataaaaaactggtcggtggggtgtattcagtgtattaggggtctggtcagtgtggggccttagtggcttggagcctggtcagtgagagcctggtcagagggggctcagtcagctggggactgatccatggagaattattcaatgggggtgaggtgagcagcaacctggtaaattgtggtcttgtcagtgcgaacccagtcagtggggaccaggtcagtgggaaattggtcagtggggtctggtccatgaggcctactaatgggggcctggttagggagrcatggtccgtggggacttggtcagtggggcctggtcaatgggggagtgctcattaggggcctcgttggggccacctggtcagtaggaacctggccagttagccgatgtgtgacctcaggcagggggtttgtctgtggagcctctttgcctccatctgtagggaaggtgagtcagggcaccctggagggtggctggaaag

SEQ ID NO: 40795 - DNA, 778 bp, Homo sapiens
gagggagaagatatattttcctggccttcatcagaccacctctcaggatacttgaggtttcttttctttttttaaaaaaaattttagttttgatttgatagttccaagtttttggaagaatttgcttaaaggtttggaggtttttttttttttttggtggggggtatttaacattttccttaggatttaatactcaaaattttttcagaatcctctttcaaatcaagaagcaccttaggtctttgtgaatatgttcctgatttgcaattactagctggaggatgatattaaaataaagaaggctaaagatagttcgctaactagtagatgtagaagggatgatagagttagaatattactattttgaaaccatcattagtaattcagaaaaaaattgtgaatgcatgctaaaactagtagaygaagttgaatgaggaacaggatatattcatagccttaaggtatcttcttacaaactacttactaattgtggaggaaaaaataatagttttataatagaaaaagttgacaggcaccatctcataccaagtgatccaagttatcgttgccagcatctcttatctctcttgatgtgatatgctgagaagaacacatcatttctgtgataattgtaccaaaggatgcataaccccaaataggggagattctatgaaagaatctctaaaaaaatgtcaaggtcatggaaaactaaggaaggctgaagaactactcccatataaaggagaccgaatatgtatgataatgaaatggaaagtgt

SEQ ID NO: 40796 - DNA, 778 bp, Homo sapiens
gagggagaagatatattttcctggccttcatcagaccacctctcaggatacttgaggtttcttttctttttttaaaaaaaattttagttttgatttgatagttccaagtttttggaagaatttgcttaaaggtttggaggtttttttttttttttggtggggggtatttaacattttccttaggatttaatactcaaaattttttcagaatcctctttcaaatcaagaagcaccttaggtctttgtgaatatgttcctgatttgcaattactagctggaggatgatattaaaataaagaaggctaaagatagttcgctaactagtagatgtagaagggatgatagagttagaatattactattttgaaaccatcattagtaattcagaaaaaaattgtgaatgcatgctaaaactagtagatgaagttgaatgaggaacaggatatattcatagccttaaggtatcttcttrcaaactacttactaattgtggaggaaaaaataatagttttataatagaaaaagttgacaggcaccatctcataccaagtgatccaagttatcgttgccagcatctcttatctctcttgatgtgatatgctgagaagaacacatcatttctgtgataattgtaccaaaggatgcataaccccaaataggggagattctatgaaagaatctctaaaaaaatgtcaaggtcatggaaaactaaggaaggctgaagaactactcccatataaaggagaccgaatatgtatgataatgaaatggaaagtgt

SEQ ID NO: 40797 - DNA, 682 bp, Homo sapiens
caggaaaatagagaagtttgaaatgtgagtttcccattagaattacattctattcatggtagaacttctccaatttattttccatctccttcctcctacttcatgtctacaatgacatagatgccttgaattataaacattctagtaacaggatagaactgtgaactaaaccgtatatccaattcacttgccaaagaagtgatagtctgcgccatggttttggaaattagttctcattcatgaattccaaagtttcctaataatctttttttttttttttttttgagatggagtcttgctccgtcgcccaggctggagtgcagtggcgcgatctcagctcactgcaagctccgcctcctgtgttcatgccattctcctgcctcagcctcccgagtagctgggactacaggcgcctgccaccatgcccggctaattttttgtatktttagtagagacagggtttcaccgtgttagcaaggatggtctcgatctcctgacttcgtgatctgcccacctcagcctcccaaagtgctgggattacaggtgtgatcccagcccctaataaccgcacccagcccctaataaccttttttaatcttagtgaagttgtatgtttcatacacaaattttgtcacatggcctatgataacagagttataaattaagtatatgcaaagttatg

SEQ ID NO: 40798 - DNA, 1157 bp, Homo sapiens
agaggacagtatgatggcttgggcctatattagtgagggctgggccctgggagaagtaagaaaaggcactcattctaccctgtcataaaattgtcttggaccagttatatgcatgctacttttaaaataactttggtatttgcattaaataaatatgaattaaagaacatgcttttaccaaaagacacagaaagacatttattcatacagatggctggccaaawccacagtcatggctgctaggaaaatacaagcaatttcactaaaatgaatgccttctctctccccttctgcagggctgctgtggccaaaataattattgataacagaatttttgaatcaagagaactactctatccaatgagctaaggcgagaaaacctggcagcaagtacaatgtcctactgtgattatttcaggaaaccagcaacatggggacagataaaagtaagaagcaggttaccttcgctctctggttttggaaccacacctggacgacacggacactcagccctgtctctgcagccagagtctctctcaccttggaaaaattgaacgagaaatgtagacacactggcatctcagggtaggaggtagaacatctcctatataatacttgaggaggccaaaagactgtatctgctttaggagctgaatagtttttaatgttgagcatacacacaaacacgagaacttgcttcccttcaggtagaaagaaagtccttcaccaggtaaagaaacaaaataataattattaatttacatgtgcattcccaagaggtgtttctggatttctcttgctctggaaattaggccttcaagtggtttagactttagtctattgttgtgctttagctataagccatgcatatgcattgacctacttaaggagatctgagagtgaaaatcactttggaaaaacaaatggctctctcttggtctcctctcttgcctaaattcattgaccttaatttttggttttgtccctcatatctctaggtaactttgggtgtttcatgaatatccatagtgactgctaccccaagtgagccctgcccaaagagaataaaatgagagccatctggaacccggcagagccaggtaggcaactctgaggccagcacatgtgccagggctgtggtggagacaggacaactg

SEQ ID NO: 40799 - DNA, 1157 bp, Homo sapiens
agaggacagtatgatggcttgggcctatattagtgagggctgggccctgggagaagtaagaaaaggcactcattctaccctgtcataaaattgtcttggaccagttatatgcatgctacttttaaaataactttggtatttgcattaaataaatatgaattaaagaacatgcttttaccaaaagacacagaaagacatttattcatacagatggctggccaaaaccacagtcatggctgctaggaaaatacaagcaatttcactaaaatgaatgccttctctctccccttctgcagggctgctgtggccaaaataattattgataacagaatttttgaatcaagagaactactctatccaatgagctaaggcgagaaaacctggcagcaagtacaatgtcctactgtgattatttcaggaaaccagcaacatggggacagataaaagtaagaagcaggttaccttcgctctctggttttggaaccacacctggacgacacggacactcagccctgtctctgcagccagagtctctctcaccttggaaaaattgaacgagaaatgtagacacactggcatctcagggtaggaggtagaacatctcctatataatacwtgaggaggccaaaagactgtatctgctttaggagctgaatagtttttaatgttgagcatacacacaaacacgagaacttgcttcccttcaggtagaaagaaagtccttcaccaggtaaagaaacaaaataataattattaatttacatgtgcattcccaagaggtgtttctggatttctcttgctctggaaattaggccttcaagtggtttagactttagtctattgttgtgctttagctataagccatgcatatgcattgacctacttaaggagatctgagagtgaaaatcactttggaaaaacaaatggctctctcttggtctcctctcttgcctaaattcattgaccttaatttttggttttgtccctcatatctctaggtaactttgggtgtttcatgaatatccatagtgactgctaccccaagtgagccctgcccaaagagaataaaatgagagccatctggaacccggcagagccaggtaggcaactctgaggccagcacatgtgccagggctgtggtggagacaggacaactg

SEQ ID NO: 40800 - DNA, 532 bp, Homo sapiens
ggggtcgctgctggagaataattaaactactgtggatggtcgcacaccataaagaaacagaggcacaggggagcagcttctgcacatttctgcattggcactgtctgcagttctgtaggcattaacataacaacgtratgcagcagctgccagcagtaaagatgtatgctccacagtaaatataaccacagggatgggagccagaatcgaaaggaaaaataaaaatagaaaaatagtggatccagaatgttggtgctgaccatggtaatggagagcacgtaagagatgctcccaggcagcagtgttggagagtggtgtttgaggagccgtataagtccccaattccaggcatttaaaaaaaaattatatatatatatatatatatatatataatttgctactgtgccagtaaacatatataataagtttttcctaggcaactgatagcagagtaaacacacgttacatagacatatttggagaaggctattttcaaggagttaaaggtgcataatatctaatctctgttgat

SEQ ID NO: 40801 - DNA, 532 bp, Homo sapiens
ggggtcgctgctggagaataattaaactactgtggatggtcgcacaccataaagaaacagaggcacaggggagcagcttctgcacatttctgcattggcactgtctgcagttctgtaggcattaacataacaacgtaatgcagcagctgccagcagtaaagatgtatgctccacagtaaatataaccacagggatgggagccagaatcgaaaggaaaaataaaaatagaaaaatagtggatccagaatgttggtgctgaccrtggtaatggagagcacgtaagagatgctcccaggcagcagtgttggagagtggtgtttgaggagccgtataagtccccaattccaggcatttaaaaaaaaattatatatatatatatatatatatatataatttgctactgtgccagtaaacatatataataagtttttcctaggcaactgatagcagagtaaacacacgttacatagacatatttggagaaggctattttcaaggagttaaaggtgcataatatctaatctctgttgat

SEQ ID NO: 40802 - DNA, 532 bp, Homo sapiens
ggggtcgctgctggagaataattaaactactgtggatggtcgcacaccataaagaaacagaggcacaggggagcagcttctgcacatttctgcattggcactgtctgcagttctgtaggcattaacataacaacgtaatgcagcagctgccagcagtaaagatgtatgctccacagtaaatataaccacagggatgggagccagaatcgaaaggaaaaataaaaatagaaaaatagtggatccagaatgttggtgctgaccatggtaatggagagcacgtaagagatgctcccaggcagcagtgttggagagtggtgtttgaggagccgtataagtccccaattccagrcatttaaaaaaaaattatatatatatatatatatatatatataatttgctactgtgccagtaaacatatataataagtttttcctaggcaactgatagcagagtaaacacacgttacatagacatatttggagaaggctattttcaaggagttaaaggtgcataatatctaatctctgttgat

SEQ ID NO: 40803 - DNA, 441 bp, Homo sapiens
tatcaggtcctcactggaacgtggaccggttctcagggttctgatcaacaggcaggggagaggcgaacagaggcacgaaatgacaaatgagagccatgagctgatgcaacaggsgggggagagatgaatggaggcgcaaaatgacaaatgagagccgtgagccgatgtctaggcacctgcacctggcttctgacttgctttctgaatggggcaaggcacaacgctgtcggggctcagggtccttatccataaaatgagggctgagctcacctgtgaaatcctggggcatggaggccaccctgcaggcggattccccgggcctggctctgtgcatcatctgcagtggtagcttgtattaccctgccctggccaggaatcccttctccccactctctggctgtgaagccccctgcgaggttgggcatggggttggggtggggg

SEQ ID NO: 40804 - DNA, 1210 bp, Homo sapiens
tcctgtctcagcatcctgagtagctgggactgcaggcgggagccactgtgcccaattgaacattttaataaagtatacgcgtgtttaagagaaatgtgaaagacatatcttttggttaaagcttggtgtcatataaaaacagttagacacacactctttcagcacaggagcccaactgtaaaagcaaaaaaagctgcactcacaatctctgcacagaaacttgatgagaatgtgcagcccagcgtgtgatcagggagtatggttagacagttacggggcctcatttctcttccttctcctccacatttgcacatcttcttaagggagtgtgggtgaatgttataagggaaagagggtcaacatattttctttaaaaatataaacagaaagagatgccygacactgcacgctgacatccttggtcctgatgtccgagtgatagtaaaatctgaggctctgaatgaaaggagcccctgtaccctcctcagggacccgaggctgcctcccagcccaagccccgccccgtccagtcctcacctaggtgaccgccacccactgacagttggcgcgtggatcatgagctcccgggcactgaagccgtcttcgtgtccagatgagctgacgactacaaatccaatcttgtggggcattctgcacgtttgggctgtttataagagcaggaaaaacttctttaaaacaaaggaattcactaacacatggacatttaaagggttggttcatgccttgctaacacacacaataatgcactaagtattcagaattttcccatctctttgaaaagagtctatttttttttgttaaacacttttatagatgcttctggttctgcttaagatatcatttaagttatcttgacttttcccaaatatgtgtccaaaaagtttgaccggtgctgtggattgtgctccccaaaaggatacgctgaagttccacctgtggtacctgtgaaggagacctcatttgaaaatagggtctctgtgggtgtggtctagttaaaatgaggtcctcggggtgggcccaatccaacgtgacttttaagaagggaagagacacagccacacaaagggagagcgccatgtggtgacagaggcagagaccggagcaacgcatctctaagcgggccggccaaggaggccaaggacggccgaggatggccagcaggcgcccaaggttaggaagaagccaggag

SEQ ID NO: 40805 - DNA, 1210 bp, Homo sapiens
tcctgtctcagcatcctgagtagctgggactgcaggcgggagccactgtgcccaattgaacattttaataaagtatacgcgtgtttaagagaaatgtgaaagacatatcttttggttaaagcttggtgtcatataaaaacagttagacacacactctttcagcacaggagcccaactgtaaaagcaaaaaaagctgcactcacaatctctgcacagaaacttgatgagaatgtgcagcccagcgtgtgatcagggagtatggttagacagttacggggcctcatttctcttccttctcctccacatttgcacatcttcttaagggagtgtgggtgaatgttataagggaaagagggtcaacatattttctttaaaaatataaacagaaagagatgcccgacactgcaygctgacatccttggtcctgatgtccgagtgatagtaaaatctgaggctctgaatgaaaggagcccctgtaccctcctcagggacccgaggctgcctcccagcccaagccccgccccgtccagtcctcacctaggtgaccgccacccactgacagttggcgcgtggatcatgagctcccgggcactgaagccgtcttcgtgtccagatgagctgacgactacaaatccaatcttgtggggcattctgcacgtttgggctgtttataagagcaggaaaaacttctttaaaacaaaggaattcactaacacatggacatttaaagggttggttcatgccttgctaacacacacaataatgcactaagtattcagaattttcccatctctttgaaaagagtctatttttttttgttaaacacttttatagatgcttctggttctgcttaagatatcatttaagttatcttgacttttcccaaatatgtgtccaaaaagtttgaccggtgctgtggattgtgctccccaaaaggatacgctgaagttccacctgtggtacctgtgaaggagacctcatttgaaaatagggtctctgtgggtgtggtctagttaaaatgaggtcctcggggtgggcccaatccaacgtgacttttaagaagggaagagacacagccacacaaagggagagcgccatgtggtgacagaggcagagaccggagcaacgcatctctaagcgggccggccaaggaggccaaggacggccgaggatggccagcaggcgcccaaggttaggaagaagccaggag

SEQ ID NO: 40806 - DNA, 622 bp, Homo sapiens
tgaagcacaaaatatttgctttttctttcaaatttggatcaactcacatcaaatgcaaagctaatttttaagaatcacgcgtgaaccgtcttgcaaggagagggagtgagcacagggaaatggaaggaatgggccacactcagcaaaggtctggctgctgttgctgtatgggcatttaataagcccatgggttggttatgactttcaggatagctggttttcctattttcccattgggctcagggtcctagtaacgaggtagctgaccctgacacctgaacgtgagtctgaagaggtaaagcttctgcttccatttacatttttaaagtgcttatctgtctccgtaactttattttgctgagatctttgaactcacactaacttcacggcttttagtaactggtttcttttaccatgtagttattctaagtatacrtaaaacctattacaggcataaattaggaactgttttctccaaaggcaataccttttgcaaatcagcaatggcttgttttagtttcttggcataatcatagcgttccttttggacagcttcccgttttctttcatctaattttcgtatgatctgtgcaacttctggatcttggtacatatcaaaagc

SEQ ID NO: 40807 - DNA, 1116 bp, Homo sapiens
ggcaggtttgtaggggaacctaaggaggtttctgcaaaatgttaattgagggattactttatttcagcttaaacgttagcatgcaaagatggattagtcccttccctgatgaagtccataatacagtattaggcaagaagaatgttatttagtaaagaagtctttagatcagaggttgacagagagactgaaggtaaagtagctaaagtatgaaaagtagtattgtgggtactagaacagtagggaggattttactttactatcgccatataataaccaccaacacctagacttctagaagtccaaggcaacacacaatagcagcatattttctaccatacttgtgaaggcatttcataacccatgtttccatgcagggtggttgaaacacaaatactaattgggaaaagtagaaacctggtttagatatttgagagttacttagaattaaagaattttagagctggaaggcagttggactcaaggcattttagatcatattactagtacgtttttagtgacatactgagaagaatgtttgttcccctcataagtaggtaccttttgaccaaggttagaacatagattcagatccagtgagatgaaaatrtcctaatttcttcaaaagaagggaatgatagccctgtcttttcaggatatcctttaaagttattattttatgaacactaaatagcattaccagatttagcaaataaaaatataagatatctacttcaatttaaatttcagataaacaacaaataatttgtttcattagaagtatatcctttgtaatatttgagacataacttaaacgctaaaacattgtttgttgtttatctgaaatttaaattgaattgagtaccctgtattttattctgcaatacaaataccaaaagattaacaaatggaaacacgcatatttcaattttgtatgaagaacaagtctaagatctctatatcagttccatggcctggcactgcaagaataattcatctgtaccaattgatgaatcagtaaaatagaagatttgctaaacagttgctatgtccccagctttgtggtcaatacttaaaggaattcaaatgtcttcataaaaaatggtccctaagcta

SEQ ID NO: 40808 - DNA, 1116 bp, Homo sapiens
ggcaggtttgtaggggaacctaaggaggtttctgcaaaatgttaattgagggattactttatttcagcttaaacgttagcatgcaaagatggattagtcccttccctgatgaagtccataatacagtattaggcaagaagaatgttatttagtaaagaagtctttagatcagaggttgacagagagactgaaggtaaagtagctaaagtatgaaaagtagtattgtgggtactagaacagtagggaggattttactttactatcgccatataataaccaccaacacctagacttctagaagtccaaggcaacacacaatagcagcatattttctaccatacttgtgaaggcatttcataacccatgtttccatgcagggtggttgaaacacaaatactaattgggaaaagtagaaacctggtttagatatttgagagttacttagaattaaagaattttagagctggaaggcagttggactcaaggcattttagatcatattactagtacgtttttagtgacatactgagaagaatgtttgttcccctcataagtaggtaccttttgaccaaggttagaacatagattcagatccagtgagatgaaaatgtcctaatttcttcaaaagaagggaatgatagccctgtcttttcaggatatcctttaaagttattattttatgaacactaaatagcattaccagatttagcaaataaaaatataagatatctacttcaatttaaatttcagataaacaacaaataatttgtttcattagaagtatatcctttgyaatatttgagacataacttaaacgctaaaacattgtttgttgtttatctgaaatttaaattgaattgagtaccctgtattttattctgcaatacaaataccaaaagattaacaaatggaaacacgcatatttcaattttgtatgaagaacaagtctaagatctctatatcagttccatggcctggcactgcaagaataattcatctgtaccaattgatgaatcagtaaaatagaagatttgctaaacagttgctatgtccccagctttgtggtcaatacttaaaggaattcaaatgtcttcataaaaaatggtccctaagcta

SEQ ID NO: 40809 - DNA, 1240 bp, Homo sapiens
tgcatactagatatgtaggtgtttccaaatatttttttcagttgtggcggtgcaaatcatttcaatagtagagtaactcagttcattactgttactggaaaaacaagtttaaccaagcacatatcctactgagggtgagtcaacagtgtcattttaacataagaaggacagtacatgaagtgagttattccaagtcctgtggttttcctacagctgagcaaagacagctgttctttcggaagtggggctctaaaaagaagttgcccatctcctttctttcttgattatagccttttagttttcttttggcctgagacatttcaaaaattcatttcctccttagatttctatcaccaaataccctgaattttgataatttatttatagagtatattatttattatagacttattatagtttaaaactttattttaatttatctcccatttcaagatccacatttgctatatgtgtcagataataaaaatgccataaggaaaacagaggagtgatcttttttaatatgtcattattttctatagttctttagtggtatggacatggaataaggtggcattttgtgggacagtataccaaacttagtgataaaatttatacttttaattttggaggacaaaagtcttgtattctcagccttgtggataagacagtgctctgagctgtctgaggtttcctaaattgggattcaacatcatgaagggtatgtgtctggatmgtttatttgttggtttgggaaggtgagtttttgtcttttttccccctctgagttgatttctttagttggagagaagcagaccagatgaagaaaatactttatctcttatggcatttttggtttaccacattagttatgacccgtcttctctgagcagcaggccatgcttctctgttcagtagttcagttttcactaacttaactgcagatgtgttcttggagggatttatttctaatcaattgaattatgggtacttggataaaatgatgatgggttacctacttttaatagggccttcatttttaagagtaaaatcttgtcaagatagggtatatcatacttatgatctggttccatctctaactccataatttccttttgctcctgtgttgctactctattattgagaagagatggtatcttgtcagtgtcaattttacaaagaaaaaattctaaacaatttcagtcatagggtagtttttttttttcctggagaaataatg

SEQ ID NO: 40810 - DNA, 1240 bp, Homo sapiens
tgcatactagatatgtaggtgtttccaaatatttttttcagttgtggcggtgcaaatcatttcaatagtagagtaactcagttcattactgttactggaaaaacaagtttaaccaagcacatatcctactgagggtgagtcaacagtgtcattttaacataagaaggacagtacatgaagtgagttattccaagtcctgtggttttcctacagctgagcaaagacagctgttctttcggaagtggggctctaaaaagaagttgcccatctcctttctttcttgattatagccttttagttttcttttggcctgagacatttcaaaaattcatttcctccttagatttctatcaccaaataccctgaattttgataatttatttatagagtatattatttattatagacttattatagtttaaaactttattttaatttatctcccatttcaagatccacatttgctatatgtgtcagataataaaaatgccataaggaaaacagaggagtgatcttttttaatatgtcattattttctatagttctttagtggtatggacatggaataaggtggcattttgtgggacagtataccaaacttagtgataaaatttatacttttaattttggaggacaaaagtcttgtattctcagccttgtggataagacagtgctctgagctgtctgaggtttcctaaattgggattcaacatcatgaagggtatgtgtctggatagtttatttgttggtttgggaaggtgagtttttgtcttttttccccctctgagttgatttctttagttggagagaagcagaccagatgaagaaaatactttatctcttatggcatttttggtttaccacattagttatgacccgtcttctctgagcagcaggccatgcttctctgttcagtagttcagttttcactaacttaactgcagatgtgttcttggagggatttatttctaatcaattgaattatgggtacttggataaaatgatgatgggttacctacttttaatagggccttcatttttaaragtaaaatcttgtcaagatagggtatatcatacttatgatctggttccatctctaactccataatttccttttgctcctgtgttgctactctattattgagaagagatggtatcttgtcagtgtcaattttacaaagaaaaaattctaaacaatttcagtcatagggtagtttttttttttcctggagaaataatg

SEQ ID NO: 40811 - DNA, 810 bp, Homo sapiens
aacacctaatctccttagcactcatccatggtctcagtgcttactcagacatgggtgtctgtgtttgtctaatcaaggtaaaccaggctgggaaaggactggtattgctttgaagcttttactaaggactgacataggttgggcttgaaatatgacctgaacagagcagttttgccatttgaatgtggagccttatattgaataaactgaaacttttccacttggttttttccatctctttggagaacaggactggacactaaagcaggctctggcaggagaatgtcctggtcttgcagaatcttctggttgctaaggctgaggacacagccccactgtcctttctctggcaacaaaggacayttgtcacatgttggggcgacttatgtttctaatttgggacttaactgcactagtaaaagacagcaaatgtggaatcagtagaaaggtagagattgtgcatttgaatcaagactttcttccacttcacattaaagtgtaaaaacttaatgctttgcatttgaataccttctgataggtggctaggtgtctcacataagtgtaaaagatgagtaatgcaggtggtattatcattcttatgggcaagaaggagaggctgtaattcaagttaattgtataaaagcataaagctctggggacgaccagtttaaggtcacacagggagttaatgttagccagatatctagacccactaaggcttcatttttgctctaaaacttatgaatggagtgaaactccatttacaaaagaattcacttggaagctactaaaatgtatttctggggatcc

SEQ ID NO: 40812 - DNA, 810 bp, Homo sapiens
aacacctaatctccttagcactcatccatggtctcagtgcttactcagacatgggtgtctgtgtttgtctaatcaaggtaaaccaggctgggaaaggactggtattgctttgaagcttttactaaggactgacataggttgggcttgaaatatgacctgaacagagcagttttgccatttgaatgtggagccttatattgaataaactgaaacttttccacttggttttttccatctctttggagaacaggactggacactaaagcaggctctggcaggagaatgtcctggtcttgcagaatcttctggttgctaaggctgaggacacagccccactgtcctttctctggcaacaaaggacatttgtcacatgttggggcgacttatgtttctaatttgggacttaactgcactagtaaaagacagcaaatgtggaatcagtagaaaggtagagattgtgcatttgaatcaagactttcttccacttcacattaaagtgtaaaaacttaatgctttgcatttgaataccttctgataggtggctaggtgtctcacataagygtaaaagatgagtaatgcaggtggtattatcattcttatgggcaagaaggagaggctgtaattcaagttaattgtataaaagcataaagctctggggacgaccagtttaaggtcacacagggagttaatgttagccagatatctagacccactaaggcttcatttttgctctaaaacttatgaatggagtgaaactccatttacaaaagaattcacttggaagctactaaaatgtatttctggggatcc

SEQ ID NO: 40813 - DNA, 810 bp, Homo sapiens
aacacctaatctccttagcactcatccatggtctcagtgcttactcagacatgggtgtctgtgtttgtctaatcaaggtaaaccaggctgggaaaggactggtattgctttgaagcttttactaaggactgacataggttgggcttgaaatatgacctgaacagagcagttttgccatttgaatgtggagccttatattgaataaactgaaacttttccacttggttttttccatctctttggagaacaggactggacactaaagcaggctctggcaggagaatgtcctggtcttgcagaatcttctggttgctaaggctgaggacacagccccactgtcctttctctggcaacaaaggacatttgtcacatgttggggcgacttatgtttctaatttgggacttaactgcactagtaaaagacagcaaatgtggaatcagtagaaaggtagagattgtgcatttgaatcaagactttcttccacttcacattaaagtgtaaaaacttaatgctttgcatttgaataccttctgataggtggctaggtgtctcacataagtgtaaaagwtgagtaatgcaggtggtattatcattcttatgggcaagaaggagaggctgtaattcaagttaattgtataaaagcataaagctctggggacgaccagtttaaggtcacacagggagttaatgttagccagatatctagacccactaaggcttcatttttgctctaaaacttatgaatggagtgaaactccatttacaaaagaattcacttggaagctactaaaatgtatttctggggatcc

SEQ ID NO: 40814 - DNA, 810 bp, Homo sapiens
aacacctaatctccttagcactcatccatggtctcagtgcttactcagacatgggtgtctgtgtttgtctaatcaaggtaaaccaggctgggaaaggactggtattgctttgaagcttttactaaggactgacataggttgggcttgaaatatgacctgaacagagcagttttgccatttgaatgtggagccttatattgaataaactgaaacttttccacttggttttttccatctctttggagaacaggactggacactaaagcaggctctggcaggagaatgtcctggtcttgcagaatcttctggttgctaaggctgaggacacagccccactgtcctttctctggcaacaaaggacatttgtcacatgttggggcgacttatgtttctaatttgggacttaactgcactagtaaaagacagcaaatgtggaatcagtagaaaggtagagattgtgcatttgaatcaagactttcttccacttcacattaaagtgtaaaaacttaatgctttgcatttgaataccttctgataggtggctaggtgtctcacataagtgtaaaagatgagtaatgcaggtggtattatcattcttatgggcaagaaggagaggctgtaattcaagttaattgtataaaagyataaagctctggggacgaccagtttaaggtcacacagggagttaatgttagccagatatctagacccactaaggcttcatttttgctctaaaacttatgaatggagtgaaactccatttacaaaagaattcacttggaagctactaaaatgtatttctggggatcc

SEQ ID NO: 40815 - DNA, 810 bp, Homo sapiens
aacacctaatctccttagcactcatccatggtctcagtgcttactcagacatgggtgtctgtgtttgtctaatcaaggtaaaccaggctgggaaaggactggtattgctttgaagcttttactaaggactgacataggttgggcttgaaatatgacctgaacagagcagttttgccatttgaatgtggagccttatattgaataaactgaaacttttccacttggttttttccatctctttggagaacaggactggacactaaagcaggctctggcaggagaatgtcctggtcttgcagaatcttctggttgctaaggctgaggacacagccccactgtcctttctctggcaacaaaggacatttgtcacatgttggggcgacttatgtttctaatttgggacttaactgcactagtaaaagacagcaaatgtggaatcagtagaaaggtagagattgtgcatttgaatcaagactttcttccacttcacattaaagtgtaaaaacttaatgctttgcatttgaataccttctgataggtggctaggtgtctcacataagtgtaaaagatgagtaatgcaggtggtattatcattcttatgggcaagaaggagaggctgtaattcaagttaattgtataaaagcataaagctctggggacgaccagtttaaggtcacacagggagttaatgttagccagatatctagacccactaaggcttcatttttgctctaaaacttatgaatggagwgaaactccatttacaaaagaattcacttggaagctactaaaatgtatttctggggatcc

SEQ ID NO: 40816 - DNA, 602 bp, Homo sapiens
tttttcaatttcattcttagaatggaaacttaattcacacaagttgaacaagtagtcatcarggggcaaaacccagtggatgatggttttgtgtgctgtttggagactgggtgtttaccacacagcagtggatttcataaattccagggtcagacaagattccagtagcgacacacttgactaatatgagaaaatgcaggattaggcaatcaacaatgaggaagtcagccaagttgccacccaaaaattacttaccacagcagctgcagtccagaaatgctaacaagccagtctccctaggagtgggccatactcagctgtggaccactcacaacattttctcactttattttgcttcagagtcagtgtactgcaatgatttctcctttgcttgctttatatgtttaaaattgtcttccctaaaagctgaacttaaaattaatgtttgctaccaaaagggggtagcagtgcctggtcatgtaggcatatgtcccactctgtcagtacagagggtaagcagcctcttcctttttaaaaaatttattatgatgatttacaaaaattgaagcttacaggataaacactcaacaaaaaagtagcca

SEQ ID NO: 40817 - DNA, 1085 bp, Homo sapiens
tgaagtaaatgtttcaaaaagtaattgtcaccatcactatgtgtgatgtcctctgatatttcctatttctttttctgccagtgacccacccgacggatttcatgacccactaataagtttcagcctgagtttaaaaaacgttgactctgggggagcccgtaagaaagartagtcagttcttactggggtgatcagagaaagcttcattaggagttgaatttgcactttgccttgaaaaataaaaaatgtttgagtggataaagtggcctcaggaggacataattagagtgaagcattctcccaaatagatttagattataaataggcaaaataggcaagcccaaatatttaccatttgaaaaaaaaaaactacacatttaaaatccatttaactattttcactaaatctgaatgcttagaatttgagaatgccaactaggcttagttagagacagtgaagaaaaaagtctaagttaaaacaactcaaaatatccttttccattcccagttctcttactaaatagctatgttatagaccatttctctagaagcctaactgtcctcacttaaaaaatgaaatggctttaaaaattggtgatttttttttttttgagacagagtcttgctctgttgcctaggctggagtgcagtggtgcaatctcaactcactgcaacctctgcctcccgggttcaagccattctcctgcttcagcctcctgagtagctgggactacaggtgcccgccaccgcgcccggctaatttttcattgttttagtagagacagggtttcacagcgttagccaggatggtctcgatctcctgaccttgagatccgcccgccttggcctcccaaagtgctgggattacaggcatgagccaccgcgtctggccaaaattagtgatttttaaggccctttcctggtctaagctcttcaaggtgataacccagttaatatcacctccattttgctcaaggggaaccaggctgccagagtttagataagtgtttaatcatgctttggctgtctacttagattcctttatcaggtaaaataatttcataaaagttttacaggaagtaaaa

SEQ ID NO: 40818 - DNA, 1085 bp, Homo sapiens
tgaagtaaatgtttcaaaaagtaattgtcaccatcactatgtgtgatgtcctctgatatttcctatttctttttctgccagtgacccacccgacggatttcatgacccactaataagtttcagcctgagtttaaaaaacgttgactctgggggagcccgtaagaaagagtagtcagttcttactggggtgatcagagaaagcttcattaggagttgaatttgcactttgccttgaaaaataaaaaatgtttgagtggataaagtggcctcaggaggrcataattagagtgaagcattctcccaaatagatttagattataaataggcaaaataggcaagcccaaatatttaccatttgaaaaaaaaaaactacacatttaaaatccatttaactattttcactaaatctgaatgcttagaatttgagaatgccaactaggcttagttagagacagtgaagaaaaaagtctaagttaaaacaactcaaaatatccttttccattcccagttctcttactaaatagctatgttatagaccatttctctagaagcctaactgtcctcacttaaaaaatgaaatggctttaaaaattggtgatttttttttttttgagacagagtcttgctctgttgcctaggctggagtgcagtggtgcaatctcaactcactgcaacctctgcctcccgggttcaagccattctcctgcttcagcctcctgagtagctgggactacaggtgcccgccaccgcgcccggctaatttttcattgttttagtagagacagggtttcacagcgttagccaggatggtctcgatctcctgaccttgagatccgcccgccttggcctcccaaagtgctgggattacaggcatgagccaccgcgtctggccaaaattagtgatttttaaggccctttcctggtctaagctcttcaaggtgataacccagttaatatcacctccattttgctcaaggggaaccaggctgccagagtttagataagtgtttaatcatgctttggctgtctacttagattcctttatcaggtaaaataatttcataaaagttttacaggaagtaaaa

SEQ ID NO: 40819 - DNA, 1085 bp, Homo sapiens
tgaagtaaatgtttcaaaaagtaattgtcaccatcactatgtgtgatgtcctctgatatttcctatttctttttctgccagtgacccacccgacggatttcatgacccactaataagtttcagcctgagtttaaaaaacgttgactctgggggagcccgtaagaaagagtagtcagttcttactggggtgatcagagaaagcttcattaggagttgaatttgcactttgccttgaaaaataaaaaatgtttgagtggataaagtggcctcaggaggacataattagagtgaagcattctcccaaatagatttagattataaataggcaaaataggcaagcccaaatatttaccatttgaaaaaaaaaaactacacatttaaaatccatttaactattttcactaaatctgaatkcttagaatttgagaatgccaactaggcttagttagagacagtgaagaaaaaagtctaagttaaaacaactcaaaatatccttttccattcccagttctcttactaaatagctatgttatagaccatttctctagaagcctaactgtcctcacttaaaaaatgaaatggctttaaaaattggtgatttttttttttttgagacagagtcttgctctgttgcctaggctggagtgcagtggtgcaatctcaactcactgcaacctctgcctcccgggttcaagccattctcctgcttcagcctcctgagtagctgggactacaggtgcccgccaccgcgcccggctaatttttcattgttttagtagagacagggtttcacagcgttagccaggatggtctcgatctcctgaccttgagatccgcccgccttggcctcccaaagtgctgggattacaggcatgagccaccgcgtctggccaaaattagtgatttttaaggccctttcctggtctaagctcttcaaggtgataacccagttaatatcacctccattttgctcaaggggaaccaggctgccagagtttagataagtgtttaatcatgctttggctgtctacttagattcctttatcaggtaaaataatttcataaaagttttacaggaagtaaaa

SEQ ID NO: 40820 - DNA, 528 bp, Homo sapiens
agctctggagcagtgtggtcctaccaataaatcaagtgttggaggagtctagactagggrctttttagacagttctgctaaaccttcaaatgttttgttatcctcccctccccacccctactttgtactagtatgtaggggaaccaatccaagagataacagacagatgacaggttcccccaagaacacagactccccacagtctcaccaatacccaggcatgccaggttcttcctgagttaaatgcctaggaggcctgaaagaataaattcatcctggagaagtcttgtgggtcgtagctttagaaattcagggaacatatctctggggccacccaatggagaacacagcctgtatcagaaccttagcagagactttgggccttttggggtctcaaatttatcatctctgaaacaagtacaacgaaattaacattgccacatgtgggcactataaagcctttttcaaataaaaaaaaggtcagtgatagtgctaataataacagtgattatgtcatttaataaaacg

SEQ ID NO: 40821 - DNA, 530 bp, Homo sapiens
ttttaaacagatgacattttcatacttggtatgctaacttgaagaccagaccatttttgcccaagttctaccaaaggttttcgttttatagtcttcatttgttttgttttggtttactttttaacaaaaagcaaacctaggaaaaaattttaaaaacatacaagatgcacaaaaacaattactctaatacacatgaaacagaaaatcaacacctgccaattaaacacaacttctaccatttcataactgtgtgatcttgtcaaattacytaacctctctataaaacgggatcacgatagcatctttctcacagaattatagtgagaattaaataatattattcttatgaaatgtttaagatagggcctagcatttatcatttactcaataaatattaatcatgtaattatatatgtaattatggtgataatgataatgttgctgccatgagatgtcaggtttcacaatataaaatcattacagaattctgtttggaactcctgtgagacctagtatgaatcacctatagt

SEQ ID NO: 40822 - DNA, 520 bp, Homo sapiens
gtgaacagactccagctatactattttttaaaataggatttactggaagaggagacccacagaatcaaaggaacagttgaagactcaaaagaacaggctcagaaggggcaggaatagggagcggcaggaacaggggaagcaattaggatctaggtagcaagaaggggccgattggttctggccacttttttctactcttatgttgttccactgatgatgcaatgctcaaaaaatcagatcattgggaggccgaggcgggcggatcacgaggtcaggagatcgagaccatcctggctaacacggtgaaaccccgtctctactaaaaatacgaaaaattagccgggcgaggtgtcgggtgcctgtaatcccagttactctggaggctgagkcaagacaatggcgtgaaccccagggggcggagcctgcagtgagccgagatcgccccactgcactccagcctgggcaacagcgagactccgcctcaaaaataaataaataaataaataaataaataaataaa

SEQ ID NO: 40823 - DNA, 566 bp, Homo sapiens
ccgtgatgctctctctcctctgggagctttgccaattaagcatcctcacttgcagaggttataatgacagatcttgagatgagaaaaaatgataatttcactgtattatataatagtcttaacgttctgcatctggggcttttaccctatttgcatttgaatatgtgyttttacaattcgggtgccacattgtgggagggtatttggcaacatttggaacatagaaaatatatccagtgtctctccttggcaagaggaaaaaaaacatctgagaagtctcagagcttgttcactaatgccttttccactttgattgtttctgtttccaccacctttcccgcgtttcagtttattcccttgggtagggacaatgccaagtgttatcacgggaggggttggagaaagatgtaaatattctgaaaaaagtgggttagagatagagaagtataaaatgatggatgactcacttttcacgataggacctatataaaaagtcacactagccacttccgttttgggattttaattattttgtcacatggcatctgttacaccagtactcaaat

SEQ ID NO: 40824 - DNA, 760 bp, Homo sapiens
tgcatctcttcatctgtattttttgtaatatcttttataataacccagtaaatgtaagtaaagtgtttaccagagttttgggagcttccccggcaaattagttgaacccaagaagggagttgtgagaaaccctacttacagctgatgggtcagaagccagtggggcttttgattggcatagaagtgggggcaatctcatgggactgaaaccttaacctgtgggatctgatgttctcyccaggaagatagcatcagaattgaattggaggacaccagctggtgtccactgcaaaactgattgcttggttagtgtgcagagaaaactcccacatatttggttacagaagtcttctgtgttgactactgagtgagggaatagaagaaatacttcggttttttccctatatcattggatagatcatacaagatattattattgttttatgtcattaatactcatttagaaatattttcatgggtttttttccactcttcatctctccctgcatctccaagcttccacctgacacaatcttcctactgcctgataaatacccttgggtattccctttagtcaagtctatcagtgacaaatggtgtttgccagaaaagatatttacctttattgttgaaagatacttcacgggattccattttagaactttgaggccgggcacagtggctcacgcctgtaatcataacacttgggaggccaaggcaggcggatcacttgatgtcaggagtcaggaccagccggcca

SEQ ID NO: 40825 - DNA, 658 bp, Homo sapiens
gggtgcaccttcattagtttaatcaaacccttattgatgggcatataagctttttccaatgttcaacttttttttttttttttttttgagatggagtctggctctgtcacccaggctggagtgcagtggcatgatctcagttcactgcaagctctgcctcccaggttcaagcaattctccygcctcagcctcctgaatagccggcattacagataccttccatcacacccggctaatttttgtattttaaacagagacgcggtttcaccatgttggccaggctggtctagaactcctgacctcaggtgatctgcccgcctcggcctcccaaagtgctgggattacaggagtgagccaccacacccggcccaatgttaaacttttataacacatttgcattaaatattcttgtccgtacatcttttgcacaggtaatgtccacctattgatgggtgtggctttttgtaggaatgcagtgtgatggtgtaggctgggcttggacactgccttgcaaactttctgcatctttacacaagccacaaccttactaggccccaattctctcatcttcaggtggaggtgatcatagtgcttgtctcctaagggtgttgggaggattcaatgaggtcatatatagaaagtgattggtcagtgccaa

SEQ ID NO: 40826 - DNA, 658 bp, Homo sapiens
gggtgcaccttcattagtttaatcaaacccttattgatgggcatataagctttttccaatgttcaacttttttttttttttttttttgagatggagtctggctctgtcacccaggctggagtgcagtggcatgatctcagttcactgcaagctctgcctcccaggttcaagcaattctcccgcctcagcctcctgaatagccggcattacagataccttccatcacacccggctaatttttgtattttaaacagagacgsggtttcaccatgttggccaggctggtctagaactcctgacctcaggtgatctgcccgcctcggcctcccaaagtgctgggattacaggagtgagccaccacacccggcccaatgttaaacttttataacacatttgcattaaatattcttgtccgtacatcttttgcacaggtaatgtccacctattgatgggtgtggctttttgtaggaatgcagtgtgatggtgtaggctgggcttggacactgccttgcaaactttctgcatctttacacaagccacaaccttactaggccccaattctctcatcttcaggtggaggtgatcatagtgcttgtctcctaagggtgttgggaggattcaatgaggtcatatatagaaagtgattggtcagtgccaa

SEQ ID NO: 40827 - DNA, 658 bp, Homo sapiens
gggtgcaccttcattagtttaatcaaacccttattgatgggcatataagctttttccaatgttcaacttttttttttttttttttttgagatggagtctggctctgtcacccaggctggagtgcagtggcatgatctcagttcactgcaagctctgcctcccaggttcaagcaattctcccgcctcagcctcctgaatagccggcattacagataccttccatcacacccggctaatttttgtattttaaacagagacgcggtttcaccatgttggccaggctggtctagaactcctgacctcaggtgatctgcccgcctcggcctcccaaagtgctgggattacaggagtgagccaccacacccggcccaatgttaaacttttataacacayttgcattaaatattcttgtccgtacatcttttgcacaggtaatgtccacctattgatgggtgtggctttttgtaggaatgcagtgtgatggtgtaggctgggcttggacactgccttgcaaactttctgcatctttacacaagccacaaccttactaggccccaattctctcatcttcaggtggaggtgatcatagtgcttgtctcctaagggtgttgggaggattcaatgaggtcatatatagaaagtgattggtcagtgccaa

SEQ ID NO: 40828 - DNA, 658 bp, Homo sapiens
gggtgcaccttcattagtttaatcaaacccttattgatgggcatataagctttttccaatgttcaacttttttttttttttttttttgagatggagtctggctctgtcacccaggctggagtgcagtggcatgatctcagttcactgcaagctctgcctcccaggttcaagcaattctcccgcctcagcctcctgaatagccggcattacagataccttccatcacacccggctaatttttgtattttaaacagagacgcggtttcaccatgttggccaggctggtctagaactcctgacctcaggtgatctgcccgcctcggcctcccaaagtgctgggattacaggagtgagccaccacacccggcccaatgttaaacttttataacacatttgcattaaatattcttgtccgtacatcttttgcacaggtaatgtccacctaytgatgggtgtggctttttgtaggaatgcagtgtgatggtgtaggctgggcttggacactgccttgcaaactttctgcatctttacacaagccacaaccttactaggccccaattctctcatcttcaggtggaggtgatcatagtgcttgtctcctaagggtgttgggaggattcaatgaggtcatatatagaaagtgattggtcagtgccaa

SEQ ID NO: 40829 - DNA, 747 bp, Homo sapiens
aggaagaattgggcaggctcctctgggcccctcactctgcctcagaagtccatccacctacctgccctctgccttctgctgtctgccctggatgagggtgaaaggaaaaggctgactattgtccatctgggccagtgaccrgatgtgcaaggccacctaattttgagggaagtattaacaggcccatctggacacaaatctagggccacagcctctgattggcttcatcagcacgaacgctgacatttaatctccatctgcccacagctaggtttacctctcagttggttctacgctcagtggggatgaagggtgctctgttgaccctctccctttcccccaccccacactatctagttatcagacaaaatggactttgagaaaaaaaattaccaaagaaggatcttttataaggataaaggcattaatatactaagaagacaaagaatcctatgagggtgtgtgtcttgtaacagagcttaaatatccctgaggaaaaaattgacagaaataatccacaatcatagatgaatatgaatatgaatatcttaggatagggctgctagaaaaaaatcaagaaaaagatagatggactgaacaacactattaaccacttttatataattgctatttatagaatctatatctaccagttacaactgcagaatacacattctcttcaagcacatgtggtttgttgaccaaaatagaccatatgctggaccataaaacaaggttcaataaatt

SEQ ID NO: 40830 - DNA, 588 bp, Homo sapiens
ggaaggtccagctggaaggaagcatagaaagtaaggtttttcactttccagccccgtgatgcagaaaggtaatactagaaggagatggaagaggatggcaagtgccaattaaaaatatccaaaccctatcaatataatttctttctttttttttttttatctgttttgagacagggtcttgctctgtcacccaggctggagtgtagtggcacaaacatggcttactgcagcctcaacctcctgggtccaggtgatcctctcacctcaacctcccatgtagctgggatcacaggcacataccatgacacctggctaattttctttattttttgtagtgatggggtctcactatgtttcccaggatgatctcgaactcctaggtttaagtgatcctcccagcttggcctcccaacatgctgggattataggtgtgagccgctgcacctggcccacatttcttagttctttaatatactagggaactcaaaaattggaaatggccatgcagcctttgagaaacactagtgatagtaggatgaaaagagacctacttaaaaaawttttttttcagtttccattcatttttgg

SEQ ID NO: 40831 - DNA, 906 bp, Homo sapiens
tattgttgtgtgtttggagcagagggkttttttttgtttttgtttttgtttttgtttttgtttggagtatgatccaactgtccatcttgacatgaagtcctgggtttggtttttaaggaagtaatatctttacttcatctgggggcaacatcctccatcctcttcatggccacacctacggcccctctttccccctagtgtcagagcagaaatcacgcttccctctgcccaaggctcggaacctctgagctcctcaaaccaagcctctccagggaaagttccttctcaggacaggaggctgagccaatggagagaaagagagtgaagatgtaagcgccattcctggagaggcttcttttaaaatactatctatttttgttttatttctggtagttcttcatttttaattgaagttatatcttcattttcctctaaaaatctaaacatttatatatgtttttgtcaggctattctataatattaattagcttgaagaggaagaaacggtgtcaccagaattcagagagagctccagttttgcagaatgagttatcatgcagtagtagctgtagagggatgaatccactaacaattgcaacccaaatcagtgagggagagggaagaaactccccagctttctttcttcctgccctgtgaatgtctgctgttgtctcccactggccaaacccagctagaagcaagctggcaagggagactgatgcaattctccctcctcagcttcccaagtagctgggacaacaggcacatgccaccacacctggctaatttttgtattttttgtagagatggggttttgccgtgttccccaggctggtctcaaacccctgagctcaatctgcccgcctcagcttcccaaagtgcttggattacaggcgtgagccacca

SEQ ID NO: 40832 - DNA, 1436 bp, Homo sapiens
tgctgcataaagaacaaccacaagccctcaaagacatacatgttatgcatttgtatccttcttatgtgtctaatctatagacacataagcaaggagatgactctccttcaggctctgggtctgcaagtcacagtgaggctctgattcatacgtaaatgctgaatattgatgtaagcaaaattgcrctataactatatttgaagaatgaggggatggaaggggaaggaaagaaagctgaatccttactccggagacagagtagcatagtagttgagaacataagctgtggagctaaacacctgggtctcaatcccaactcagccacttcacatgcatgatcttgagcacattaccaaatccctctgctcctcagtttcctcatttgtaaaatggtgttaataataattcccagcggcaaggcgcggtggctcacagctgtaatcccagcattttgggaggccgaggcaggcggatcacctgaggtcaggagtttgagaccagcctgaccaatatggtgaaaccccatctctactaaaaatacaaaaattagctgggcacgatgacaggtacctgtagtcccagctattcggaagactgaggcaggagaattgcttgaacccaggagttggaggttgcagtaagccgagatcatgccattgcactccagcctgggtgacagagcgagacttcttctcaaaataataataataataataataataataataataataatatccacctctcagagctgttatggccattaaataaattaatatgtgggcagtacccgatagagtgcctagcacatgctgggtgttatgtaactgattgctattattatttatcacggtggagaaccaacagagaatgctgaaactgaaaaaaaaaaatcaagaagtaaccattcaattatattatttacagacctggacataaataccaaaataattatctaggaggtgaagtggttgccactgaggaaaagggaaaaaggcgggggcacaggactgttgtttctcaacaaaattgtggagttggtttattcttgtgtgcattataacttggagaaaagtaaaaactgaaaacaaggaaagatgaaaagaggaaagatgccaaaccatgaatgaggaacataagcatattcatttgatggtggaaggtcaaaatggttctaaaatgttaaaaatgaaatgaagacatccaaatattgagtcccggcagcacacagaaggtgtctatagaaggaaaaagtcattaattttcacttaatccaagagacaataatggatttgtaataagaaaatgcaacagtaatgtcagactgccatagtacagtactcactaatacctaatgcactgctccaggcctccctccctgcctcctctcattcctggcccattaaatatcctgtgaatattcataggcacaatgc

SEQ ID NO: 40833 - DNA, 1436 bp, Homo sapiens
tgctgcataaagaacaaccacaagccctcaaagacatacatgttatgcatttgtatccttcttatgtgtctaatctatagacacataagcaaggagatgactctccttcaggctctgggtctgcaagtcacagtgaggctctgattcatacgtaaatgctgaatattgatgtaagcaaaattgcactatractatatttgaagaatgaggggatggaaggggaaggaaagaaagctgaatccttactccggagacagagtagcatagtagttgagaacataagctgtggagctaaacacctgggtctcaatcccaactcagccacttcacatgcatgatcttgagcacattaccaaatccctctgctcctcagtttcctcatttgtaaaatggtgttaataataattcccagcggcaaggcgcggtggctcacagctgtaatcccagcattttgggaggccgaggcaggcggatcacctgaggtcaggagtttgagaccagcctgaccaatatggtgaaaccccatctctactaaaaatacaaaaattagctgggcacgatgacaggtacctgtagtcccagctattcggaagactgaggcaggagaattgcttgaacccaggagttggaggttgcagtaagccgagatcatgccattgcactccagcctgggtgacagagcgagacttcttctcaaaataataataataataataataataataataataataatatccacctctcagagctgttatggccattaaataaattaatatgtgggcagtacccgatagagtgcctagcacatgctgggtgttatgtaactgattgctattattatttatcacggtggagaaccaacagagaatgctgaaactgaaaaaaaaaaatcaagaagtaaccattcaattatattatttacagacctggacataaataccaaaataattatctaggaggtgaagtggttgccactgaggaaaagggaaaaaggcgggggcacaggactgttgtttctcaacaaaattgtggagttggtttattcttgtgtgcattataacttggagaaaagtaaaaactgaaaacaaggaaagatgaaaagaggaaagatgccaaaccatgaatgaggaacataagcatattcatttgatggtggaaggtcaaaatggttctaaaatgttaaaaatgaaatgaagacatccaaatattgagtcccggcagcacacagaaggtgtctatagaaggaaaaagtcattaattttcacttaatccaagagacaataatggatttgtaataagaaaatgcaacagtaatgtcagactgccatagtacagtactcactaatacctaatgcactgctccaggcctccctccctgcctcctctcattcctggcccattaaatatcctgtgaatattcataggcacaatgc

SEQ ID NO: 40834 - DNA, 1436 bp, Homo sapiens
tgctgcataaagaacaaccacaagccctcaaagacatacatgttatgcatttgtatccttcttatgtgtctaatctatagacacataagcaaggagatgactctccttcaggctctgggtctgcaagtcacagtgaggctctgattcatacgtaaatgctgaatattgatgtaagcaaaattgcactataactatatttgaagaatgaggggatggaaggggaaggaaagaaagctgaatccttactccggagacagagtagcayagtagttgagaacataagctgtggagctaaacacctgggtctcaatcccaactcagccacttcacatgcatgatcttgagcacattaccaaatccctctgctcctcagtttcctcatttgtaaaatggtgttaataataattcccagcggcaaggcgcggtggctcacagctgtaatcccagcattttgggaggccgaggcaggcggatcacctgaggtcaggagtttgagaccagcctgaccaatatggtgaaaccccatctctactaaaaatacaaaaattagctgggcacgatgacaggtacctgtagtcccagctattcggaagactgaggcaggagaattgcttgaacccaggagttggaggttgcagtaagccgagatcatgccattgcactccagcctgggtgacagagcgagacttcttctcaaaataataataataataataataataataataataataatatccacctctcagagctgttatggccattaaataaattaatatgtgggcagtacccgatagagtgcctagcacatgctgggtgttatgtaactgattgctattattatttatcacggtggagaaccaacagagaatgctgaaactgaaaaaaaaaaatcaagaagtaaccattcaattatattatttacagacctggacataaataccaaaataattatctaggaggtgaagtggttgccactgaggaaaagggaaaaaggcgggggcacaggactgttgtttctcaacaaaattgtggagttggtttattcttgtgtgcattataacttggagaaaagtaaaaactgaaaacaaggaaagatgaaaagaggaaagatgccaaaccatgaatgaggaacataagcatattcatttgatggtggaaggtcaaaatggttctaaaatgttaaaaatgaaatgaagacatccaaatattgagtcccggcagcacacagaaggtgtctatagaaggaaaaagtcattaattttcacttaatccaagagacaataatggatttgtaataagaaaatgcaacagtaatgtcagactgccatagtacagtactcactaatacctaatgcactgctccaggcctccctccctgcctcctctcattcctggcccattaaatatcctgtgaatattcataggcacaatgc

SEQ ID NO: 40835 - DNA, 1436 bp, Homo sapiens
tgctgcataaagaacaaccacaagccctcaaagacatacatgttatgcatttgtatccttcttatgtgtctaatctatagacacataagcaaggagatgactctccttcaggctctgggtctgcaagtcacagtgaggctctgattcatacgtaaatgctgaatattgatgtaagcaaaattgcactataactatatttgaagaatgaggggatggaaggggaaggaaagaaagctgaatccttactccggagacagagtagcatagtagttgagaacataagctgtggagctaaacacctgggtctcaatcccaactcagccacttcacatgcatgatcttgagcacattaccaaatccctctgctcctcagtttcctcayttgtaaaatggtgttaataataattcccagcggcaaggcgcggtggctcacagctgtaatcccagcattttgggaggccgaggcaggcggatcacctgaggtcaggagtttgagaccagcctgaccaatatggtgaaaccccatctctactaaaaatacaaaaattagctgggcacgatgacaggtacctgtagtcccagctattcggaagactgaggcaggagaattgcttgaacccaggagttggaggttgcagtaagccgagatcatgccattgcactccagcctgggtgacagagcgagacttcttctcaaaataataataataataataataataataataataataatatccacctctcagagctgttatggccattaaataaattaatatgtgggcagtacccgatagagtgcctagcacatgctgggtgttatgtaactgattgctattattatttatcacggtggagaaccaacagagaatgctgaaactgaaaaaaaaaaatcaagaagtaaccattcaattatattatttacagacctggacataaataccaaaataattatctaggaggtgaagtggttgccactgaggaaaagggaaaaaggcgggggcacaggactgttgtttctcaacaaaattgtggagttggtttattcttgtgtgcattataacttggagaaaagtaaaaactgaaaacaaggaaagatgaaaagaggaaagatgccaaaccatgaatgaggaacataagcatattcatttgatggtggaaggtcaaaatggttctaaaatgttaaaaatgaaatgaagacatccaaatattgagtcccggcagcacacagaaggtgtctatagaaggaaaaagtcattaattttcacttaatccaagagacaataatggatttgtaataagaaaatgcaacagtaatgtcagactgccatagtacagtactcactaatacctaatgcactgctccaggcctccctccctgcctcctctcattcctggcccattaaatatcctgtgaatattcataggcacaatgc

SEQ ID NO: 40836 - DNA, 1436 bp, Homo sapiens
tgctgcataaagaacaaccacaagccctcaaagacatacatgttatgcatttgtatccttcttatgtgtctaatctatagacacataagcaaggagatgactctccttcaggctctgggtctgcaagtcacagtgaggctctgattcatacgtaaatgctgaatattgatgtaagcaaaattgcactataactatatttgaagaatgaggggatggaaggggaaggaaagaaagctgaatccttactccggagacagagtagcatagtagttgagaacataagctgtggagctaaacacctgggtctcaatcccaactcagccacttcacatgcatgatcttgagcacattaccaaatccctctgctcctcagtttcctcatttgtaaaatggtgttaataataattcccagcggcaaggcgcggtggctcacagctgyaatcccagcattttgggaggccgaggcaggcggatcacctgaggtcaggagtttgagaccagcctgaccaatatggtgaaaccccatctctactaaaaatacaaaaattagctgggcacgatgacaggtacctgtagtcccagctattcggaagactgaggcaggagaattgcttgaacccaggagttggaggttgcagtaagccgagatcatgccattgcactccagcctgggtgacagagcgagacttcttctcaaaataataataataataataataataataataataataatatccacctctcagagctgttatggccattaaataaattaatatgtgggcagtacccgatagagtgcctagcacatgctgggtgttatgtaactgattgctattattatttatcacggtggagaaccaacagagaatgctgaaactgaaaaaaaaaaatcaagaagtaaccattcaattatattatttacagacctggacataaataccaaaataattatctaggaggtgaagtggttgccactgaggaaaagggaaaaaggcgggggcacaggactgttgtttctcaacaaaattgtggagttggtttattcttgtgtgcattataacttggagaaaagtaaaaactgaaaacaaggaaagatgaaaagaggaaagatgccaaaccatgaatgaggaacataagcatattcatttgatggtggaaggtcaaaatggttctaaaatgttaaaaatgaaatgaagacatccaaatattgagtcccggcagcacacagaaggtgtctatagaaggaaaaagtcattaattttcacttaatccaagagacaataatggatttgtaataagaaaatgcaacagtaatgtcagactgccatagtacagtactcactaatacctaatgcactgctccaggcctccctccctgcctcctctcattcctggcccattaaatatcctgtgaatattcataggcacaatgc

SEQ ID NO: 40837 - DNA, 1039 bp, Homo sapiens
ttgcaaaccccacctcagatcatgtcaattactaaaaataaattcaggggctctccactgcactctgtaatttgactcaaaattattagcttggccctccagggttcacctaatccgccctctgcctaattctccaaccttctttggggtttctgctctccccattcctgatgatccagccacatgcctctcctggaatttatgccaccttcccatctcagagtcatggttcagcgtttttcactggtttattcttatttatcctgcaggctcagctttaatgttcctcctgtgagctcacaacctatattattctttctcattgcaacatgttctttgcatttacatgcaaccatttgtgtatctattgtgtatgatccctcgggggctgatacattttgggacaggaaggaaagcatccttttgtatgagatgtatccccagtaccaagcyccagggtcagctggagtagttgttgagttgacatggatggaattggtgaagaaatgaatgggctgtataaggttgacagtattcactcataaaggtttagtgacttgactcctgccacaccctcagcaagcagacatgcagttcctaggtgaactgcaccatctggaagactccctaggagaagaaatggggagaggggctgcaggaggcaggttagaaaattctagaacagttggttctccaagacagagtccccttagagtggggctgtaaagatatgtgagaagcatagtcaatgttcacacttgtgctagctttggcagcacatatactaaaactgaaacaatacagagaagattagcatggcccctgtgcaaggatgacatgcaaattcgtgaagcgttccatattttttagtggaagcaattttggaggtagtggaagctacaatgattttggcaattacaataatcagtcttcaaattttggacccatgaagggaggaaattttggaggcagaagctctggcccctgtggtggtggaggccaatactttgccaaaccacgaaaccaaggtggctatggt

SEQ ID NO: 40838 - DNA, 546 bp, Homo sapiens
ttctttaacagacttttttttcctcagagaaattaacgtagctgtggatttgcttcagttgaataacctgcttttaatgcacgaaatcagacacagagggtattatgtacttacttttagtgaagagaaaatgtttgagatgccttagattctcttcaagggaaatatttaggtatatttataattgctgaggatgaatgtataaactaagttttcatagatatttctacagcttaacattgtatatttgcaatattaatttcagatttggaagcaaaataataaaggctaaatttatgggaaacatgatttaaacagcttaaacctaatttataatattgagtgggaaaattcctattaaaatcactttcctggctattacataagaatatattggaaattgccttttattttgtctgtaaataatttctcatttttcaaccagaaattgttaaattaagatcctggtacaygcatgcaatttatttgaggggataaggttcaaatatagaagaatataaatatgctatttgaaatctgagagtc

SEQ ID NO: 40839 - DNA, 1139 bp, Homo sapiens
aggtgtggacatcctggagggccattatcctgcccaacccaaccactatatgatttctgctttgtcctcctcccctacctgaaaggttggtgcaaatgtaattgcagtttttactattaccttttaaaaaaaaaaatggcaaaaagtggccgggcggggtggctcacgcttgtaatcccagcactttgggagaccaaggtgggtggatcacttgaggccgggagttcgagaccagcctggccaacatagtgaaaccccatctctactaaaactacaaaaaatcagctgagcctggtggcaggcgcctgtaatcccagctactcaggaggctgaggcaggagtatcgcttgaacctcagaggcaaaggttgccgtgagctgagatcgcaccactgcactccagcctgggcaacaatagcgaaactccgtctcaaaaacaaaacaaaacaaaaaaggcaaaaaccgtaattacttttgcaccaacctaatagcatgtgttttctttaatttcaaggaattggtcaacttgtctatgatcttgcatactgtggcagaagaaaaacacctaattccgctactgctgtattttttacatgaaagattaagagtagttttatacaggaaatcttagagttgatgggacccaggaaagaatccaatggtccgttattacagaatcctgaaagcctgtgttcgcgggcttcctacacagtggcccactctggcctggccctgccagcatcccttgcacatgcacactcaccctcactgaattctctctctttcatgcttcctttccttctgtctctgycagtgcccaacctgatgctttctagaaggcagtgctgagtcccacccagtctggcggcatttatttctccagctgattctatccaccatgattttaacaacccttcatggaatagcagcaccgaatcctgatctttaacccaatgctctccctagatctccacagagaacttgcaagtgtctattagccatgtatgcaccctgaactccttcagtgcctaataggtccaaataggacttcttctctaatagaaaatccgccctaagttttgtataaaaatgtcatcatacactcaaacgtaacaaatgcagaaaccctgctgtcaacac

SEQ ID NO: 40840 - DNA, 1886 bp, Homo sapiens
tgcaccacaatgctcagctaattttttgtactttttgtagagatggggtttcaccacgttgcccaggcactggtctcaaactcctgggctcaagcgatcaccctcttcggcctcccaaagtgctgggattacaagtgtgagccatggtgtccagcccaagatctctcctttgacaagaagttttttgccttgaaattgtttgcaaaaagcgtttcttgattttgtaaccctgctcccaaaacaaaacttgactgcttgcaactcagtaaagagaaatgttgagttgctcctcagcccttaaaaatcattaaataatcatctggtcttttaacactaacaagagagttaagggaaatgggaagggaggaggtgggattttccatctgttccaggaaatcacgtgactgccttctctttagcctaataaggctgccagcagaactctgggtgctgatgggtgtgctctgtgtctcagtcttcctatgcgtaaccattagccccatcrgcctcctcataaccttcctaacctcttgccatccaaggtccttgcttctttcattcattcagtcaatgttttctgagcaagtactgcaccccagggaacaaatgcgaaaacgcccctgccctcctggtgcttgcattttaatttctaacaaatggcctcttgaaacggccagacttgtttaaagaactgcttcctctatgtgtttcttaaaaatgatggtattttggggcagaaaagcaaataaccgcagtttgagaaaacaatgtggttcaaaggattaaagaaattagaggctattgagggtctgcacaggaaaagataagggaacttgggaaccttttgcagtggaatgaagcagtaacagaatgactggcttggagattatttccggcaggggacataaacccactctgcaaataggaacgacctggcagagaattaggattcagtggccagaagtaggacctattcccagcaagaacatatttaacaattcctactagaaatgggatcaggagagaggcaaattcacgaccagcagaggtatcaacaacttcaagtagccgtaacaactactttaattctttggtaaaagtttttctaggtcaataaaaaagtaaggggttaaaaagtaagagtgatacttcgataaagttatcaataacaaccaagacccagaaagcttacccagctagtcaacgaggacccatgcataaggctgttactactaaccccatgctttttccactacattatgcagggagctgagcagggtcatctttcatcagcagtttctaagacacgggacactacagctgcagaacacagcatcggggaaggtcaaacctataacagctgaactctggtcaatgacaaatgtttctcaacatttgtcattgttgagacattgggtgtctaggtggagagtagttgccaagaagaggagggaggttgttcagaattgctacattgggataattgttattcatgaaacccagaactaagttcattcatcagcaactttacctagttctgggcgtagaacagtgaggcggttcctctgaatgtggagctctttaagctgggtaagctccccaatttccttaagcagtgagatcaggtctttatccctattgctgagctaaacagaagaaaacaaggagttgtcaacacattttcacattaaaaggtgctccacagaaactctcatcctcctccacgtcctctcttctaccacagctcagtcctttccatttatttacaagtgctggcggataatcaagaaacactatcagaagtagtggtttattcctgcaaaacaaaccttacttctgctcagatttacttgattctacccctacaaggctgcagcagtgaattg

SEQ ID NO: 40841 - DNA, 1886 bp, Homo sapiens
tgcaccacaatgctcagctaattttttgtactttttgtagagatggggtttcaccacgttgcccaggcactggtctcaaactcctgggctcaagcgatcaccctcttcggcctcccaaagtgctgggattacaagtgtgagccatggtgtccagcccaagatctctcctttgacaagaagttttttgccttgaaattgtttgcaaaaagcgtttcttgattttgtaaccctgctcccaaaacaaaacttgactgcttgcaactcagtaaagagaaatgttgagttgctcctcagcccttaaaaatcattaaataatcatctggtcttttaacactaacaagagagttaagggaaatgggaagggaggaggtgggattttccatctgttccaggaaatcacgtgactgccttctctttagcctaataaggctgccagcagaactctgggtgctgatgggtgtgctctgtgtctcagtcttcctatgcgtaaccattagccccatcggcctcctcataaccttcctaacctcytgccatccaaggtccttgcttctttcattcattcagtcaatgttttctgagcaagtactgcaccccagggaacaaatgcgaaaacgcccctgccctcctggtgcttgcattttaatttctaacaaatggcctcttgaaacggccagacttgtttaaagaactgcttcctctatgtgtttcttaaaaatgatggtattttggggcagaaaagcaaataaccgcagtttgagaaaacaatgtggttcaaaggattaaagaaattagaggctattgagggtctgcacaggaaaagataagggaacttgggaaccttttgcagtggaatgaagcagtaacagaatgactggcttggagattatttccggcaggggacataaacccactctgcaaataggaacgacctggcagagaattaggattcagtggccagaagtaggacctattcccagcaagaacatatttaacaattcctactagaaatgggatcaggagagaggcaaattcacgaccagcagaggtatcaacaacttcaagtagccgtaacaactactttaattctttggtaaaagtttttctaggtcaataaaaaagtaaggggttaaaaagtaagagtgatacttcgataaagttatcaataacaaccaagacccagaaagcttacccagctagtcaacgaggacccatgcataaggctgttactactaaccccatgctttttccactacattatgcagggagctgagcagggtcatctttcatcagcagtttctaagacacgggacactacagctgcagaacacagcatcggggaaggtcaaacctataacagctgaactctggtcaatgacaaatgtttctcaacatttgtcattgttgagacattgggtgtctaggtggagagtagttgccaagaagaggagggaggttgttcagaattgctacattgggataattgttattcatgaaacccagaactaagttcattcatcagcaactttacctagttctgggcgtagaacagtgaggcggttcctctgaatgtggagctctttaagctgggtaagctccccaatttccttaagcagtgagatcaggtctttatccctattgctgagctaaacagaagaaaacaaggagttgtcaacacattttcacattaaaaggtgctccacagaaactctcatcctcctccacgtcctctcttctaccacagctcagtcctttccatttatttacaagtgctggcggataatcaagaaacactatcagaagtagtggtttattcctgcaaaacaaaccttacttctgctcagatttacttgattctacccctacaaggctgcagcagtgaattg

SEQ ID NO: 40842 - DNA, 544 bp, Homo sapiens
cctcgagcaatccacccttcaaagcctccccaaatgctgggattacaggcacaagccacaayactaggtcaaaaccacgtttcttaaacaaaataaaaacttggcgggaagattgcttgagctcagaaggttgaggctgcagtgagtacttatcacactactgcactccagcgtaggtgacagagaaagatgctatctcaaaaaataaaataaaataatcccactctgcccacatcttaaaaaaatatattgtccgtatcttcatgactctcattcctggcccttaaaattctcctcacactggacctttgtattcatccacttgtttgaccccttctgggacctgacctgtcccaggaagagtccccattttcctccaatgcacttgtctttgagtctacctggccagacacccaagagttaccttgaggtgttacttttctcccttcccacatccagcctagcaaggcttgctgattccgccctgaatacaaatcccagaccataccccatcttccttcactgccttccagcgctcagtcaa

SEQ ID NO: 40843 - DNA, 544 bp, Homo sapiens
cctcgagcaatccacccttcaaagcctccccaaatgctgggattacaggcacaagccacaatactaggtcaaaaccacgtttcttaaacaaaataaaaacttggcgggaagattgcttgagctcagaaggttgaggctgcagtgagtacttatcacactactgcactccagcgtaggtgacagagaaagatgctatctcaaaaaataaaataaaataatcccactctgcccacatcttaaaaaaatatattgtccgtatcttcatgactctcattcctggcccttaaaattctcctcacactggacctttgtattcatccacttgtttgaccccttctgggacctgacctgtcccaggaagagtccccattttcctccaatgcacttgtcttygagtctacctggccagacacccaagagttaccttgaggtgttacttttctcccttcccacatccagcctagcaaggcttgctgattccgccctgaatacaaatcccagaccataccccatcttccttcactgccttccagcgctcagtcaa

SEQ ID NO: 40844 - DNA, 544 bp, Homo sapiens
cctcgagcaatccacccttcaaagcctccccaaatgctgggattacaggcacaagccacaatactaggtcaaaaccacgtttcttaaacaaaataaaaacttggcgggaagattgcttgagctcagaaggttgaggctgcagtgagtacttatcacactactgcactccagcgtaggtgacagagaaagatgctatctcaaaaaataaaataaaataatcccactctgcccacatcttaaaaaaatatattgtccgtatcttcatgactctcattcctggcccttaaaattctcctcacactggacctttgtattcatccacttgtttgaccccttctgggacctgacctgtcccaggaagagtccccattttcctccaatgcacttgtctttgagtctacctgrccagacacccaagagttaccttgaggtgttacttttctcccttcccacatccagcctagcaaggcttgctgattccgccctgaatacaaatcccagaccataccccatcttccttcactgccttccagcgctcagtcaa

SEQ ID NO: 40845 - DNA, 817 bp, Homo sapiens
atttttacaaaaaaaaaaaatcaggaaaatcaggaggttaatgtaagtatccagtttttccaaacaagatctttatttcatctgagtttgttggatttgcagtaaagcaaattctgagtaactacaggactttcttaaggcaagcattgcagtataactctcatcctcttattataactagttttcccttatagcattgatcacagctgtaatttttcatttgtcagtgtaactttttgattaaggtccaagaagatagaggtcatgttttattttgcttttcaaactattgtaacaccagtgcctagcatagtgtctgtccaatgcaggtgctcaatgttgttttgaattaatcaatgaaatcaccttccatgctggattcaaattgcagtctgaatcctgaggcagtcagagagccgtctatgacaaacctgaccacggcagtattgctagaagtgtctrtgctgtcaggaatggtgtttgcacagtatcttcccaagatgtttcctgtgagagacaaataattaaatatatatgtccaggtgattgatttcttttaacctctattcgaggtgtcctgcgtatacaaagaaaataataaaaaacaagaccttgcccatgaagaaaagttactctctgtcaagaaaacaggaaaacatgaatgaaaattaacatgttcaaatatatgaagaagtgaaaaaaatgcaaccagttaggggaaggatatctcaggacaatgaggaaggcttgcttatctggttgaaaaagtggtctgagacaaacagagtgacaaatatctgccttatgctactgccag

SEQ ID NO: 40846 - DNA, 616 bp, Homo sapiens
cagcctcccgagtagctgggactacaggtgtgagccaccgcacctggcttaaagaatcgtttttgatgagtagaacatgtttccattttattgtctggattaaacattaacttttttgtacttaatgtttcattggattatggaatatcttatttctaaaacactgagctggttaggaagggcagtccccatccctgtgataatttgcaagagctctttctcgaatgttcctttctaaatagaagcttgattttacttacttgtgtcaacttattgaatctttatgggaacattaattagatttttttgggagttgccgttggtctctgaattatttgttttctgggttggccccatcatgacaatggcttctctgggtattgcctggccctgtggtgatagtcactgcacagtcccacactgcaatgaaggggcccatgagggtgtgtgctgtggggaggggtctggcgggttgatggaggamgaagggtctcatgggcgcggctgcatttgggatgtaattttttttaccaagatgacccttgtcacgatcctgccgcctgcttctcctctctgctttggagtctggcttgatgttctttgggcctttccggaa

SEQ ID NO: 40847 - DNA, 573 bp, Homo sapiens
tggggagcatctgccccaggcaggaacagctgaggacacatgacaaggaggaataatctccctacagtggaggggacaaatgaatggcaacaacattatgacctacctcagggagcaaaaattaataaatgtagcacctcttccaaataaaaaagtggcattgttttacaagcatttccccacgcctttcacaatttccttacaaccatcctcagccagcgattccatctgatatggaataggacatgtcctgttctcagccccaggccctctggccagaacctgtgactgcttccaatcttttggcctttttttttttttaaatggagtctcactctgtcgccccaggctggagtgcaatggcatgatctcagctcattgccacctccgcytcccaggttcaagcgattctcctgcctcagcctgctgagtagctgggactacatgtgtgcgccaccatgcccagctaatttttgtgtttttagtagagacagggtttcaccatgttgaccaggctggtcttgatctcttgaccttgtgattcacccacctcagcctcccaaagtgctggga

SEQ ID NO: 40848 - DNA, 1060 bp, Homo sapiens
gtcatgatcttggtgcccacaggcgtggggctcctccctggccatgctctgggggtgtcccaccaatcccccagtcagagtgggggcacaggcaccatgatagaccagccccactcgcttcctggaggatgacatggagaatctcccctgggatcctgggggaagggcgggcttcgaccatcagcaatggtgactttcagcacgcactccaccctgccttgaggcacccagagaggccacacagccagtgccaccagcaggcctggctcagaggtcctagtccccttccaccacattgcagccttgttccttccacccaagcacagccctgggagctgccccttctactttaagctgtttctcctcaacygcaccccaaaaccctacagaaccccctctgaagtggtaagaacaaaccaagaccagaagaatcccagatgttccaaattaaggttcctgaggcctcagccagggtcttggacgtgagggagaggggactgaggtccacctcaggctgcaagacctgtcccgtctcaaaggcacacaagggctgaggtgttccatgtgtcaccccaatggagagcaagcagccccagcccacagctgtcctgccacacacgtggtgggtggagatggggagcaggcacagagaccagaatgtcccggccttgcgccagtgtgccttgaggtgccacaggcctgtcctgtggcgtacagccccaggagatcgccatggactctgtaccctagggaggccgccaggtgctcgcacctacctggggtggagctggccccaccaccacattcccctgctcaaaggtctatgtccttctgctcaactgttttttttccaggaaatcatttggaagaaaaaaagctattcccaagggtcttcaaggccacagtttcataggagagctgcaacctcttggtccgatcataaaggaaaatctcaacaatgaggctgctctgccagggcaccaagcacccccggagctgtggtcaccaaggcaccatcagagggaggggctctgctgcacgaatgtgaatgcacaaagaa

SEQ ID NO: 40849 - DNA, 1060 bp, Homo sapiens
gtcatgatcttggtgcccacaggcgtggggctcctccctggccatgctctgggggtgtcccaccaatcccccagtcagagtgggggcacaggcaccatgatagaccagccccactcgcttcctggaggatgacatggagaatctcccctgggatcctgggggaagggcgggcttcgaccatcagcaatggtgactttcagcacgcactccaccctgccttgaggcacccagagaggccacacagccagtgccaccagcaggcctggctcagaggtcctagtccccttccaccacattgcagccttgttccttccacccaagcacagccctgggagctgccccttctactttaagctgtttctcctcaaccgcaccccaaaaccctacagaaccccctctgaagtggtaagaacaaaccaagaccagaagaatcccagatgttccaaattaaggttcctgaggcctcagccagggtcttggacgtgagggagaggggactgaggtccacctcaggctgcaagacctgtcscgtctcaaaggcacacaagggctgaggtgttccatgtgtcaccccaatggagagcaagcagccccagcccacagctgtcctgccacacacgtggtgggtggagatggggagcaggcacagagaccagaatgtcccggccttgcgccagtgtgccttgaggtgccacaggcctgtcctgtggcgtacagccccaggagatcgccatggactctgtaccctagggaggccgccaggtgctcgcacctacctggggtggagctggccccaccaccacattcccctgctcaaaggtctatgtccttctgctcaactgttttttttccaggaaatcatttggaagaaaaaaagctattcccaagggtcttcaaggccacagtttcataggagagctgcaacctcttggtccgatcataaaggaaaatctcaacaatgaggctgctctgccagggcaccaagcacccccggagctgtggtcaccaaggcaccatcagagggaggggctctgctgcacgaatgtgaatgcacaaagaa

SEQ ID NO: 40850 - DNA, 1034 bp, Homo sapiens
gcctcgccttccggcagccgatcgggtcaggtaactctgctctctccctgtcagggtatcaagccggccagctttgagaaagtgcacgatcctgaaatcaaggagattattggggagtgtatctgcaaaaacaaggaggaaaggtgagttcccctgaagggytgggttctggggtccatctccagctgaactcattccagcttgcattgagagctgtgttcttgatgaggggacttcaagacaggcaggctcaggccagggtgtctggggcacgttagcaggggctggtgagcatgtcggccctgagtgcgtgtgggtgacaccaggccaggaggccaggccctcacgtccttgttggccatctggaaaccctctccttggctttggggacagccccctccttggctttgaggacagtcctgtccttggctgactgctcctccaggacccagcctgtagcatctgagcacctggggcttctctccagcctctctgctcctctctgcatgactcccatgccttgaagaacatccccacgccagtggctctaggtgtgggcctccatttggagccctgacgtgtatttcatggactgggttgtttggcccttctcaaaaatagcaggcctggaaccgctccacaaagccggctccccacctccaagcagggcctgtccttccctgttggtcaggtggaaggctgggggtgcttcctcagccttccctccccctcacactggagtacacccaccatctgacgtgacacccctcagcagtaagcagggatggattgtggatactcgaaactacacaggtgactctggagcacacacagaggaagccaggccccaaagagtgcgtgctgtgtggttccatttatagggtaaagggggttataggttagtggttagggaggcttctttgggtggccaagccctgcagagccccgaagtggtcaccatggcaacaccctgtggcccgccctcccggatccctgcaaagagccttcgaggctgggtctggctggggcccccc

SEQ ID NO: 40851 - DNA, 389 bp, Homo sapiens
gaaagcaaaacaattgctcctcgcagtcccaagtgcccagccacagaggggttgcccatgagccccaggcagtagattggtaccctcagagcgtagtttgtttatttatttgtttatttgagayggagtcttgctctgttgcccaggctggagtgcagtggcgtgatctcagctcactgtaacctctgcctcctgggttcaagcgactcctctgcctcagcctcctgagtagctgggattataggcacgcgccaccacgcccagctaatttttgtgtttttagtagacaccaggtttcaccatgttggccagcctggtctcgaactccggacctcaggtgatcctccctcctcagcctcccaaagtgctgagattacaagcgtgagtca

SEQ ID NO: 40852 - DNA, 712 bp, Homo sapiens
tgtggccatgtagaatgatatgctgccaccaggtggcagcaccaggccacagactccaggtcctggaggtcaaggcccagtggcctgtccactgaccttgagaaccacacatttctctgtcatacacatcaaaagagccaatacttytgtctttttttttttttctttgagatggagtctctgtcgcccaggctggagtgcagtggcatgatctcggctcagtgcaacctctgcctcccagtttcaagcaatcctctggcctcagcctcccaagaagctgggattaaacatgcaccatcatgcccagtcaattttttgtacttttagtagagatggggtttcaccgtgttggccaggctggtgtcaaactcctgacctggaactcctgatccgcctgcctcagcctcccaaagtgctgggattataggcatgagccattgtgcctggcttcaacttacttttttaaaacttgaatcacattctgtagactgaaaaataacagaagttagcacttataccatcacttcattaattccctgtcacagcctaccatgagggttcattatcccttttttacaaatgaagaaaccaagtctctgaggggtggagtagctggctaaggtcacacaggaagccacactatgtcccaacacttggaatgatgtcaccagccctgtgctttctttttttcgagatggagtcttgctctgtc

SEQ ID NO: 40853 - DNA, 1593 bp, Homo sapiens
acacccactccccccaccccagctgctgagcctggaccggacacctgattccctccccttgtcagctcctcccccaagcctttttgtggggaaacgagaatatttgtcaacccacagaatcatcatgagtttgcattttccagggggtttctggaggcacccaggctttgccccagaaggtgctgggaacccctaatgctggggcgatgccactggcagggcgaggctatgggcgcagctcctggagggaccctgctcagtcgcagggtcccagcgcacatgacagtgggaaccaggctgccggtggagtatggagctccaggacatgacatcccattaccatgcagccctgctgcttgggtcatcacagtgcctgccccttcagggaactgagggccaggggcaaggaaagccagtgcctcagagccctcccacctgccaggctgccatgcgcccactgagtggggtggccgggggacagccctagctgccctctccctcctccaccctgagccayggggccagggcctgtgctccagtctcagcccctttgcccacctgtgaaatgggatccctccctcgggactcctccttgagcctgcgctctgtcacagcaccccctccccctcagaaatccttttaggaatttaccaccttgctacagatgcctttaatgcctgggtaaaggagacacacttagtgaaggtgacaggtgtctgggtgaagggtgtagacaggtgtgacttgcccctggagggtgaaggaggggtctccagggacagtaacattctatgactgcgtcagctgaaggtaggaaacctccgaggcaggcagggcacaggccagtgtgtggcctgggcaagtcctaggtggccccacctgaggccgtggaggacacacgcacctcctcagggctgcctgacatgacctgaggccctgactccccaggccgcttgggcagggtgtcattcctcagtgaggggctgcctggcccgaggactgctgactcccctgtccatctgtgtgcacccaccgccctcccccgaggcccatgtcagccaggtcctgagccccactgtccttggactgccctcccagcgcccagctacccccagctccatccctgaccaactggactcaagcctggggctgagtctgtgacatcctcgaccaccagccaggcctactcttgcatctgccgcctcccgcctggtggttgccccaccctttgaggctggaacctggaggagggagaatgataagcgcccatgtctgtgcctcagccgcccatcaggcccagctctgctaaccaccgggccaaccagttcctgtgaccagcagtgaactaggtccccaggggaggggaaggcacccttgggcacgtgaggccctcctggctgccctgagtccccgcttccacactacacccacagatggccgtgtcctgcgcctccacacctgtgctgcaggtgttcaggcaaaaaccgtgctgctccctcggcttgggactccttaccagcccctctcatcaactcatccttcaggaatgccacttcctccaggaagccctcatgataccccagtaagaagagc

SEQ ID NO: 40854 - DNA, 1593 bp, Homo sapiens
acacccactccccccaccccagctgctgagcctggaccggacacctgattccctccccttgtcagctcctcccccaagcctttttgtggggaaacgagaatatttgtcaacccacagaatcatcatgagtttgcattttccagggggtttctggaggcacccaggctttgccccagaaggtgctgggaacccctaatgctggggcgatgccactggcagggcgaggctatgggcgcagctcctggagggaccctgctcagtcgcagggtcccagcgcacatgacagtgggaaccaggctgccggtggagtatggagctccaggacatgacatcccattaccatgcagccctgctgcttgggtcatcacagtgcctgccccttcagggaactgagggccaggggcaaggaaagccagtgcctcagagccctcccacctgccaggctgccatgcgcccactgagtggggtggccgggggacagccctagctgccctctccctcctccaccctgagccatggggccagggcctgtgctccagtctcagcccctttgcccacctgtgaaatgggatccctccctcgggactcctccttgagcctgcgctctgtcacagcaccccctccccctcagaaatccttttaggaatttaccaccttgctacagatgcctttaatgcctgggtaaaggagacacacttagtgaaggtgacaggtgtctgggtgaagggtgtagacaggtgtgacttgcccctggagggtgaaggaggggtctccagggacagtaacattctatgactgcgtcagctgaaggtaggaaacctccgaggcaggcagggcacaggccagtgtgtggcctgggcaagtcctaggtggccccacctgaggccgtggaggacacacgcacctcctcagggctgcctgacatgacctgaggccctgaytccccaggccgcttgggcagggtgtcattcctcagtgaggggctgcctggcccgaggactgctgactcccctgtccatctgtgtgcacccaccgccctcccccgaggcccatgtcagccaggtcctgagccccactgtccttggactgccctcccagcgcccagctacccccagctccatccctgaccaactggactcaagcctggggctgagtctgtgacatcctcgaccaccagccaggcctactcttgcatctgccgcctcccgcctggtggttgccccaccctttgaggctggaacctggaggagggagaatgataagcgcccatgtctgtgcctcagccgcccatcaggcccagctctgctaaccaccgggccaaccagttcctgtgaccagcagtgaactaggtccccaggggaggggaaggcacccttgggcacgtgaggccctcctggctgccctgagtccccgcttccacactacacccacagatggccgtgtcctgcgcctccacacctgtgctgcaggtgttcaggcaaaaaccgtgctgctccctcggcttgggactccttaccagcccctctcatcaactcatccttcaggaatgccacttcctccaggaagccctcatgataccccagtaagaagagc

SEQ ID NO: 40855 - DNA, 621 bp, Homo sapiens
atggtgtttctaatgaaaggcaaatggtgtccaatgtgacttggagaaaaacatacaaacaacaacaaaattatatgttctttcttcctgtagtgttcgcagggagaatatgtgacttgtttgctgtcaatacagcttataatgacacggtgcacagaagcactgccaaatgtgtgcggcattcattatacacatgtattaaatgtaatgcgatatgagtttggtggagagcagatgagagctgccctggggctgatgtagagttacagcacctcttcccaggggatgattactggggaaaggggaagtgggcagcagcatgggcgtgacgcagggtgtctagaattttcaggactgattctgggctagattgagagaaatgatcagctcaaagggtccttaaactttatttcaacaacaagaaatcatttaatgatcaattcttgtgctcctactaagtgccgggcttgtaataggttctgggaataagattcttcaccagctttcaggacgttcacagattagcaagagrgacaaacagatggagagagaataacggtgcaccgtgattggtaaatgcaatgatctagaagcagaggttcatgtgaaactacagataag

SEQ ID NO: 40856 - DNA, 968 bp, Homo sapiens
tcaccgctccttggacttcgagtggcgctactctaacgctgagtcctgacctggatccctgtttgcttgcctagacctaaggcggtggtgcagaccttcccccaccccacataccatcgccttctggaatgtggctttgtggaactgaggctgagacaatcacagtgccccattcttctggtcatgtgacaggtctggacctggtcatgtggcaaagtcgaatctaagtcacatcaaagcagggagagttaaagcaaatcttttctctcttgttgtggagctggaatatgagcccagaagcttccagaacacatggtcctgccctcataaagaagctcaagtgagggaacaaaatcgacttaggtagcagcgagcatggatggggcctggctacatcaagttctcagatcctgttgtccccacccaccccctgtaacttgccaattttatccatcaagcatcctctcctctctcccaacttgtctgagttctgtttctgtcattgtcaccaagagagctttgatgagtaagaaatcccaacattccacgggagtcttggtggtttaaatttttaagtgagtcctcacttgttaaagtcttattcctgttagagggcacttccatagtccagaaggtggggaattcctataggtgacctgtggtctctctaagcaatttgaccaggactatttaataaaatattttaaaaatggttccttttaattattcattttcaaatgtatatttgttcttggcaaacaagagatgatttgcrttaatcagtgatctttaagcaaattccttgcaatactttatctccatataaactcgaagcttcttaaatgaaatagtacctgtgtatttcatatggcttcctcttttataaataaaatgaatggacttgggaccaaaacagaattttttttttcgggaactataggactggaatctttttatccaaggcagtt

SEQ ID NO: 40857 - DNA, 968 bp, Homo sapiens
tcaccgctccttggacttcgagtggcgctactctaacgctgagtcctgacctggatccctgtttgcttgcctagacctaaggcggtggtgcagaccttcccccaccccacataccatcgccttctggaatgtggctttgtggaactgaggctgagacaatcacagtgccccattcttctggtcatgtgacaggtctggacctggtcatgtggcaaagtcgaatctaagtcacatcaaagcagggagagttaaagcaaatcttttctctcttgttgtggagctggaatatgagcccagaagcttccagaacacatggtcctgccctcataaagaagctcaagtgagggaacaaaatcgacttaggtagcagcgagcatggatggggcctggctacatcaagttctcagatcctgttgtccccacccaccccctgtaacttgccaattttatccatcaagcatcctctcctctctcccaacttgtctgagttctgtttctgtcattgtcaccaagagagctttgatgagtaagaaatcccaacattccacgggagtcttggtggtttaaatttttaagtgagtcctcacttgttaaagtcttattcctgttagagggcacttccatagtccagaaggtggggaattcctataggtgacctgtggtctctctaagcaatttgaccaggactatttaataaaatattttaaaaatggttccttttaattattcattttcaaatgtatatttgttcttggcaaacaagagatgatttgcgttaatcagtgatctttaagcaaattccttgcaatactttatctccatataaactcraagcttcttaaatgaaatagtacctgtgtatttcatatggcttcctcttttataaataaaatgaatggacttgggaccaaaacagaattttttttttcgggaactataggactggaatctttttatccaaggcagtt

SEQ ID NO: 40858 - DNA, 600 bp, Homo sapiens
gcaacaatgtgctatttttattttacattatgggttatcttccttattttatttcttatctgctttttgtctgtcagggcttgttgtctgtcaatccaggttacaaattctttcccttttctatttatttcagtatatatcgcaaagcagctaaaaccaactatgaaaaagtggcgtccaaatctcttgagaggcaatcatgcttctgcccttctgattagggctccatttttacaatcaggatcatgctacagggatgtgagggattttttctgatcttggacaggtgtgtgtgtgtrtgtgtgtgtgtgtgtgtgtgtgcgtgtgtgtgcttcccatgaagtcagcagaggagaccagtcccagtacaccttcgtttatgttaactccatctttctaaaaccaaaatctttctcatcagctaatgtcaccccccaccccacccccacccacagtactgaagaagcacaagaggcgagtcagaagccctgggctttagaacctcaggcacggtgccaatgcgggtctcagattccccgtttgtgtgttgaggtggctgtgggattagctcagctctaaagtgcctctattttctcgggt

SEQ ID NO: 40859 - DNA, 529 bp, Homo sapiens
ttaggaacatggatgtcattgctgactctgactctgaagtgtgttgagaaatgggaggtgaagaactggtggaaaccatgactataaagatttcagaaaggtttgctgtgaggaggaatggagaagcagcattatagctgaggaaggagtggagcaaagggcagattcaggttttctcctgttgtttttttttttttttaaagagaagatactacattggtgacttttagacttcttttttttcaagtgacctgccataagaattacatttccattgagacttactacacacatacttaaaattacgaaaacaaaaattttgaccaggcacgttggctcactcctgtaatccsagcactttgggaagccgaggcaggtggatcacttgaggtcaggagtttgagaccagcctggccaatatggtgaaaccctgtttctactaaaaatacaataattagctgggccttgtggcgcatgcctgtaatttcagctactcgggaggctgaggcatgagaatcgcttgaaccca

SEQ ID NO: 40860 - DNA, 618 bp, Homo sapiens
ggtgacactatttataaagcataaacaaatgtttcttgatgtgtaacataaagcccaagcagtcctattgttaaaaacctgctcctgtgcctaatgtctacataaatagcagcagcaacgcagtatcatgagctgcttggttcggcctcaagcaaatcataggcatattagatgtaacatttcctactaatggctgctgggcctttagaaaaaaaaaaaaaagttgaggatggggacttacgatgtgaggaaatgtagtatcatacagcagagttcaaaggaatctaaattatttgaacattctgcaatgatcatatattgtggtacttaagtccaacaatagcatgttgataacagaaatgctaatctcttggccttaaccccacccagcacttgttgctcctgaaagattaatgttatctctctatttaagtaacccacatatatgtycaaaattagactgtaaagcaagagcctgcttgactagaataaaatgttttttaacatcaatttataaatactctgaaaatgcaagtcactttccctcagctgaatggctaatgctttacaagattttgtgatacccaaaccattggatgtcagaaagatttaagttca

SEQ ID NO: 40861 - DNA, 809 bp, Homo sapiens
ttttacccattgcaggccacatgagtccaggcagcatggctgaggtctgaatggcggtggctttccacccmcagtggtctaacgcagctcaatctgcagctcagttgccttgccctcagaatagcttgctctgtgtgtgtgtgtgtgtgtgtgtgtgtgtgtgtgtgtgtgtgtgaacaaggtctacagcttcctttcaggttctctctctcacctttactccagctatcttgaatcaatgaaactgactgtgattgtataatgcagaaagctaggggtgccagccttctggcattcacaatttagtcttagctttgtacttacagtctcattttaaattgagatgaaattgttctgccccctgctgaagtttgagcttagaaagtggtaacacttgagcctttagcctggtcagaaataagtatgttagcattcctgaaaacttcttgttggcatccttttaataactctataataaccatgataaatttgtcatggcaccttattttccccatgttatgagatgttcttttctatcctatattttggctatttctgtctctatcttgtttcccctgttattctgtaaggtcttctatcattctccagtgctgtctgcatataggagatgctccgtaagtatcagataaatgaaggaataataagtactgtcatgctatgaaagtggtatgacttccaagcattgctggctagaaagaattcataatgttgtagtattttacaagcactaatgtagctaaaatggaaaaaggaacttgatctgttgtcatttttgttccctgtaggat

SEQ ID NO: 40862 - DNA, 662 bp, Homo sapiens
tgcatatttataagagaaaaatatcaatattgattataaatttgtcttgattccaaattatatacacattctattcaaagaaccaagagcaaaagaaatatgcaggagaagcccgtcctaggttacgccaagagtctgtggactgtagcaagcaataaaccaggcaaattacaatctttatggtttatgttgctggcaatatctctggctaagcaaatgctgatgggctaagcataacagggaaaataatatgtgagcataagacagactctgaaaaaaaataaatgtgctgcagggaaaaacacactgggctgggagtcaagaggctggagttgtccccgctctgtcacctccttgctgtgggagccaaggaaagcagattcrattctctctgggcaatgagggagaggagcaggtgcctctaggcccaggccctatgccacctctcagctcccacatcttggtgttagggcttggtcacctgcacagacggcctctctcagcctcatggaccattatttaagactgtcatcagcccaaagagattaatctttctatctcatcttatatacttagggaaacatttgtgtaccaatttgaaaagcacaagaaagaaggctcggaaataaaagaaaaactgacaaggtattttagaattttat

SEQ ID NO: 40863 - DNA, 763 bp, Homo sapiens
tattaagccactgtgtcttgctggctacctaccagcatgggcagccatggcttcttccccagaccctgatgtggggctcctgggccccaagggaagggaagctggaatcaggcagagcctgtgtgcagagtgcggtcccggggtcagggcaccagtttcagtagcttctgaaaagggtctgtggctcacaagaagaatamccacaggggggcctgaggatgaccagggtgtggacaggtggacagtggcccgaagtccccacgctgccttggccttactccttgggccacattgtaggagaggcctgagggcaagcacatcaggcacttggcctcctaaacccggcggtaacgtccttgtggaggttgacatgggggccgtattccctgcttggggctaccctgtccctattaaaaggtctgagccgggggctccagcacccaggagatcagtaggtctgagaccatcattcctgatggggaaactgaggccagtttcctgaggggagcctgacgtgtgtgtgggaggggagtgtgagtggacagcaggtctctggccttgggcgaccaggacccaccaaggtggagagtcctgtccagccgggcttcggtgccatcctcagtaaccacagggggaaggcccaggctggggaactccaacacctggggctcgtgctgggctctcagccaagcgccgaggctgctgtggctcccgggttctctccctctcctctctggccactcccttgcatcacagagagctt

SEQ ID NO: 40864 - DNA, 2102 bp, Homo sapiens
  misc_feature (1)...(2102): n = A,T,C or G
cggaacctggcaggtgccaggcctcatacccagtatcagcatgccaggggggcagggagtctacaactgagaatgaccttctgccaagctaggtatcccagggatggcccgcgctggccacctctgtttggtatcggttgcagcctttgcttctgaaggacacaggattwaccttcagccttaagacttggggccactaaggtggtaggtgcagggaggaggcccgaactccaagcaaggaagagtcttctaagcatggtgagctccccactactggtggtagggaagcagagggaggaagccatttccaccccctcccccggggagtnnnnnnnnnnnnnnnnnnnnnnnnnnnnnnnnnnnnnnnnnnnnnnnnnnnnnnnnnnnnnnnnnnnnnnnnnnnnnnnnnnnnnnnnnnnnnnnnnnnngacgcacagcccacctagcacttggcccagggcagagcccgctgcggctcgttccgcccccacccccacaaaccgtgttgcagacaccaagggcgtggccctgccaggtgccctctcttaaatcttctataaaaggagagggctggctgggtgactgtttccaacccaacatccacaaagtggataaacgggcagacgcgagtgactttcttaagtacacagccagcttgttgtgggccctgtctagggtgatggcatccctgggggccacaggctgtgggccccattgccttcaagcctgcgagctggctgccacagctcacccactgcagggggcacactgacgggcttcaggtccctcctccaggacacagggaggacagggatggagtgtttttcagaagacaggtcaaggctgatgacaggtccgggctgatggggagcagccgtgaagcaggctgtttgcatcatcactgtagtctccactctggaaaaccaaaatcaggtgactcgctgaattcaaaccggggaaggctgagccagagccagaactggggtctcccctctaggccaagtctgactgagaagctgggaggcctgtggctggtgcccaacagttcacttggtggctgggggctctcagcagcagccaggccaggcccaagccacacagactcccacctctgtttctgcggaaaaatagcaaacacgattcctcaggagaccagggagaggtggggacgggggtgcagctcagaccaggaccggggccctgacagaggaccccaagcagagagcagggcagtggtgccagggaggcagtctggctagccacacctctgatacaggccgcagagcttggctgctcttgcctttgggagggcctccaccacggttttggcagtgctgatactgaaacctgtcggctgtttctgagcatctggacatatgatgtagtgcttattgatggcaggagaagcagggagtgaccatgcatgttagcatgtaatttattccacacccataattctgttctgcagccagtgatgacagggagactcgctgcctcttatcaggcaggggcaccttcatgacatcggcccctccttggagctgaggccgggtgggctttattcaaggaccgcccccccgtgctgttctcaggctgagatgaagctaggatgatgggatctagccgggtgagtactggcagaagcccctgtgactgtggcagacagaaagatgccatatcctcttccccagaacctgtgaatgttcctatctaaagaggctttgcagatgagcttaagttaaggatttcatggaaaagggagattattctggatcatctgcacaggccctatggaagctcaagggtccttataaaagggagttaggaggctcagcgtcagagggaagacatgaggaccggccagggggttggaggcgagaagatgctgccggccttaaggagagggaggaaacgaggggagggagcccatggcctctgacctctgcctcgaggcaagttagtcagagacccctgccattcacagaagacaagaggcagccccctgggctccagctgctctttggtgaagcctggaaggggtaagagaggcggtgccctggacaccctggagaacccacgcttttcaggcttgagcctggggt

SEQ ID NO: 40865 - DNA, 2102 bp, Homo sapiens
  misc_feature (1)...(2102): n = A,T,C or G
cggaacctggcaggtgccaggcctcatacccagtatcagcatgccaggggggcagggagtctacaactgagaatgaccttctgccaagctaggtatcccagggatggcccgcgctggccacctctgtttggtatcggttgcagcctttgcttctgaaggacacaggatttaccttcagccttaagacttggggccactaaggtggtaggtgcagggaggaggcccgaactccaagcaaggaagagtcttctaagcatggtgagctccccaytactggtggtagggaagcagagggaggaagccatttccaccccctcccccggggagtnnnnnnnnnnnnnnnnnnnnnnnnnnnnnnnnnnnnnnnnnnnnnnnnnnnnnnnnnnnnnnnnnnnnnnnnnnnnnnnnnnnnnnnnnnnnnnnnnnnngacgcacagcccacctagcacttggcccagggcagagcccgctgcggctcgttccgcccccacccccacaaaccgtgttgcagacaccaagggcgtggccctgccaggtgccctctcttaaatcttctataaaaggagagggctggctgggtgactgtttccaacccaacatccacaaagtggataaacgggcagacgcgagtgactttcttaagtacacagccagcttgttgtgggccctgtctagggtgatggcatccctgggggccacaggctgtgggccccattgccttcaagcctgcgagctggctgccacagctcacccactgcagggggcacactgacgggcttcaggtccctcctccaggacacagggaggacagggatggagtgtttttcagaagacaggtcaaggctgatgacaggtccgggctgatggggagcagccgtgaagcaggctgtttgcatcatcactgtagtctccactctggaaaaccaaaatcaggtgactcgctgaattcaaaccggggaaggctgagccagagccagaactggggtctcccctctaggccaagtctgactgagaagctgggaggcctgtggctggtgcccaacagttcacttggtggctgggggctctcagcagcagccaggccaggcccaagccacacagactcccacctctgtttctgcggaaaaatagcaaacacgattcctcaggagaccagggagaggtggggacgggggtgcagctcagaccaggaccggggccctgacagaggaccccaagcagagagcagggcagtggtgccagggaggcagtctggctagccacacctctgatacaggccgcagagcttggctgctcttgcctttgggagggcctccaccacggttttggcagtgctgatactgaaacctgtcggctgtttctgagcatctggacatatgatgtagtgcttattgatggcaggagaagcagggagtgaccatgcatgttagcatgtaatttattccacacccataattctgttctgcagccagtgatgacagggagactcgctgcctcttatcaggcaggggcaccttcatgacatcggcccctccttggagctgaggccgggtgggctttattcaaggaccgcccccccgtgctgttctcaggctgagatgaagctaggatgatgggatctagccgggtgagtactggcagaagcccctgtgactgtggcagacagaaagatgccatatcctcttccccagaacctgtgaatgttcctatctaaagaggctttgcagatgagcttaagttaaggatttcatggaaaagggagattattctggatcatctgcacaggccctatggaagctcaagggtccttataaaagggagttaggaggctcagcgtcagagggaagacatgaggaccggccagggggttggaggcgagaagatgctgccggccttaaggagagggaggaaacgaggggagggagcccatggcctctgacctctgcctcgaggcaagttagtcagagacccctgccattcacagaagacaagaggcagccccctgggctccagctgctctttggtgaagcctggaaggggtaagagaggcggtgccctggacaccctggagaacccacgcttttcaggcttgagcctggggt

SEQ ID NO: 40866 - DNA, 418 bp, Homo sapiens
tgcattgggtctctttgatagccacgtgaagcctaaagaccctttctcagaatatttttaaactattaaaatacctaagaaaataaaacacctaaattagataaaataaatatgaaaataaataaggaaaatatctaataaactattactattattaaaaaccagttgtcaaatattttaaaaatatacaaagtatatagaatatttttaaaaacttatttgggaatagtctacgtgcttctctgagcattaaaataaaaagatttagtgstgggtctggtaactactatgacttcaaagtcgtgacgagcataaaggatatttagaggtctgctacacaacggtgactcccgactctagactggcctgcatgttttggaataatgccaaaattcagacaaatgtgctgatttggggt

SEQ ID NO: 40867 - DNA, 2588 bp, Homo sapiens
catctctacagataatcatctggcctcatgcaaccagcatgccacttgttggagaagtgtgttcaaaactcatttctggttcgtgcacctgtggcccttggcggcaggtcctgtaacacacagcctgaccactgatacagaggaggcccctgggactgctttccttataagggtcctgcgccttggtagaatttagatttggagttgcagagactcaactcaggaaagcaagtctttaacctctttgaccttggttttctcacgtgttaagctcaggacgtggaaccggtgatttctcatgcctttgatttttaagagtatgtggaatagaattgtgcataactgtgaatcacagtcactgtagaaccacagggctggctggtagctttcggaatctgttagtggctttmtctttgctctttgaaagattggtgctgttccatttcatgatgccagaaagtcatgttgggaattggtgttaatttttctgggctcaaaaaatcctgtttcttgactatttttcctacttctttccataatgtgagctattctgcaaaccaaagcactttagtaaaactctctactactagaaatgtgtttaacattattggtgtgttttcaacaatacacatcaaactttgagagccactcttgtgagtgaaattgctgtggagtatggagtgagaagttattctttgatctattttaggctacttgcaaagaaatataatagaatggctagaagagccatctctggagtcaggacagagtatctgtggccaagaattagcaggatgaccctgtagaagttattcacataactgaatttttaatgagataatgcatgtaaactactaagttttagatggtatagtatctgatcagtatacggtagctacttattatttgaatatgttctctaattcctgattgatttgtatttattaaagattattctacagattcaacttgtgctgatgtctttccactggctacagaagattcccagtttacttcacgtatctgaaaaaaagaatttcttatttaaatttacccctacacaactggaggcaggggggcagtgtgtgggaaaggtgaatttttatagaagtataagttcttctgaaagggacccaagctaaagtttccacgacagggtttcaaattcattttttaaaacgggggcagcacatcccggttctgatttggaaacaagcattgctgcctggaatggattaaaaacagaagatctctacttctgcatccatttgtaccttacacagggatgcttttaaaaatatttaacaactgtgactgggtgcagtggctcacgcctgtaatcgcagcactttgagaggccgaggcaggagtatcacttgaggtcagaagttcgagaccagcctggccaacatggtggaaccccatctttaccaaaaatataaaaaattagccgagtgtggtggcatgtgcctgtaatcccagctactcaggtggctgaggcaggagaatcgcttgaacccaggaggcagagcttgcagtgagccgagatagcaccactgcattacagcctgggcaatggagtgagactccatctcaaaaaaaaaaaaaaaaaaaaaaaaaaaaattaacaactgtatggcgtggcaacagctggtcggggaggttgcctaccattgccctgttggaacagatttgtaactcctttaattgtaggatcctggtgagagtttggggccgttgatgtaataggacacatttgggggcttgtagcagtggctgtttgtgaattagcagggaagcattttggtgtggcaacaagtgggatggctgtgcctgtgtgtactggctgaatgtccctgtgtcatgtccacgccagggattttttgcccagtttgtcatagaaggaaggtagaatgtaatgcttatgctcacgataagagtaatacgaattatttacatggatttagttttttagaaaattattggctaaaaatcattgggtcttattggttgtaaagtgctgaacccactgtgcaaaaatcaagacacttagaatacaagaaatactgagactttttcccttcacggagattcccagtatggtattcatgggggcagtgacatctagcgttccctcccaagatagcaggcactctgaatgaagacagtgtgtttatttcacaagtagcctacaaactcagttatttcatccagggcctgaattttaccatttttgaaagtacgtcacattcatctaagtgagggggcctggtttgttccaaattttcatgaccatcggagcgggtctgacggtgagaccagacattttgcttgtatttctggttcagctccagctagggctgaactcagggggccccctggaaatggggcatttctgggaccaatctgaggatttgcaaagaattttaagtaagcacaaaacttttgattaaaaaggagggcacaaactgaagcccagcctttgtttctaacacactttgacaaaatggtcattttgaattagatatgattagaaacctcttaagaaataaaaatgaaaactcgccaaactcttttatggctatgca

SEQ ID NO: 40868 - DNA, 2588 bp, Homo sapiens
catctctacagataatcatctggcctcatgcaaccagcatgccacttgttggagaagtgtgttcaaaactcatttctggttcgtgcacctgtggcccttggcggcaggtcctgtaacacacagcctgaccactgatacagaggaggcccctgggactgctttccttataagggtcctgcgccttggtagaatttagatttggagttgcagagactcaactcaggaaagcaagtctttaacctctttgaccttggttttctcacgtgttaagctcaggacgtggaaccggtgatttctcatgcctttgatttttaagagtatgtggaatagaattgtgcataactgtgaatcacagtcactgtagaaccacagggctggctggtagctttcggaatctgttagtggctttctctttgctctttgaaagattggtgctgttccatttcatgatgccagaaagtcatgttgggaattggtgttaatttttctgggctcaaaaaatcctgtttcttgactatttttcctacttctttccataatgtgagctattctgcaaaccaaagcactttagtaaaactctctactactagaaatgtgtttaacattattggtgtgttttcaacaatacacatcaaactttgagagccactcttgtgagtgaaattgctgtggagtatggagtgagaagttattctttgatctattttaggctacttgcaaagaaatataatagaatggctagaagagccatctctggagtcaggacagagtatctgtggccaagaattagcaggatgaccctgtagaagttattcacataactgaatttttaatgagataatgcatgtaaactactaagttttagatggtatagtatctgatcagtatacggtagctacttattatttgaatatgttctctaattcctsattgatttgtatttattaaagattattctacagattcaacttgtgctgatgtctttccactggctacagaagattcccagtttacttcacgtatctgaaaaaaagaatttcttatttaaatttacccctacacaactggaggcaggggggcagtgtgtgggaaaggtgaatttttatagaagtataagttcttctgaaagggacccaagctaaagtttccacgacagggtttcaaattcattttttaaaacgggggcagcacatcccggttctgatttggaaacaagcattgctgcctggaatggattaaaaacagaagatctctacttctgcatccatttgtaccttacacagggatgcttttaaaaatatttaacaactgtgactgggtgcagtggctcacgcctgtaatcgcagcactttgagaggccgaggcaggagtatcacttgaggtcagaagttcgagaccagcctggccaacatggtggaaccccatctttaccaaaaatataaaaaattagccgagtgtggtggcatgtgcctgtaatcccagctactcaggtggctgaggcaggagaatcgcttgaacccaggaggcagagcttgcagtgagccgagatagcaccactgcattacagcctgggcaatggagtgagactccatctcaaaaaaaaaaaaaaaaaaaaaaaaaaaaattaacaactgtatggcgtggcaacagctggtcggggaggttgcctaccattgccctgttggaacagatttgtaactcctttaattgtaggatcctggtgagagtttggggccgttgatgtaataggacacatttgggggcttgtagcagtggctgtttgtgaattagcagggaagcattttggtgtggcaacaagtgggatggctgtgcctgtgtgtactggctgaatgtccctgtgtcatgtccacgccagggattttttgcccagtttgtcatagaaggaaggtagaatgtaatgcttatgctcacgataagagtaatacgaattatttacatggatttagttttttagaaaattattggctaaaaatcattgggtcttattggttgtaaagtgctgaacccactgtgcaaaaatcaagacacttagaatacaagaaatactgagactttttcccttcacggagattcccagtatggtattcatgggggcagtgacatctagcgttccctcccaagatagcaggcactctgaatgaagacagtgtgtttatttcacaagtagcctacaaactcagttatttcatccagggcctgaattttaccatttttgaaagtacgtcacattcatctaagtgagggggcctggtttgttccaaattttcatgaccatcggagcgggtctgacggtgagaccagacattttgcttgtatttctggttcagctccagctagggctgaactcagggggccccctggaaatggggcatttctgggaccaatctgaggatttgcaaagaattttaagtaagcacaaaacttttgattaaaaaggagggcacaaactgaagcccagcctttgtttctaacacactttgacaaaatggtcattttgaattagatatgattagaaacctcttaagaaataaaaatgaaaactcgccaaactcttttatggctatgca

SEQ ID NO: 40869 - DNA, 595 bp, Homo sapiens
acaaaaatttaaaaacttatccaggtgtgatggtgcacatctgtagttccagctactagggtgactgaggtgggaagatcattagagcccgggaggtggaggttgccgtgagctatgatggcaccactgcactctagcctgggtgacagagggagaccctgccaaaaagatgaaagaaaggaaaagaaagraaggaaggaaggaagaaacgacggaagaaaggaaggaaggaaggaaggaaggagcgagggagggagggagggagggaaaagaaagaaaagaaagaaaaagaaaagaaaagagagagagaaaattatttgaatgaagactaacacagagcctgcctgtggtgtcacgaatcctggttcagtcctggacccaggccatatttcttaaaccctcagtttcttacattgtaaaatggggcatctaatatttatcatgaaaggctgttgtaatattttgaggtgacctacgaaaagtttgcatcaagtagggacttaataaactggaagtgagtggtgtggtttttaagctgcttagccctgtctctccaggctttaccctcccccatcccccatcctctgccagggat

SEQ ID NO: 40870 - DNA, 595 bp, Homo sapiens
acaaaaatttaaaaacttatccaggtgtgatggtgcacatctgtagttccagctactagggtgactgaggtgggaagatcattagagcccgggaggtggaggttgccgtgagctatgatggcaccactgcactctagcctgggtgacagagggagaccctgccaaaaagatgaaagaaaggaaaagaaagaaaggaaggaaggaagaaacgacggaagaaaggaaggaaggaaggaaggaaggagcgagggagggagggagggagggaaaagaaagaaaagaaagaaaaagaaaagaaaagagagagagaaaattatttgaatgaagactaacacagagcctgcctgtggtgtcacgaatcctggttcrgtcctggacccaggccatatttcttaaaccctcagtttcttacattgtaaaatggggcatctaatatttatcatgaaaggctgttgtaatattttgaggtgacctacgaaaagtttgcatcaagtagggacttaataaactggaagtgagtggtgtggtttttaagctgcttagccctgtctctccaggctttaccctcccccatcccccatcctctgccagggat

SEQ ID NO: 40871 - DNA, 445 bp, Homo sapiens
tgcactcttgagttttcttttagtatgattcttgctagcaactaatagtgcattttgggcagttgcagggctcaaaagcagtatatatactgtaaaacaattttaaaaagccttgaattatagtaaaaagagaactaatgaaaagggacctaagaaatataatgaaaataaatagttcttcctcttccaacttccctccagggagcaggttatgaaagatmgctagaatagtagaatagtggaataaaattattccagggtagaaagtaattaggggtgagtacatgaaagcccaggtttaattgttctttttaatacagtgaaaaaagtcattcatcatacaactttaaatgagtgtcccattaatggagtattcccccaatggaatattataaattaatatttttatatgtcctgtaattattctctgagtagcacatttgta

SEQ ID NO: 40872 - DNA, 596 bp, Homo sapiens
tgaaatgtattgccaacagagctcacattcatggacctacactgatagaacttggaggagtccacatcaagccttcttcatagtaattgatgaagaaattggggtccaaagagtccagtcgtcaytgggactatagactgggaaactgggccttggtagaactcttcaaagttgctgatgtgcctttccgtgtgagtacaatgaactcttatctacctttttgctttcattttcttgctggaatgtgtcctttgtaaacagtgaccccatattgttatcagtcaagtacatgttagttcaacatgttgtttttcatatttataaatgtgaaaaataaaatttttatcttcccaaaacttaaaaattccttgcctatgaaagtttacttttcttttagacatgtactaaaagaagcacagcttacatagaatcctttaaaagccaatttgaggaagcaaacccagagcaatcacaattatagatgtatatgtcaatatatttaaatattatttaaaacagtgtattttgtaaagatatgtatttttaccttgaaagtccatataaaacaacagttccaagttaggatgggcaacaaa

SEQ ID NO: 40873 - DNA, 596 bp, Homo sapiens
tgaaatgtattgccaacagagctcacattcatggacctacactgatagaacttggaggagtccacatcaagccttcttcatagtaattgatgaagaaattggggtccaaagagtccagtcgtcattgggactatagactgggaaactgggccttggtagaactcttcaaagttgctgatgtgcctttccgtgtgagtacaatgaactcttatctacctttttgctttcattttcttgctggaatgtgtcctttgtaaacagtgaccccatattgttatcagtcaagtacatgttagttcaacatgttktttttcatatttataaatgtgaaaaataaaatttttatcttcccaaaacttaaaaattccttgcctatgaaagtttacttttcttttagacatgtactaaaagaagcacagcttacatagaatcctttaaaagccaatttgaggaagcaaacccagagcaatcacaattatagatgtatatgtcaatatatttaaatattatttaaaacagtgtattttgtaaagatatgtatttttaccttgaaagtccatataaaacaacagttccaagttaggatgggcaacaaa

SEQ ID NO: 40874 - DNA, 486 bp, Homo sapiens
taaggatgttggagagtcataagaggaagtcaaattagattatgtaatatatggtttccggtatatgataagcactgaataaatgtatttctcccttattctactttacttataggtgctataatttctaggagaatgccactctatagaatttaattatatacaattactactattgtagattcctacattaagacttaacagaatgaaataatytctacttggaaggtagaagtacagtgatttaacactgctatgaatttgtcctgaaaccctatagtgaaatttctccaaatgaacaataataaaatatctatgatagacaatttttaaggtctgtactccaagcagtttctaaagtggcagggagcctttggcatttcctcagtaattggtccctaaattgtgtcaacaagtgcttatgtactctttacagttttgcctgcttttgcctttaaccatttcaatattctttcctgagcaaag

SEQ ID NO: 40875 - DNA, 539 bp, Homo sapiens
tctctcatatcttacatatatatttaatcctcacaataatgctacgtggagagtcctattattacccatatttttaaagataaaggaaatgaaacagaaaatacgatatttgacttgcctgtggtgagatgtgagtcatcagaagccgacattaggaacagcagtggggaatgttaaaaaaggaaggcttcsttgctcagaaatcactagacttttctgtcatctcagaataatcctctggtataaacaactgtgggtcagagaggggccatggtagttggctagtagtaatcctttaaatatctttctcattaaatagagataaatattttcccaagaagactaagtagattggacatttccaaaactttggaaagattcctaatatccactggagagcatagcctgggataaagatgatttctacctctattgtaccaaatttttaaaaagtgttctactcaattatggccacctgtttctaccccaaatttctcctttctaaagtgctgtgttatttactgtgattctaagagatt

SEQ ID NO: 40876 - DNA, 628 bp, Homo sapiens
ttcatcaactttcttgagaaatggaaatttatttcttaatttgtattataaatgcatttttggggagtgagactgtttattgttgcagatggagtttatggcttaaaaataaataagcactaaaatagtaaataattgaacagtatagattttcaccaaacaataaatgacaagtcctttgtagtgagtcctcacaccactctctatattctctatggcagtacggatgagtccatatttcctgtagttatttcacatgcaccaaaactataattgtctcattgttccaccagcctcaccagctaccaccagtgctttgtggttttcagcatttcacaagctgaggatgcataaaaccacatctagctggagggccaagttgagaccttagttaccagctctgaatacttctcccaccactgccttttaccatgcagggtcacatacactgtctgtaaaatattaccaagagttatacggctcctggaaagcatcagaaaaagagaggtaaacctgatagcttacttgaccgtgtgttaaagtatggatgctgttctcaatccatttatattttcacagctagaagtacaaagtgaggattgccaaaataactctaaccttttwaaat

SEQ ID NO: 40877 - DNA, 789 bp, Homo sapiens
ttcagactgaaccctattatttaccactgaggagacagaggcccagagagagaagtgactatgcagtgtcacattgtgcatagcaccaagcagggccagtaccatggtcttcccactccagtccacgttccttcttcctttgactcaaaaacttcctaggctcattggcaaggttcttcagggaaacagttcactcactccaggctcttatacaacaggacttgtcaggatacatgtaatgcatctgcttacttccttttctttccactaaatcaaggggcaaatatatctcagttgctattagtaaccttcgaaattcccatttcagtttgttgaggatgtggagaaattggaatccttgggcactgctggtgggaatgtaaaaatgatgcagccattgtggaaaatattatggtagttcctcaaagaattaaaagaattaccatatgatacagcaattccacttctgggtatacaccccgaagttttgaaagcagaaactcaaacagacattagtgcatccatgtttacagcacagttactcacaacagygaaaaggtggcagcaacccacatatccatcaactgacgaataaagataatgtgctagatacatacaatggaaaacattattgtcctttaaaaaggaaggaaattctggcacatgctacaacattaaataagccagtcacaaaaatacaaatactgtatgactccacttacacgagatacctgaaacagacaaattcatatggacaaagtgtgtgtgtgtgtgtgtgtgtgtgtgtgt

SEQ ID NO: 40878 - DNA, 1069 bp, Homo sapiens
taatcaaactctaggttctctgtttttactttattatacacagttttattttaaaaaaatatgtaattcttgatgctaaacatagaggtaagctttttctgaaactaatctaaaagtattagtacttttcagtctaaaatgttgatttattgaatacctgcaatatactgtgccttctgccaggtacttttatatattcttacaatggtgctatgaggtgggtagtcgtatatgtgtgtgtgtgtgtgtgtgtgtgtatgtgtgtatatgtgtgtgtgtgtgtgtgtatatatatatatgtatatatatatatacattttttttttttttttttttttgggacagggtcttgctctgtcacccaggctggagggcagtggcacaatcttggctccctgctatgtctgcctctcaggcccaagtgatcctctcacctcagcctcccaagtatctgggatcacaggcacaagccaccatgcctggcaaatttttgtgttgttttgtagagatggggtgtcgccatgttgcccatgctggtcttgaatctgcccatctcagcctcccaaagtgctgggattataggcatgagccactgcacttggccctttggtactatttttacctacaaagaatcgaaggttctgaaaggagcaatgtccaaataagttgttctcattccaaaggtcttgttctttacactatgaggttataaagctgttaaggcagtgcttgtctgggtctgtaagtgttacttcttcttcttatgtcatctggttatgaggaaggatcaagattgcttaaattctgaaataatctatatcaaaccccagagggaatcaagaaacaaatacatttagaatcaatgaaaataatttatggcaacaattatctataakcgttggtatatgctaaaaatacaaactcagattatgttaaaataatttaatagataaattgcccaacatattaccaacaaaaatttgagaggtattcttaattctggagatgaagtaaagggcagtaatgttgtgcaattcttcccttggtacctttatcagaggcaggagat

SEQ ID NO: 40879 - DNA, 525 bp, Homo sapiens
tttcccatcatagaggggttccagagttaccatatcttttaccatatatacattttttaagcaatggcaataatgttgtgactatactgttcaattcctcatagcatcagcattagatacattaaaggggataaattcaaataccaatctgatccttctgacataacccctaaatctcttctacttctatactttctcaaatataacatagaacctgaagacaaattatttctaaatactatcaagaaatacagtaatacatagcagacaatcccgctgaatctttctgtaacagtgcactaaatttgttacaagcaggcatgtaaacctaaaagatataatttagaggagaaactcygtcctgtctgttctccaggagctagagaaagaacaacagctgaaaggactgagtgaaaagatcctggataatcagttttctcagttatagctgtgtaacaggaaacaaattcccatggaaggctgtgatcagtttgaaacagctaagagagtgccaatggctagagt

SEQ ID NO: 40880 - DNA, 590 bp, Homo sapiens
cagcctcctgagtagctgggattacaggcatgagccatcacacccggccagtagcaatgattttctaagttctgaaagtagtggcatgttaaggctgatatttggtagtattttcatcttttatgcggatttttttttattctcatgaggttctaattatatatgataggtacttagcctacaaggyggtactgaaagtaatgagttgagtttttaatgagcttatcaatatataacttcaaagggctcatttgaaaaccactgaaacctaatctatattcctggaatcttgggatgctaagatagacttctaggagtcttatttacattgagaaatatgggagctatttcccatatttcccaatgagaaatatgggagctatgataagtattccttttggaaagatgactgggctctgacagacaggaaatcagtcacatgagtggaatgtagacaaaacctgcttttggtctgtgggctgaaggatgagaagaaaataaaatgtaataaaggtttgttttttcaaaactatatagtcatcttctatgtaccagataacatattttctccaagtagaagtgaattcaca

SEQ ID NO: 40881 - DNA, 1270 bp, Homo sapiens
attagaatatggaggtaatgaggccagggccacagagtgaaaaataccttaaggactcctgctggtatcctccaccctaacccgtcatcctgcacacctcagcagggtgtgaatgtcaccaagtgacatgccagcctctctgggaagcgtgtcaaagctgacaagccccactgatggtggatcagcagagatatcccatatacagaaaggatttcaggcttctggcattcctaagccctctagttggcccattaagaagttttatggctgctgaattaatttttaaaatttctaaaaagcatttcagcatttaccaagcggttctaaatctctggggtataaatgtcaccctctgcacacaagaccattaaaatcctgctttctacacctctctctgaaaggaaatgtcaaccaggtctccagggccagtggggcccatgctgcacccatgcgtgttgttctggatccctttaggctcacctggctgcattctgrggcccagagttttcctggaggatagcagggctgtgggggacaacagacaagaacgaccacctattctgtgacccccgtgggggtgggcactgacatgcatgaatgaccttctatctctatccagatgctgcaaagtaggtgggatcattcccatttcacagatagggaaactatggttcagaggtggagcaactttttcaaggtcatacagatagtaggtgatggattcggattttgaaacaggtctgaggccaaggttggtgctcctctcccttctctatagctgccatctagacagcagttgccaacaattaggttggctccaaaactgccctctaatgactccaacctgtgaccatggtgcccctctgagccttctgtaaccagtgttcgaaaacagaataagcacctgtaccccagacatatactcctcatcttttctttttaattcaagaaacgtctgggaaaaaaattcttgtcctcttccaaaagttgagaggtcaaggcaaaaataccctacactcacctcctcctctgaattgagaaagcccttttccagacagcccatctaccgtccactcttgaatctgaaaggagtcacttcttgcccaatctctctacttctttttcttttgccagctcagagctggtcctgcctggtccccttgtctgtctggttttgagtactcctgggggcagagcctttattcttggccccaaccaaccagatctccttgatggctggaccactggcggactgcagagtgtggggctg

SEQ ID NO: 40882 - DNA, 1270 bp, Homo sapiens
attagaatatggaggtaatgaggccagggccacagagtgaaaaataccttaaggactcctgctggtatcctccaccctaacccgtcatcctgcacacctcagcagggtgtgaatgtcaccaagtgacatgccagcctctctgggaagcgtgtcaaagctgacaagccccactgatggtggatcagcagagatatcccatatacagaaaggatttcaggcttctggcattcctaagccctctagttggcccattaagaagttttatggctgctgaattaatttttaaaatttctaaaaagcatttcagcatttaccaagcggttctaaatctctggggtataaatgtcaccctctgcacacaagaccattaaaatcctgctttctacacctctctctgaaaggaaatgtcaaccaggtctccagggccagtggggcccatgctgcacccatgcgtgttgttctggatccctttaggctcacctggctgcattctggggcccagagwtttcctggaggatagcagggctgtgggggacaacagacaagaacgaccacctattctgtgacccccgtgggggtgggcactgacatgcatgaatgaccttctatctctatccagatgctgcaaagtaggtgggatcattcccatttcacagatagggaaactatggttcagaggtggagcaactttttcaaggtcatacagatagtaggtgatggattcggattttgaaacaggtctgaggccaaggttggtgctcctctcccttctctatagctgccatctagacagcagttgccaacaattaggttggctccaaaactgccctctaatgactccaacctgtgaccatggtgcccctctgagccttctgtaaccagtgttcgaaaacagaataagcacctgtaccccagacatatactcctcatcttttctttttaattcaagaaacgtctgggaaaaaaattcttgtcctcttccaaaagttgagaggtcaaggcaaaaataccctacactcacctcctcctctgaattgagaaagcccttttccagacagcccatctaccgtccactcttgaatctgaaaggagtcacttcttgcccaatctctctacttctttttcttttgccagctcagagctggtcctgcctggtccccttgtctgtctggttttgagtactcctgggggcagagcctttattcttggccccaaccaaccagatctccttgatggctggaccactggcggactgcagagtgtggggctg

SEQ ID NO: 40883 - DNA, 1270 bp, Homo sapiens
attagaatatggaggtaatgaggccagggccacagagtgaaaaataccttaaggactcctgctggtatcctccaccctaacccgtcatcctgcacacctcagcagggtgtgaatgtcaccaagtgacatgccagcctctctgggaagcgtgtcaaagctgacaagccccactgatggtggatcagcagagatatcccatatacagaaaggatttcaggcttctggcattcctaagccctctagttggcccattaagaagttttatggctgctgaattaatttttaaaatttctaaaaagcatttcagcatttaccaagcggttctaaatctctggggtataaatgtcaccctctgcacacaagaccattaaaatcctgctttctacacctctctctgaaaggaaatgtcaaccaggtctccagggccagtggggcccatgctgcacccatgcgtgttgttctggatccctttaggctcacctggctgcattctggggcccagagttttcctggaggatagcagggctgtgggggacaacagacaagaacgaccacctattctgtgacccccgtgggggtgggcactgacatgcatgaatgaccttctatctctatccagatgctgcaragtaggtgggatcattcccatttcacagatagggaaactatggttcagaggtggagcaactttttcaaggtcatacagatagtaggtgatggattcggattttgaaacaggtctgaggccaaggttggtgctcctctcccttctctatagctgccatctagacagcagttgccaacaattaggttggctccaaaactgccctctaatgactccaacctgtgaccatggtgcccctctgagccttctgtaaccagtgttcgaaaacagaataagcacctgtaccccagacatatactcctcatcttttctttttaattcaagaaacgtctgggaaaaaaattcttgtcctcttccaaaagttgagaggtcaaggcaaaaataccctacactcacctcctcctctgaattgagaaagcccttttccagacagcccatctaccgtccactcttgaatctgaaaggagtcacttcttgcccaatctctctacttctttttcttttgccagctcagagctggtcctgcctggtccccttgtctgtctggttttgagtactcctgggggcagagcctttattcttggccccaaccaaccagatctccttgatggctggaccactggcggactgcagagtgtggggctg

SEQ ID NO: 40884 - DNA, 783 bp, Homo sapiens
tgcctgggatctacaacccaggggtacaggagtggaaaggaaatggctatatctctcctcggggtgcccaaaacacacacagctacttctacccagaatccgagggacagctgggaggctcctggaccaggtgtcagggcagcggcgggagaggaccccactcaggcaagatgctccagatactcactcctcctcgtactcttccaccacctcttctatgtcagacatggtctctgctctccctccaaaaggagaaaaaagtcagtgcaggtacaaagggaagcctgccttcctcagaagagctctggcccccgttgtacagagatcagcgaggcctagggtgaatctagttccacccctcatgagctgtgtgacctgcaacaaaaagcctgttttctcccctgctgggggagatagtgacacccacatggcagcaaggccacctgctgatgtccacttcgttccttgcccctgaacaggcaatactgcctgggatgctgcatttccatttgtgacactcaagacaatgtctgcagtttctcaacctttccatccactctgcccacccccactccacaggatctgttcagcactgtacaaatcttcactgcacaaagcctcactgcagcctcaaccttctgggctcaagcgattctcccacctcagcctcctgagttgctgggactatagttgtgcaccaccatgccygactaatttttgtatttttagtaaagctgggattttgccacattgcccaggctgtttcgaactcccaggctcaag

SEQ ID NO: 40885 - DNA, 724 bp, Homo sapiens
tgtctgtgtgtgtgtgtgtgtgtgtgtgtgtctgtgtgtgtgtgtgtgtgtgtgtgtgtgtgtgttagggaattagattagcatttcccaaaatgagttccagaggatgttcacaatgctaagtgacaaaggaggtctaagttttggaaactctgggctaaatgagtgaatcagttttttttactcgtgattctcagcagttttaacgtgctcatgtgtatcayagcagagaaagaaagagaaaaagacaaaggtggcatgaagcccctcccaacttacttcagtgcagaaaactttaacagaactccaatttcagagagccagtttgggcagccacactgagattgtttaagcttacttccaaagggaaattctggaatcccagacaaaggctctcctggaacaagtcaaatggcaaagcagatgggcatggactgggagagtgtgtccgcagaccaagtgcaactgatgagccctgcagggggaattccagcatgctcagcctcgaaatctggacaggctggtggacaggctgccatgaaagtaggagtcaagatataagacaggagcagggctcgctgcattctttgaaatgctctctcctgtctccctcctgtcaccatctgagacaggctcccagaatctctgtcttttcaaggaatgaaggacctttgggactgcagggtgacctagttcaatacttctcaaactggaatgtgcacat

SEQ ID NO: 40886 - DNA, 862 bp, Homo sapiens
ccagagagccgagcaatctgcagagttccaaaggcgtacccgtcagtaagtggttgggcaggaaacacttccactccctaggagccaccatagcccgtgcccaccaggaagcgctccaaggcgtctgcaggagacagctgtacacttagctagtgacccggtgaacatagccaacctaatctaagcgggagctttggaaagaaaacataccataggccaccttgcttcgggcgcacctccctgggggctctcatcaagtgtatatcaggctcagggtgatgactgggtcccacatttaactcactgccctcatgcacaaagacattttacacgtttgtttaaattttcctacaactgcttagtcttccacgcaaaccccgtcagctggggattggagttagggagcaaaggaaggcaaccgtggttcccartgagcacataactatttgtttttggcttgaatggtcccttttagtgaacagtcaattccaagttcagctgtccattaggttgtcactgcctctctctttctccagataggggtctgggtgtgagccctgggcactgcagaagcagcagccaatccatggtcagtatgcagcctgcctgttggtctgtaagctctgcctgggctgtggtcaggacacagaggcgatggtgatcctggctgctctcattgcagggaggtaccacccacccctgctgatgctggcccgacctcgcttctggctcctgcagctatctcttccagacacgagattgctgctgatccacattgcacttcaaatgcacttatgtggcaagtgggagctcctggaccccatgcatgcttggcctagggccaagaagatggctcagactt

SEQ ID NO: 40887 - DNA, 724 bp, Homo sapiens
gaggtcaaattttgcacacgtgaagcatttccgcctgaataaacaagttcctttttgttttttttgtcctctgtcattcctggaatcagtccagctgttcaccacctaggtacctcctggccccagatgtcctctggggcaggcaccagcacacacctgcgctatggggacagggggaagggaagaggagggcctcatttctatggcctgggagggagggagaaacaggtggcaagcacatcctggcctggccctgccctcagctgctcctgctgggctcctggaggcaaaggcttgtccaacaatgaggatggacacagacacatatgtgcaccctcygcctcctaccacagggctgctcctggaaaacgtattccctctctggacctctgcgcagtcctctcctcttccttccctaagcccccctctgcctcccccaactcccttcccttcttcaacactcactgagggctggcccctgggtaaagagaccaacttatctttgctttcatcttccatggttcctgggcctgcagacagactggttcccacagaaaccatgattgcccagattccagggggtggtgattacagaaaacaaactcccatttaaggacctgttcagggggccgagctgaaagcagcaatggcatggggacttcaaacctgtttcccttgacactcaggagtgccccaggcctggctgtgtgcagacacctgcctg

SEQ ID NO: 40888 - DNA, 519 bp, Homo sapiens
agcactttgggaggccgaggtgggtggatcacttgaggtcaggagttcgagactagcctggccaatgtggtgaaaccccatctttacttaaaaaaatataaaattaatggggctttgtggcacccacctgtaatcccagttacttgggaggctgaggcaggagaatcacttgaacctgggaggcagaggttgcagtgagccaggatcatgccactgcactccagtctgggcaacagagcaagactccatctcaaacaaacaaacaaacaaaaaccaaaaaaacccctagaactagaacttaggtctcctgactcctaggttagttctttgcctccctcacattcctcattcctgttacctttcccagcacccagtccagcctcctgagagtgatgtagagatgatatctgtcacaaccaccccttccccagcccrgaagagatgacctggctgtagctcttgtgcttgtggctgtccctcgcaggaaatgcgattgacaacatctcagaccccttctgc

SEQ ID NO: 40889 - DNA, 589 bp, Homo sapiens
aaagtgtcaagggaatcagaccttacaaaggagtccaaccaccaatccatgccccacggtcaccccacctccctcccttcggcacccacaagcagaagccaagcaaggtcaacttccttggctacaggattactccctttactaagccagtggcttttgtcaagcagccactttgtccctcctaccgtcttcctgtctctttaagagtaagctttctttccctacccattgctttttaccagagctttctagcacactactgcctcactgctgccctttcctaaaaaagctactgacatggtctagttgacacggttccttcatgcctgagtaaagtgggagtttgtccacactaagtagacttggggtacctggaagccctgctgcctggatctctcttccttgatgatggggaacttctcgctttagagtccctccttcaaaatactagtaatctctggcagagttaatacatcaaacccaagattcatctgttgaacttatttaatcagattgctttcctgttccacgattgggctggaacaggataagagactggtcagaggaggaccaaggctaatcccmtcca

SEQ ID NO: 40890 - DNA, 774 bp, Homo sapiens
gccacactcactcatttacgtgttgtctatggcggctttcccactacaacagcagaatggagtagttgcaacagagagcgcatggcccgcaaagcataaaatgtttactatctggccctttacagaaaatgcttgtgccctcccctgcaccttaggctgttttaagggaacaaggggaatgccaccttattctttttattttttgttttcttgtttgtgtgatacaaggtctcactctgtcacccaggctggagtgcagtggcaccatcgtggctcactgcagcctcccgggcccaatcaatcctcccgcctcagtctcctgagtagctgggactatagacacgcaccactcccagcttgccaccttattcttgacaacgtgcttcacaccaccgtggcaatgttaagttgacacggcaatatctagtggcaataaaaggaaacaaacattttgagggcccttgttgtataccagggacatttactctgtttatcacataatctctacaacaaccttgagagaaacaagcactaagaggtctatttacataaggaaggaatgkgagagattaggaaactcaccaaagctattagagttaggcagaacaggatgctggattcaaactcagatctgcctaaccccacagcccatatcctcttcaggccaccatgattctaagatgaccaccagcagcccagcgaggacccactcaaatggctgctggtttgggctacccccatgaacaggcagggcaattgggacttaggctttag

SEQ ID NO: 40891 - DNA, 774 bp, Homo sapiens
gccacactcactcatttacgtgttgtctatggcggctttcccactacaacagcagaatggagtagttgcaacagagagcgcatggcccgcaaagcataaaatgtttactatctggccctttacagaaaatgcttgtgccctcccctgcaccttaggctgttttaagggaacaaggggaatgccaccttattctttttattttttgttttcttgtttgtgtgatacaaggtctcactctgtcacccaggctggagtgcagtggcaccatcgtggctcactgcagcctcccgggcccaatcaatcctcccgcctcagtctcctgagtagctgggactatagacacgcaccactcccagcttgccaccttattcttgacaacgtgcttcacaccaccgtggcaatgttaagttgacacggcaatatctagtggcaataaaaggaaacaaacattttgagggcccttgttgtataccagggacatttactctgtttatcacataatctctacaacaaccttgagagaaacaagcactaagaggtctatttacataaggaaggaatgggagagattaggaaactcaccaaagctattagagttaggcagaacaggatgcyggattcaaactcagatctgcctaaccccacagcccatatcctcttcaggccaccatgattctaagatgaccaccagcagcccagcgaggacccactcaaatggctgctggtttgggctacccccatgaacaggcagggcaattgggacttaggctttag

SEQ ID NO: 40892 - DNA, 645 bp, Homo sapiens
ggagctaacagggaaaaaatgagcaagagggggacacttgccaacttgaccgtctctgattggaaatctcagagatgacatcaggtctctgctgttcagcagacctgagaggctcaccatgtggaacacgttaatggcataccattacctaggactgcttttttcacccgttagacaatgaattcacttttaaaaacttggagataaaattttacaaaactagagtaaaatgatgacaaatgagtaaacaatgtgtagcacagggtaaattttgactagacatccaactggctgaagacgttaataggtggttggcaagaactctcaaaagaaaagatgggaggtgaaatgactcacccctgcaagggaactcagactctgctgaagctcagaagttctatggctggaatggaaaaagacaaggaaaatgcaaacctctctgaacctgaagttaataaaggcacaatcgcaatcagctatagaaacaattcccaaatctctaatactggaggatstcttctgtcttcagatactttattttacaccaagttgtgttcctaagttttaggcttagaaaaatgaatgcttgttaaagtgtaagaatgactcagcaataaagcattcattcttctacttattaattca

SEQ ID NO: 40893 - DNA, 1199 bp, Homo sapiens
cactaagtaaatataccataaatattatagatttttagtgggctgaataatattctgagagtgttacgtatgtagaaagtctgttttctgctttctctttatctcatgaaaggaaaagcctgctctgcctttctttgcctcacaaaaggtgtgtgcagagcagaaacagaagtcacctgcagtgttttcagggcactgttgcctgaaacctaagcccatatgagaacccaaggctccctggaggatgcagaaggaagaagcaagagagacaggcaggcctcaagtggcagggccttgagccctgctccctggtggtagccccgggaagtggcaagcccagagaagggtggctgtgtggcctgtctgggggaatatgactaaggcagcttccagaagattaggttggcccagacagggcatggaagcaacgggggctggggcagggacaagaaagacctggcatgctggagagtcacctggatcaaagcacaacaatggggcattgacaaaaatgaccaagattaattttcctctcaaccttagggaggaaggcagggataggcaggagggccagtgggggaggaagggagggatgcaccaccagcctgactcagcagcgaactctcctggacaatggccctggatgccagactcagccacctctttctgtgctcttgaaagatgggggcacactgcagaaattcaactgatttacagaaaacgaaaagacctgctgctctgtgcacacctgagatttggactagcaccatgagcttgtaaatctcacattttacagataaggaaatagaaccagggattgaactgagtcattcagagtcacacaactgtagtcatctgtgagtcacatttgtagaaagccaaacacatgccagcacttgatactcttatctttgatccttacatgaccctctcagtatctctgcctcaagcctttggaagaggaaaatgagacatggagaagtaacttgctcaaggtcacaccgctttgcagtcracccaggacttgagcccaggatggtcacacatgcactcccaggggctatactcccctgccacctggccccctccagcatgcggcatcatccctttggacttcctcctgaagtacttttcacagtggggtcacacattagatccttccatctcccatccgatggtgggctccctagtctctgtgt

SEQ ID NO: 40894 - DNA, 561 bp, Homo sapiens
aagggatgtttttattatcacaaagggctttggtgacatagactgtaatggtggaatttcagacacaatggtaagccacctgggaggtatgttgatgaatactagaaagtgctggcttcctcaatctcatcagagaggaccagagatgttaagtgactttgtttaagtcacacagctattctgtctaccaaagcctaggggcagctaaggtttgaggaggtccattgtagaggtagaatctaaaaaggcagattttaatttctctcgctggccttctctaaactctttcccagtgatgtgagatctcttgagccaagaaccagaatcctagtgagtagcccctactgccccctccatccactctaaagatgcctccatctcccttttgtttttataggaccagggttgtatcttaagacactctcaacactagttcctgtaggaccagaagcttagttagtttttaacaatgcaataagcacctgcagaaccatcaccccaaacaacagccagaatcttgcscatcaccttcaccaaccccaccatcatgccattttgctt

SEQ ID NO: 40895 - DNA, 1226 bp, Homo sapiens
tttctttgcgcctgtctctcttgagtccatcccacttccttttcttgagtgtgtgctttttcctttgcaacaaatctctgtattttcactattttctgacttgtccttgaattcattctcccaacggtttcaagagcagggacaccagctggaggtgccactggcctttggggacatcccccagcccaccggtatcaagacaactctggggagggacwgttgagatacaactgaaagaaccaggcgtagtcagccatgcaatgacaggggtgggaagggcatcttttgagactgaggaaacagcaggtagagaacggtggtgagaaggagcttaagtgtctgcagcagatagacgcgtattgggactgcagctgagtgaacgggtaaaggacaccacaggtgacccgggtgaggctgtgggaggagtctgggtttcatggaagggcacaggagagatttaagtgcaggactgacaagctctgacttgtatttttaaaagatccctctggaaggctgggcgtggtggctcacgcctgtaatcccagcactttgggaggccgaggcgggtagatcatgaggtcaggagatcaagaccacagtgaaaccccgtctctactaaaaatacaaaaaaaaaaaaattagctggtcacggtggcaggcacctgtagtcccagctacttgggaggctgaggcaggagaatggcgtgaacccgagaggcgcagcttgcagtgagccgagatcacgccactgcactccagcctgagcgacagagcgagactccatctcaaaaaaaaaaaaaaaaaatcctcctagctgctggatggggaccagatatgaggggcgagaggtgaatcagggagacccgtggctgggaggctggggtgcaaggaggcaggcaagcaaggatggggtcttgggtcatgatgatactgcagagctagagggaaatacatgggtttgggatcattgtaaatgagacagggcaggccaatgactaggagtagaaaggggagagaggagtccacagcctctgcgacagccccaccatgaccactgctgtccccatcttgactgagaccatcatattaaagaaaagaaaaggattcccatgtcagctgccacactatctactgacctgagcccaaagcccttagtctgggctattaacgctataaaaatctccaacaactgattcctttaagctactgtagaagggttcttgcgg

SEQ ID NO: 40896 - DNA, 1226 bp, Homo sapiens
tttctttgcgcctgtctctcttgagtccatcccacttccttttcttgagtgtgtgctttttcctttgcaacaaatctctgtattttcactattttctgacttgtccttgaattcattctcccaacggtttcaagagcagggacaccagctggaggtgccactggcctttggggacatcccccagcccaccggtatcaagacaactctggggagggactgttgagatacaactgaaagaaccaggcgtagtcagccatgcaatgacaggggtgggaagggyatcttttgagactgaggaaacagcaggtagagaacggtggtgagaaggagcttaagtgtctgcagcagatagacgcgtattgggactgcagctgagtgaacgggtaaaggacaccacaggtgacccgggtgaggctgtgggaggagtctgggtttcatggaagggcacaggagagatttaagtgcaggactgacaagctctgacttgtatttttaaaagatccctctggaaggctgggcgtggtggctcacgcctgtaatcccagcactttgggaggccgaggcgggtagatcatgaggtcaggagatcaagaccacagtgaaaccccgtctctactaaaaatacaaaaaaaaaaaaattagctggtcacggtggcaggcacctgtagtcccagctacttgggaggctgaggcaggagaatggcgtgaacccgagaggcgcagcttgcagtgagccgagatcacgccactgcactccagcctgagcgacagagcgagactccatctcaaaaaaaaaaaaaaaaaatcctcctagctgctggatggggaccagatatgaggggcgagaggtgaatcagggagacccgtggctgggaggctggggtgcaaggaggcaggcaagcaaggatggggtcttgggtcatgatgatactgcagagctagagggaaatacatgggtttgggatcattgtaaatgagacagggcaggccaatgactaggagtagaaaggggagagaggagtccacagcctctgcgacagccccaccatgaccactgctgtccccatcttgactgagaccatcatattaaagaaaagaaaaggattcccatgtcagctgccacactatctactgacctgagcccaaagcccttagtctgggctattaacgctataaaaatctccaacaactgattcctttaagctactgtagaagggttcttgcgg

SEQ ID NO: 40897 - DNA, 1226 bp, Homo sapiens
tttctttgcgcctgtctctcttgagtccatcccacttccttttcttgagtgtgtgctttttcctttgcaacaaatctctgtattttcactattttctgacttgtccttgaattcattctcccaacggtttcaagagcagggacaccagctggaggtgccactggcctttggggacatcccccagcccaccggtatcaagacaactctggggagggactgttgagatacaactgaaagaaccaggcgtagtcagccatgcaatgacaggggtgggaagggcatcttttgagactgaggaaacagcaggtagagaacggtggtgagaaggagcttaagtgtctgcagcagatagacgcgtattgggactgcagctgagtgaacgggtaaaggacaccacaggtgacccgggtgaggctgtgggaggagtctgggtttcatggaagggcacaggagagatttaagtgcaggactgacaagctctgacttgtatttttaaaagatccctctggaaggctgggcgtggtggctcacgcctgtaatcccagcactttgggaggccgaggcgggtagatcatgaggtcaggagatcaagaccacagtgaaaccccgtctctactaaaaatacaaaaaaaaaaaaattagctggtcacggtggcaggcacctgtagtcccagctacttgggaggctgaggcaggagaatggcgtgaacccgagaggcgcagcttgcagtgagccgagatcacgccactgcactccagcctgagcgacagagcgagactccatctcaaaaaaaaaaaaaaaaaatcctcctagctgctggatggggaccagatatgaggggcgagaggtgaatcagggagacccgtggctgggaggctgggrtgcaaggaggcaggcaagcaaggatggggtcttgggtcatgatgatactgcagagctagagggaaatacatgggtttgggatcattgtaaatgagacagggcaggccaatgactaggagtagaaaggggagagaggagtccacagcctctgcgacagccccaccatgaccactgctgtccccatcttgactgagaccatcatattaaagaaaagaaaaggattcccatgtcagctgccacactatctactgacctgagcccaaagcccttagtctgggctattaacgctataaaaatctccaacaactgattcctttaagctactgtagaagggttcttgcgg

SEQ ID NO: 40898 - DNA, 1358 bp, Homo sapiens
cataaagatacagatatagaaaggttgaaaataaaatgatggaaaaagatatactatgtgaacagtatgagaaggaagctggcataactatattaaaatcagacataatactttaaggcaaaaatcattattagagttagaatgaggttgtttgtgatgatagaggctcaaatcaagaggaatgttaaaaaggaagagggataactcaagggaaggtcagcgaagattgtggaggaaattgtgtgtttccaggaagctccaggctcctcacattttccccaccagccagcagatagatattccatagtttaatttctttagcttagtgctttattgtatagttaaaattaaaaaaaagaaagcaagaaaggaaggagccatcaagttatgaaaggacattgaagaaacttaaatacatattactaagtgaaataagttgtattagtccattttcatgctgctgaaaaagacatgtctgagagygggtaatttataaagaaaaagaggtttaattgactcacagtttcacatggctggggaggcctcacaatcattgcagaaggtgaaggcacatcttatatggcagcagacaagagagaccttgtgcggggaaactcccatttttaaaaccattagatcttgtgagactgattcactatcatgagaacagcactgcaaagacccgcaaaagtcattattagagatagaatggggttgtttgtgatgatagatgctcaaatcatttttccccatgattcaattacctcccaccgggtccctcccacaacatgtgggaattgtgggagctacaattcaagatgagatttgggtggggacacagccaaaccatatcactagtccgtctgaaaaggctacataacatataattccaaatatatgacattctggaaaaggcagagcaatggagacagtaaaaaaaaaagatttctgggtgtttggtgaggggtagatgaacaggcaaagcacagaggatttttagggcagtgaaaatactctgtctgatactataatggtggatacatattatcatatatttgtcaaaacccataaaatataccatactaagagggaaccctaaagtaaactacagtgataatgacatgtcaacataggttcatcgattttaacaaatgtacctcactagtgtgagacattaataattgggaagctgtgtgtgtgtgaacatcttactttcttctcaattttttgtaaagctaaaactgctctgaaaaataaaactattaattaaaaaaattaataggagtctgtgtacagagattctttttgtacaaggaaaaaaaccaactcaaattaagccaaaaacaaaagtaaatgca

SEQ ID NO: 40899 - DNA, 1358 bp, Homo sapiens
cataaagatacagatatagaaaggttgaaaataaaatgatggaaaaagatatactatgtgaacagtatgagaaggaagctggcataactatattaaaatcagacataatactttaaggcaaaaatcattattagagttagaatgaggttgtttgtgatgatagaggctcaaatcaagaggaatgttaaaaaggaagagggataactcaagggaaggtcagcgaagattgtggaggaaattgtgtgtttccaggaagctccaggctcctcacattttccccaccagccagcagatagatattccatagtttaatttctttagcttagtgctttattgtatagttaaaattaaaaaaaagaaagcaagaaaggaaggagccatcaagttatgaaaggacattgaagaaacttaaatacatattactaagtgaaataagttgtattagtccattttcatgctgctgaaaaagacatgtctgagagtgggtaatttataaagaaaaagaggtttaatkgactcacagtttcacatggctggggaggcctcacaatcattgcagaaggtgaaggcacatcttatatggcagcagacaagagagaccttgtgcggggaaactcccatttttaaaaccattagatcttgtgagactgattcactatcatgagaacagcactgcaaagacccgcaaaagtcattattagagatagaatggggttgtttgtgatgatagatgctcaaatcatttttccccatgattcaattacctcccaccgggtccctcccacaacatgtgggaattgtgggagctacaattcaagatgagatttgggtggggacacagccaaaccatatcactagtccgtctgaaaaggctacataacatataattccaaatatatgacattctggaaaaggcagagcaatggagacagtaaaaaaaaaagatttctgggtgtttggtgaggggtagatgaacaggcaaagcacagaggatttttagggcagtgaaaatactctgtctgatactataatggtggatacatattatcatatatttgtcaaaacccataaaatataccatactaagagggaaccctaaagtaaactacagtgataatgacatgtcaacataggttcatcgattttaacaaatgtacctcactagtgtgagacattaataattgggaagctgtgtgtgtgtgaacatcttactttcttctcaattttttgtaaagctaaaactgctctgaaaaataaaactattaattaaaaaaattaataggagtctgtgtacagagattctttttgtacaaggaaaaaaaccaactcaaattaagccaaaaacaaaagtaaatgca

SEQ ID NO: 40900 - DNA, 1358 bp, Homo sapiens
cataaagatacagatatagaaaggttgaaaataaaatgatggaaaaagatatactatgtgaacagtatgagaaggaagctggcataactatattaaaatcagacataatactttaaggcaaaaatcattattagagttagaatgaggttgtttgtgatgatagaggctcaaatcaagaggaatgttaaaaaggaagagggataactcaagggaaggtcagcgaagattgtggaggaaattgtgtgtttccaggaagctccaggctcctcacattttccccaccagccagcagatagatattccatagtttaatttctttagcttagtgctttattgtatagttaaaattaaaaaaaagaaagcaagaaaggaaggagccatcaagttatgaaaggacattgaagaaacttaaatacatattactaagtgaaataagttgtattagtccattttcatgctgctgaaaaagacatgtctgagagtgggtaatttataaagaaaaagaggtttaattgactcacagtttcacatggctggggaggcctcacaatcattgcagaaggtgaaggcacatcttatatggcagcagacaagagagaccttgtgcggggaaactcccatttttaaaaccattagatcttgtgagactgattcactatcatgagaacagcactgcaaagacccgcaaaagtcattattagagatagaatggggttgtttgtgatgatagatgctcaaatcatttttccccatgattcaattacctcccaccgggtccctcccacaacatgtgggaattgtgggagctacaattcaagatgagatttgggtggggacacagccaaaccatatcactagtccgtctgaaaaggctacataacatataattccaaatatatgacattctggaaaaggcagagcaatggagacagtaaaaaaaaaagatttctgggtgtttggtgaggggtagatgaacaggcaaagcacagaggatttttagggcagtgaaaatactctgtctgatactataatggtggatacatattatcatatatttgtcaaaacccataaaatataccatactaagagggaaccctaaagtaaactacagtgataatgacatgtcaacataggttcatygattttaacaaatgtacctcactagtgtgagacattaataattgggaagctgtgtgtgtgtgaacatcttactttcttctcaattttttgtaaagctaaaactgctctgaaaaataaaactattaattaaaaaaattaataggagtctgtgtacagagattctttttgtacaaggaaaaaaaccaactcaaattaagccaaaaacaaaagtaaatgca

SEQ ID NO: 40901 - DNA, 1358 bp, Homo sapiens
cataaagatacagatatagaaaggttgaaaataaaatgatggaaaaagatatactatgtgaacagtatgagaaggaagctggcataactatattaaaatcagacataatactttaaggcaaaaatcattattagagttagaatgaggttgtttgtgatgatagaggctcaaatcaagaggaatgttaaaaaggaagagggataactcaagggaaggtcagcgaagattgtggaggaaattgtgtgtttccaggaagctccaggctcctcacattttccccaccagccagcagatagatattccatagtttaatttctttagcttagtgctttattgtatagttaaaattaaaaaaaagaaagcaagaaaggaaggagccatcaagttatgaaaggacattgaagaaacttaaatacatattactaagtgaaataagttgtattagtccattttcatgctgctgaaaaagacatgtctgagagtgggtaatttataaagaaaaagaggtttaattgactcacagtttcacatggctggggaggcctcacaatcattgcagaaggtgaaggcacatcttatatggcagcagacaagagagaccttgtgcggggaaactcccatttttaaaaccattagatcttgtgagactgattcactatcatgagaacagcactgcaaagacccgcaaaagtcattattagagatagaatggggttgtttgtgatgatagatgctcaaatcatttttccccatgattcaattacctcccaccgggtccctcccacaacatgtgggaattgtgggagctacaattcaagatgagatttgggtggggacacagccaaaccatatcactagtccgtctgaaaaggctacataacatataattccaaatatatgacattctggaaaaggcagagcaatggagacagtaaaaaaaaaagatttctgggtgtttggtgaggggtagatgaacaggcaaagcacagaggatttttagggcagtgaaaatactctgtctgatactataatggtggatacatattatcatatatttgtcaaaacccataaaatataccatactaagagggaaccctaaagtaaactacagtgataatgacatgtcaacataggttcatcgattttaacaaatgtacctcactagtgtgagacattaataattgggaagctgtgtgtgtgtgaacatcttactttcttctcaattttttgtaaagctaaaactgctctgaaaaataaaactattaatkaaaaaaattaataggagtctgtgtacagagattctttttgtacaaggaaaaaaaccaactcaaattaagccaaaaacaaaagtaaatgca

SEQ ID NO: 40902 - DNA, 696 bp, Homo sapiens
cctggcactctctatccggaggccctgctatctaagatgtgttcttagtcacagtgctatgaacctcggacttcttgcaggagaacagggagaagaggcctcagaacattagtttgcagctgcagctccctctcctgcatgttttcatgaaggaaaatacckttagacattaaacacccaacgttcaaaatcttagacacgaagttgggagaaaagggaattagtactcatcagattttttgctgaaaaatgagagatagttttagggggcgggcccagtggctcacacatgtaattccagcactttgggaagccaaggcaggtggattgcttgagctcaggggttcagcatcagtatgggcaacatagcaaaacttggcttctacaaaaaattacaaaaaaaaattagctggacatggtggtgtgtgcttgtagtcccagctctctcaggagtctgaggtggaaggatcattgagcctaggaggtcaaggctgcagtgagatataatcaagctatgatcgtgccactgcactccagcctgggtaacagagtgagaccgtgtctcaaaaagagaaagagagagaaagggagagttttaggctaatttaaacagaaaacatttttgaaagatattttattgttacaagatggactgtgattgatgtaaaaataccaacagacacagtaaaaagatat

SEQ ID NO: 40903 - DNA, 1073 bp, Homo sapiens
agaggcccatggggagcaggctggagccctggaatcccactttgcacgccctgtggctttgcaggaaagtatatgggaaatgggggattcttgaagggggtcccactgctcctattcctggagagggggcagggagagctaaggagagatttgttcttcaggcatctgatgtagctggagaccgtgggtaccatggccaaagctgaggcagccagggtgggacaggggcctccaagcaacacagcagtgttagcagttcacctggacctgttgatgagctgtcttagatgcacgaaggcaagagatgtctcatctcgtctctaagatcttagatcttaagtgcagagggaaggcagctgggagtgtggacggcagccacaagggagaaaagtgcaagagcatttacaaccagaagagaagccgaggggacatgatggcccatggacaatgtagccatggacagtgccctgggaggctggtaaggggggtgctgggactggtggtgaagagatcatttttaagaaaaagaatggatttactttctccatcaaaccagccaacatctatttgctagtctttaaacattttaactacatgggtacttatttatttactttttgagataagttttccctctgttgcccaggctggagtgcagtggctccagaaccaggctggagtgcacggctcacagcagcttctacctcctgggctcaagtgatcctcctgcttcagcctcccgagtagctgggacgacaggcatgtgccaccaagcccaggtaatttttttgtagagacagagttttgctatgttgcccaagctggtcccaaactcgggttcaagcgatcctctkgccccagcctcccaaagtgctgggattacaggtgtgagccactgcatacttattaaaaaggcaccacaaattccaatagacaggcatcttacaaaatctctgatcaatattccccaaaactgtcaaggtcttctaaataaggaaagacttgagagactgtcacagcccagaggagcctaaggagacttggcaactaaatgaaacgtggggtcctggatg

SEQ ID NO: 40904 - DNA, 1236 bp, Homo sapiens
ctgctggaagctggaaatttaaaattggtttctcaaaagtgtaaagtgaatgctgtttcaytgcaatttggcagtataccagaaaaatataaaagtattattgtttttcatgctgatcaaaattcagacaaactaatagatctatacatatgtgaatttttattacaatgattttaatgatgtacttgcttctaaagcataatatactatttattatgccacaggttcaaacaatgttcaaagaaactttcattcaatcagatattttagacataaaaaaggcagcatgggtccctagctccagctcagtttttaaaacctttcaacagttctgtttacacttctactacagtagtttattctgcatttgctatccttaatcaaataagggtttaaatatgcataaggagtcacaccacatttgcaacattaaaaaacatacaatttcatgtgtttaattaccttatttattaaagtataattttctaacaggtaaaattatgactctaatgcaaatataaaattaatttgtatcaaagatgttattcaactcattaagtgattcgggttccagtaacatattaacatcattacaaggaacattaaaattgctttatagccaatgttgaggtaagattattagttagttccaacactggttagtatccaacatagccagaagccataatctttggtagttatctgtttcattggacagaaataaatttctcttctactggagagaatttttcatcttttctactatttctgcacaaaaaatgcctctcaatagtaagacaaacccagcattgcactaaaaaaaaatcttagtaatctcttacccatatttttcttttttactttataaaatatatctcttcattgggttttctatctgaagatttacacatatatacagtaaaatgaataaaagcatagcaagtgtatatattaataacatttttacatttatgtttaattaaaatacaacacattgcacatattcaaagtgtaaatgacatgattttgacatatgcatgtgcccattaaataatcatcataaacaagataataaacatgtccaaaagtcccaaaacttcctagtgaactttgtaatgcacactcatacctctcaggtgtgaagtacctaaatacacagacagacaaacatgcacacacacttggatatctaattgtttcagcagcatttgttcaaaatgttaaccttatgcccat

SEQ ID NO: 40905 - DNA, 1236 bp, Homo sapiens
ctgctggaagctggaaatttaaaattggtttctcaaaagtgtaaagtgaatgctgtttcactgcaatttggcagtataccagaaaaatataaaagtattattgtttttcatgctgatcaaaattcagacaaactaatagatctatacatatgtgaatttttattacaatgattttaatgatgtacttgcttctaaagcataatatactatttattatgccacaggttcaaacaatgttcaaagaaactttcattcaatcagatattttagacataaaaaaggcagcatgggtccctagctccagctcagtttttaaaacctttcaacagttctgtttacacttctactacagtagtttattctgcatttgctatccttaatcaaataagggtttaaatatgcataaggagtcacaccacatttgcaacattaaaaaacatacaatttcatgtgtttaattaccttatttattaaagtataattttctaacaggtaaaattatgactctaatgcaaatataaaattaatttgtatcaaagatgttattcaactcattaagtgattcgggttccagtaacatattaacatcattacaaggaacattaaaattgctttatagccaatgttgaggtaagattattagttagttccaacactggttagtatccaacatagccagaagccataatctttggtagttatctgtttcattggacagaaataaatttctcttctactggagagaatttttcatcttttctactatttctgcacaaaaaatgcctctcaatagtaagacaaacccagcattgcactaaaaaaaaatcttagtaatctcttacccatatttttcttttttactttataaaatatatctcttcattgggttttctatctgaagatttacacatatatacagtaaaatgaataaaagcatagcaagtgtatatattaataacatttttacatttatgtttaattaaaatacaacacattgcacatattcaaagtgtaaatgacatgattttgacatatgcatgtgcccattaaataatcatcataaacaagataayaaacatgtccaaaagtcccaaaacttcctagtgaactttgtaatgcacactcatacctctcaggtgtgaagtacctaaatacacagacagacaaacatgcacacacacttggatatctaattgtttcagcagcatttgttcaaaatgttaaccttatgcccat

SEQ ID NO: 40906 - DNA, 657 bp, Homo sapiens
gataggatcatttgccttaagctatatatcattaattaacaaagccacttgaagaggcagaaatcataatctgggtatgtaaaattttaatatttggttttcaatgagtrtttcaactttacataagatttagatttagaaaaaacttctggcttcccacttgcttttcaaagacacatttacctgcctttggtccccatctcttgagaaataaggaagatcctccaggtttagctttagtaagtgttgatagcacaagggggaaaaggcttgagggaaaggattttgtttctttaggtttataatgtagcaagttcatcatttctcaatctacatgtgagtttaaagtatttaaactagaatgtagccatttcaaccttgtaagttattcaaatgcacagctgcttgcacctgtcatttaatacatctgatgaatcactagatcaaatctctaaataggaatcatttcccatggaaacctccaggaaggtacccatatgactgagaagggcacaggaagcaaagaaatgcttttaaatgtagccatgcacaaatcatgtgtctcctatacattccgagttgaaaagtaatttccaatttaaaaaaaaatacacagaggtatgaattcatacatactcacacgtgtatgtacacata

SEQ ID NO: 40907 - DNA, 657 bp, Homo sapiens
gataggatcatttgccttaagctatatatcattaattaacaaagccacttgaagaggcagaaatcataatctgggtatgtaaaattttaatatttggttttcaatgagtgtttcaactttacataagatttagatttagaaaaaacttctggcttcccacttgcttttcaaagacacatttacctgcctttggtccccatctcttgagaaataaggaagatcctccakgtttagctttagtaagtgttgatagcacaagggggaaaaggcttgagggaaaggattttgtttctttaggtttataatgtagcaagttcatcatttctcaatctacatgtgagtttaaagtatttaaactagaatgtagccatttcaaccttgtaagttattcaaatgcacagctgcttgcacctgtcatttaatacatctgatgaatcactagatcaaatctctaaataggaatcatttcccatggaaacctccaggaaggtacccatatgactgagaagggcacaggaagcaaagaaatgcttttaaatgtagccatgcacaaatcatgtgtctcctatacattccgagttgaaaagtaatttccaatttaaaaaaaaatacacagaggtatgaattcatacatactcacacgtgtatgtacacata

SEQ ID NO: 40908 - DNA, 548 bp, Homo sapiens
gtttctgtatgaataatgacatgtacacaaaatgaaaaataacttagtcatttttaagaaaaagaatgatgataactgcatcccagtatgatgataaaacataatttcagatgttgtggctttcgaccagaggaggcaggatcctgagcaagggaactctctggtggccagaactgctgagcacacattctgaaaccaagacactaaagctcgatgagtactctgaaacaccaggaaaggctaaacaagtttccaaattgaaaactcagaattttctctatttgctttacctgaaatttaaattatgtatgacaggatttttttagtcttaccaactaaattggggagaagtagcaaataaatttttgagacaaatgaaagttgcttttctttcayaacattgaccataatgtttgttcatgaatgtctaaaaaagtggaaaagagggcttccaaggggctgttacaggaggcatatgcagaaggggctttgtctgtatgagggtctcaaggacaaacttgaccacagtcataaagagacagccacaa

SEQ ID NO: 40909 - DNA, 548 bp, Homo sapiens
gtttctgtatgaataatgacatgtacacaaaatgaaaaataacttagtcatttttaagaaaaagaatgatgataactgcatcccagtatgatgataaaacataatttcagatgttgtggctttcgaccagaggaggcaggatcctgagcaagggaactctctggtggccagaactgctgagcacacattctgaaaccaagacactaaagctcgatgagtactctgaaacaccaggaaaggctaaacaagtttccaaattgaaaactcagaattttctctatttgctttacctgaaatttaaattatgtatgacaggatttttttagtcttaccaactaaattggggagaagtagcaaataaatttttgagacaaatgaaagttgcttttctttcataacattgaccataatgtttgttcatgaatgtctaaaaaagtggaaaagagggcttccaaggggctgttacaggaggcatatgcagaaggggctttgtctgtatgagggtctcaaggacaaacttgaccacagtcataaagagacagcmacaa

SEQ ID NO: 40910 - DNA, 593 bp, Homo sapiens
tggctggaagccagagaagcaatttcctttcctttaataaggggttggaaagcatctgattatatcaggaagaggtatgtcagttttcaaggtgaaagaacacttgcttcttttatagataatgaaagaaataagatacattactgaaagacggagggcacagccattaaaaatagccaggaagggtgggacatagtctgttacaggttatctcaatgtaaattagcagagtagggtaacaataccagttttctcttttaccacttagttcagcttttaagatagttttatttttaacattttctatgctaaaacaactaatagtacaatatttgtcacttagaaggtcttaaattttatttccctatctcagacaaatattaaatgtttataataggatttacaatatgaakataacttatatttaacttattttaccccgtactttagaattttgtttaatagagaacatcaaggcttctagaactagcagacataagaataatagctagtgaaattacctttaattgttgtgaatctaagataaaagaacatacatgaaatatgtccaaactttataggatattcaaata

SEQ ID NO: 40911 - DNA, 551 bp, Homo sapiens
agatgatttacatagtgcattggtagagaatcttcaccacgctggtactgccctgtgatgcaaacccacctctgcatactattggcagcagaggtcctgaaggcaggacacagggcacgctgtgttaagagctttcctctgtctgtgcatttacagtgcttgcttctgtcttctgctgtgatctcaatgaaactttcacatgtccctttctttaactagagagcrtttgctttctatatttgagaagacggtctttgcttgaagttgaataacttaacttttgagtcctcaaataatatatttaggtaaacatttaacccaacattcccactttaactcgtagctactggttttgtaaatagtatttgaacatagtttgtaagcacaatattttgtgcatagcttgtatccacccagaaaatgtcaaatgcatgaaaaatgtagctattgacttctgtgtttattggtctgttaacattgctcttatgaggctgattgcaatgaatgtttttacaatatacatgtgggcaagaccactattcagtcttata

SEQ ID NO: 40912 - DNA, 1881 bp, Homo sapiens
ggaatcccagaagtgtctgcatgtagctaaaatgcacatgtattcccctctcagggattttttttcagaccatggttgaaaaatatctgctctttaaattattccattgctttacagaggaagtattaattacatgactgtaagcatagatcaggctgggatgtaattacagggcttactttgtctctgttgtccaacagaattaggcaggaagcattcatgatgccagcaatttaaggtgttttgcagcccattatgtttctggttctctcaagaacctaagcatggatcaaatgacatttctgttgcccagttgtctggaaaaagaacaaagcaagtatgaccaaaaatacatttttataagttttatgtttgtacattgctagaaaatgttacatacaaccttaaaaatgtagtcttttatagcatcaytctggttatctaatttttctctaatttgtggtagagtgagtccattattagctttacatttggttatcatattaaacaatgtagttgaggagataaatacgtggttgtattatatagttttatatcttttaaacaatatttgtgtatagaattgttcttaatgcctaatttcaaattagaaaattagaatcaccacaaaactttctaaaaccactgttttgtctcattcacttttatatattatttcctatgttgtgatttttcatcatcttataaaaatgaaatctatttaagtttttacttagcagttcccttactctcagcttttaagctctcttctaattagttaaagatgcttttttacttttctactattttcagtcacttggggctctacatcttctgaaaattctcctcatagttacagattcttctccccctcttctctcattccaaatatttttcttcacatgtttcttgtcactcttggacgatctgcacaacattcctacttgttcctcagaccacagcactatttggtctccctgcagtctatcccaatcacactttgagtgcgtgttcttctaggagcccatgtacgtagaatcactgttagacctagttgcctaaccctcaccttgttaacggtttttgcagtctttgtatctatttcctgtccaaagtttcatttttcatatttttattaccttctttgaaaacaggatgacaatttctatcataaatcagagttgagaaatgaacttccatggctgcatttaccttctttctccctctccgaactctcattccccctctctaccttaaaaaatcatattgataaaagtcatcactcccaagacacaaacttgaattttgactagcatcttcattgtttgctaggagagtaacactaaatctgattggttatctcacttcagaaggaaatgaacaaatcatatttaaggtattgcaatagttagagctagtaaaatttaggtactgagaaagaaaacaaaaatatgtaatgagaagaacttgtgatccagaaggctcccatagtgcagcacaaggaatattgatataaatgcaagaggcctgggtgtgagtcttggctctgccccttacttgtgtgatattgctggacacttttaagtctcagttgtctcacataaataggaaaatgttatccctctcaaagaggtgtcatgttaaaatcaaatgggattattgatttgaaagtatttatttttattatcttttattatcttctgtccttttagtatcttctgtcctctattcttatactagttagtcagtgctcattttcatttttggctctttgtttttaaacctgcgcttatcacagaacaggatgcagggatgaacttcaactgatgcaattctcctttgatgaaggtcacacagggtagctgtcaaaagtgtggaatc

SEQ ID NO: 40913 - DNA, 1881 bp, Homo sapiens
ggaatcccagaagtgtctgcatgtagctaaaatgcacatgtattcccctctcagggattttttttcagaccatggttgaaaaatatctgctctttaaattattccattgctttacagaggaagtattaattacatgactgtaagcatagatcaggctgggatgtaattacagggcttactttgtctctgttgtccaacagaattaggcaggaagcattcatgatgccagcaatttaaggtgttttgcagcccattatgtttctggttctctcaagaacctaagcatggatcaaatgacatttctgttgcccagttgtctggaaaaagaacaaagcaagtatgaccaaaaatacatttttataagttttatgtttgtacattgctagaaaatgttacatacaaccttaaaaatgtagtcttttatagcatcattctggttatctaatttttctctaatttgtggtagagtgagtccattattagctttacatttggttatcatattaaacaatgtagttgakgagataaatacgtggttgtattatatagttttatatcttttaaacaatatttgtgtatagaattgttcttaatgcctaatttcaaattagaaaattagaatcaccacaaaactttctaaaaccactgttttgtctcattcacttttatatattatttcctatgttgtgatttttcatcatcttataaaaatgaaatctatttaagtttttacttagcagttcccttactctcagcttttaagctctcttctaattagttaaagatgcttttttacttttctactattttcagtcacttggggctctacatcttctgaaaattctcctcatagttacagattcttctccccctcttctctcattccaaatatttttcttcacatgtttcttgtcactcttggacgatctgcacaacattcctacttgttcctcagaccacagcactatttggtctccctgcagtctatcccaatcacactttgagtgcgtgttcttctaggagcccatgtacgtagaatcactgttagacctagttgcctaaccctcaccttgttaacggtttttgcagtctttgtatctatttcctgtccaaagtttcatttttcatatttttattaccttctttgaaaacaggatgacaatttctatcataaatcagagttgagaaatgaacttccatggctgcatttaccttctttctccctctccgaactctcattccccctctctaccttaaaaaatcatattgataaaagtcatcactcccaagacacaaacttgaattttgactagcatcttcattgtttgctaggagagtaacactaaatctgattggttatctcacttcagaaggaaatgaacaaatcatatttaaggtattgcaatagttagagctagtaaaatttaggtactgagaaagaaaacaaaaatatgtaatgagaagaacttgtgatccagaaggctcccatagtgcagcacaaggaatattgatataaatgcaagaggcctgggtgtgagtcttggctctgccccttacttgtgtgatattgctggacacttttaagtctcagttgtctcacataaataggaaaatgttatccctctcaaagaggtgtcatgttaaaatcaaatgggattattgatttgaaagtatttatttttattatcttttattatcttctgtccttttagtatcttctgtcctctattcttatactagttagtcagtgctcattttcatttttggctctttgtttttaaacctgcgcttatcacagaacaggatgcagggatgaacttcaactgatgcaattctcctttgatgaaggtcacacagggtagctgtcaaaagtgtggaatc

SEQ ID NO: 40914 - DNA, 1299 bp, Homo sapiens
gcatctctttacagatacaatggcattgcacactcaatagcttaatagactatggtatggtataaacataacttttacatgcacagaaaaacaaagaatatgtgtgacttgctatattgtgacattcactttctcatgtggtctggaaccaaacccgtatcaatgacgtatgcctgtatatgttcaatagggttttctgtataatcctctagcccattttgcagcagtgtcttagttgccttagattttttccaagttttacgttgtttcaaattttaatattttctttaataggattwtgcagttatataaatagaacttttttttttagtattgctaggcttgatttcctttttcctccaaactcctcctccagaagctataaagagttccatacattcatggatcaccagtgaaagctattattcaattaccaagccagccaatttctgaaatagattcttagctgatgtagtccattaagaagcctatccagcggccaggtgcagtggctcacgtttgtaatcccagcactgtgggaggctgaggcgggtggatcgcctgaggtcaggagtttgagaccagcctggccaacatggtgaaactcagtctctactaaaaataccaaaaaaaaaaaaaaaaaattagccaggtgtggttgtgcgggcctgtgttcccagctactcaggaggctgaggcaggggaatcgcttgaacccaggaggccaaggttacagtgagccaagatgtcgccactgcactccagcctgggtgacagagcaagactccatctcaaaaaaaaaaaaaaaaaaaagaagcctaaccagatttccacagctaagttttctctaaaatattcacaaaattactcatctaggaagtaagagatgttagtcagaaacagacataatttgaaaagacaggatttattgtttagttacctcaaactgctccatagatatctgagtcttcagtgtaaaaaaaaacccaagcaaaaacaaaaaccagattgttaggtttttattagcctcttcttttccttcttatcttttgttttctggtgaaaccccctcctgtcccctgtgccagccaccgatcctcactaatgatgtcaggatgtcttattgcatgaggacatgtaggccaaacgaacaaagatggtattttttttccatcttttttaggcacttgtttcccttccctgtttcttgccaagactagaaaaagaaaattaatgttttttccccttggctaacactaaatgttaaagtgaaaacatttatttcttttgtcaaaatca

SEQ ID NO: 40915 - DNA, 1299 bp, Homo sapiens
gcatctctttacagatacaatggcattgcacactcaatagcttaatagactatggtatggtataaacataacttttacatgcacagaaaaacaaagaatatgtgtgacttgctatattgtgacattcactttctcatgtggtctggaaccaaacccgtatcaatgacgtatgcctgtatatgttcaatagggttttctgtataatcctctagcccattttgcagcagtgtcttagttgccttagattttttccaagttttacgttgtttcaaattttaatattttctttaataggattatgcagttatataaatagaacttttttttttagtattgctaggcttgatttcctttttcctccaaactcctcctccagaagctataaagagttccatacattcatggatcaccagtgaaagctattattcaattaccaagccagccaatttctgaaatagattcttagctgatgtagtccattaagaagcctatccagcggccaggtgcagtggctcacgtttgtaatcccagcactgtgggaggctgaggcgggtggatcgcctgaggtcaggagtttgagaccagcctggccaacatggtgaaactcagtctctactaaaaataccaaaaaaaaaaaaaaaaaattagccaggtgtggttgtgcgggcctgtgttcccagctactcaggaggctgaggcaggggaatcgcttgaacccaggaggccaaggttacagtgagccaagatgtcgccactgcactccagcctgggtgacagagcaagactccatctcaaaaaaaaaaaaaaaaaaaagaagcctaaccagatttccacagctaagttttctctaaaatattcacaaaattactcatctaggaagtaagasatgttagtcagaaacagacataatttgaaaagacaggatttattgtttagttacctcaaactgctccatagatatctgagtcttcagtgtaaaaaaaaacccaagcaaaaacaaaaaccagattgttaggtttttattagcctcttcttttccttcttatcttttgttttctggtgaaaccccctcctgtcccctgtgccagccaccgatcctcactaatgatgtcaggatgtcttattgcatgaggacatgtaggccaaacgaacaaagatggtattttttttccatcttttttaggcacttgtttcccttccctgtttcttgccaagactagaaaaagaaaattaatgttttttccccttggctaacactaaatgttaaagtgaaaacatttatttcttttgtcaaaatca

SEQ ID NO: 40916 - DNA, 947 bp, Homo sapiens
ctgcctcgatgctgggaatcactgcgttgccagtacacagaagagagctactagagacrttgctggcatgcagtcatgttgaataacaacattaatgaacaaatgaaagaaacttttagaataacgggatgttaaatatgtggtagtcataaaataaataaggtccacattttctttatttattgttgaattttggggaataattaaatactttcatattttctgaccttatttactgaaaccaaagcaatgtcagacgatgtaaacttctgaaaaagttgcatttctttttcctataaaaggaagaaaaaaaacaagaaataaacactgcactctggcaaagcatgtattgttatgtgtgttgagcttagctgtgttacttcaattccagtcacatgcttttttggtgatataatcctggacatctgaccttagaatgctttcaaattctgatttactcctacattgatacagaatgccctcacaatattttacagcttttatctttaaacaaagctaaaacttatctgtgacataatctccacatttatttctaaatggtctatgctatgtgtttaaagcaaccatcttgaaatttctagaatttattttggaataagaaaaattatttataagtctggtagaatgatatgtaaataatttgtggatgatataatggactttagcaacttggggagaagggttgggggttggggaggtaaagaataaaaaacgacacatttggtacaatgtacactgcttgggtgatgcgtgcaccaaagtctcagaaatcaccactaaataacttatccatgtagccaaaaactaactgtacccccaaaactattgaaataaaaataaataaaacgatgaaaaaagaattaatttccggaagctcagtgatttgggaaattaataggactatgtgatgttcaaatttcatgcat

SEQ ID NO: 40917 - DNA, 947 bp, Homo sapiens
ctgcctcgatgctgggaatcactgcgttgccagtacacagaagagagctactagagacattgctggcatgcagtcatgttgaataacaacattaatgaacaaatgaaagaaacttttagaataacgggatgttaaatatgtggtagtcataaaataaataaggtccacattttctttatttattgttgaattttggggaataattaaatactttcatattttctgaccttatttactgaaaccaaagcaatgtcagacgatgtaaacttctgaaaaagttgcatttctttttcctataaaaggaagaaaaaaaacaagaaataaacactgcactctggcaaagcatgtattgttatgtgtgttgagcttagctgtgttacttcaattccagtcacatgcttttttggtgatataatcctggacatctgaccttagaatgctttcaaattctgatttactcctacattgatacagaatgccctcacaatattttayagcttttatctttaaacaaagctaaaacttatctgtgacataatctccacatttatttctaaatggtctatgctatgtgtttaaagcaaccatcttgaaatttctagaatttattttggaataagaaaaattatttataagtctggtagaatgatatgtaaataatttgtggatgatataatggactttagcaacttggggagaagggttgggggttggggaggtaaagaataaaaaacgacacatttggtacaatgtacactgcttgggtgatgcgtgcaccaaagtctcagaaatcaccactaaataacttatccatgtagccaaaaactaactgtacccccaaaactattgaaataaaaataaataaaacgatgaaaaaagaattaatttccggaagctcagtgatttgggaaattaataggactatgtgatgttcaaatttcatgcat

SEQ ID NO: 40918 - DNA, 682 bp, Homo sapiens
acaaacatggacgttcttacctcctcccttctcaaacttgcaaataatgcaggtgagcccagtaaatagaagcagtcaccaaagtctttctcctttctcagaatgagaaatccgggctgtgcttctcaacacactggtgtttcccagattgccttttgcaactcctgaatattcttacatgggtaaataccaaaactttgtcatgagttcactgtcccagtgaaatacaacaccaacaccctctgtatttcttacctgttttgctctcacaggactccccactcaggagtgatgtgtactttaacaatcaggagaagtaatagaagagatcattaaacaaaaattgtcctgccaacccactctacaatatatctgaattcagatcattccttcatgggtcaaaagaccatttctaattccactagctttgccagatttaacaaactcacacacacatacaaatgtacatgatgcccagttaaattaaaatttcagtaaatgacaaataattttctaatataagtatgggagaaaaagatggcgaataaggaagtgggaacttgcatgtggctctcaggctgtcaatattaggatctgaaaaccgattcctttaacaaccattcayactgaaaaagcctctgtttgtgtgtgcatgcacatgtataggtaggtgctctcatgt

SEQ ID NO: 40919 - DNA, 1204 bp, Homo sapiens
accatttttctttttataattgattttcaagagctctttgtacagtagtaattctttgtccaatatgtgtgttactaaacttttcttctgttttccaaatgtctataataattaygattctttgttttggttgcccagaaatatttaatttgtatgtaaattcattttcactgatggcttctggctttggtgtcaagtttagaaagacttgttccattctatagtttttaaaagtgtttactcatacttttgcttcactttttacatttattaagaattttaatctaactggaatttatgaaatttaatttttcccctaatgtggctagtttgttgtcttcaattatttagtgagtaatcaatctgttccctgtgatttaaaatgccacatttgtcatacattaaatctcataatatgtgagattggtgtctgtttccgggattctctgtcccttggcaatttgtcttttcctgcaccaatgctattcatgtattgttattgttattactgctaaatacaaggtgttactatctaatagaaaaagtgtgtacccctctcttctagtcctttcgtaatttttgttaccatctttgcagatgaatttaaaaataatttttgttaaattttaaaataatcctgttgtaattttgactggcattacatacaagttatggtctgttttagagaaagaactaaagaactgacatctttacaacaccaagtctttctgtccacaaacaaggtatgtctttcatttatttgacaattcttgtgtatttcttggtaaaatgttgtaatttttatcgctgcacatttctttttagtttttgctctttgtatttttggtgtttattatgattgcatatgtggtagcttgattactgattatctctggtatgtgaagaatgattgcatattattgtgtatttattttgaagctagctaccttacttattctcttaacagttccagaagttttccagggcttcacagaaaaattataaatttttaaaaattatataaaattttattggctggaaataattttgcatccttcctttaaatatgtatacctcttacttcatttctttaatagcattggcttgaggttcagaaaaatattaaattattatgatgatctaagacatctttatttctgactttaatggaaatacttccattatttcttccctgagcatagtg

SEQ ID NO: 40920 - DNA, 1204 bp, Homo sapiens
accatttttctttttataattgattttcaagagctctttgtacagtagtaattctttgtccaatatgtgtgttactaaacttttcttctgttttccaaatgtctataataattacgattctttgttttggttgcccagaaatatttaatttgtatgtaaattcattttcactgatggcttctggctttggtgtcaagtttagaaagacttgttccattctatagtttttaaaagtgtttactcatacttttgcttcactttttacatttattaagaattttaatctaactggaatttatgaaatttaatttttcccctaatgtggctagtttgttgtcttcaattatttagtgagtaatcaatctgttccctgtgatttaaaatgccacatttgtcatacattaaatctcataatatgtgagattggtgtctgtttccgggattctctgtcccttggcaatttgtcttttcctgcaccaatgctattcatgtattgttattgttattactgctaaatacaaggtgttactatctaatagaaaaagtgtgtacccctctcttctagtcctttcgtaatttttgttaccatctttgcagatgaatttaaaaataatttttgttaaattttaaaataatcctgttgtaattttgactggcattacatacaagttatggtctgttttagagaaagaactaaagaactgacatctttacaacaccaagtctttctgtccacaaacaaggtatgtctttcatttatttgacaattcttgtgtatttcttggtaaaatgttgtaatttttatcgctgcacatttctttttagtttttgctctttgtatttttggtgtttattatgattgcatatgtggtagcttgattactgattatctctggtatgtgaagaatgattgcatattattgtgtatttattttgaagctagctaccttacttattctcttaacagttccagaagttttccagggcttcacagaaaaattataaatttttaaaaattatataaaattttattggctggaaataattttgcatccttcctttaaatatgtrtacctcttacttcatttctttaatagcattggcttgaggttcagaaaaatattaaattattatgatgatctaagacatctttatttctgactttaatggaaatacttccattatttcttccctgagcatagtg

SEQ ID NO: 40921 - DNA, 559 bp, Homo sapiens
tagaaggttttctggaaggccraggtgggcagatcacctgaggtcagaagttcaagaccggcctggtcttgaacaggacgaaaccccatctctactaaaaatacaaaaattagctgggtggggtggcatgcgcctgtaatcctggctacttgggaggctgaggcagaagaatcgcttgaacccaggaggcggaggttgcagtgagccaagatcgtgccactgactccagcctgggcaacagagtgagactgtctcaaaaaaaaaaaaaaaaaaaaaaaaaattataaattttctatttatagaatcttctattttctattgcagaaaatagaaacaatttcatttgtatgttttattcctttgttgaatcatatgaaaatagctggaaggattttcaacaaaattagaggatgtttgaatttaaatataggctatatgtcatacgtgaaatttactttgggagggtcttaagtggcacttcaaagagaaggcagtcaactctcagagcagctgaaatggaggtacaattaaaggacagcatggctggtgatcaagagaa

SEQ ID NO: 40922 - DNA, 1922 bp, Homo sapiens
tggtatttgtatgttttagatgttaagctgttgagatattaaatccatatataactataaatctcccattgataaatgaagtgcatgtgtctagcctttaaaaaattccttattaaaagattctcaggtcttataaatttttttgttaaaaagaatataaaattaaaataaccatgcctgctttttattaaatgataaaattattctccagttattgcctgttgtattttaattcttaaaaagagagagcaaaacaagaaagttcagtagtatgcaaaatagttctgcacttttacatttttagaagagaaatagctttggtttatctcttcttttttgatatcttcacattattaatgtgtatttatagcttgtggatgaagttcatggggagaatgttactgtaaaatgcygttcagtacacactcagtttttatcatttggcttttaaaagtgttgatctctttagtctgttggtgatggtttaatagaaaaacttacacttttgttttgagatgtatagcttataaaactgcttaattggtgacttcaatattgagagattaaggtaccaagagggacttgaaatttttacaaccatattttttagtactatttattattagtctttattagaataaaaattcatgggtgagagtgatgttgaggtgtaatagagtctggtaaacttgtttaatcttcattttggaatgcagtacttacatatttttaaaaaatgtttgccttttgtgattattagataattactgagttgtgttgtgaaattgaggaaaaatcaggatctttgatagatttgtagaattttagaaatatctttaagttcttgagccctgagttgctgttctatgattgttgctaaaatagtttatttggtttatctgtgccctgcacacacatatagtggcggtagttcattactgcatattaatatagcctggaagcatagtagctacatttatatttaattttttgaccttgtattgccatttgtggatatttttgtatcaaagtatttccatattatgtttttgaatttcacttctgaaatgataatcagagacaacgttaaatttgatcatttggaatcagtcttttacataaaatgtaagctatttaaaatagttaatttttaaagccactattgatgtccctttgtttaaagttctattcatggtcactataataacacgaggctctattgtggggttatgcataaactcacactaccttatgtgatcttatgttaatgctttccttttagtatcttcttgtagcttggtaatatttaaaatttgttgatactctctttggttgtgttcattatcttcatttagggagatgttggggaagattttgttactaaaagctgttacatattaaggttttgttttaaaaggactttgaaaaaaaaactcttaaggttttccttgctactatttaatgaaatttcactgcattgtgtcttttgatagccatttttaagagagcatttaatttactagataaggattcagtttgacctaatttgatagaatattgctgtgttttttgtaaagggctacagatttttttttaagtttaatttcttaaggaatcctttaaacacatcttcttcttatttgccttttccctctgatgtctattacccagaattactccaagctacatatttagctgcataaagcagtgacagcttgtcttctaaacaatgacaaattttaaaatcagatattaagaaaccttttcatagtttcaagggcagtgagctgtatgaacttgcttatcaggtattagtgcctccagggctataaaaaggtaacacatttaaatgactatcatacacaagatattgacataccttccttggtcaggccatttatgtgaagaggattatgcccact

SEQ ID NO: 40923 - DNA, 517 bp, Homo sapiens
gggattacaggcttgagccaccgcacccagctggactttaatttttatagacatatattcttattgttttatgtaagaactgaaaacaatatttttagaagaattttgatgagagatttgattgaatcgtatttttattttggraaaattgtcaagaaaatatgaaaatgagggttatttcttatgcagagaaatctgtgtaaagctatctgaacaaccattctgtatatatgggtatcttatcttttgcatttggataactagatttttttttctgataatttttcacgtatttttaaagatttctccatttctgcattctttcagcttactttgatatattctcttttaaatcataattctagcatttcatagttatttttaattgaacatatgaccagttttgtatttgtgagtgttggtttaagaccagcaaatcactacttttagcatgcccaatgattccaagccagcttcctcttgtactggcattagtttcaagtctcctcaatcttta

SEQ ID NO: 40924 - DNA, 1368 bp, Homo sapiens
agatagtgagacctgctgctcggtggaatgctgaaaactttaaaacgtcaaaagctttacaacttaaaagctgttgacatctatgatgccttttttttttttttttttttttttttttttttttgagacagagcctcacttctgtggctcaggctggagtgcagtggcgcgatcttggctcactgcaacctccgcctacggggttcaagcgttcaagcaattttcctgtctcagcctcccaagtagctgagactacaggtgcccgccatcaagcccggccaatttttatatttttagtggagacagagtttcactatattggtcaggctggtcttgaactcctgagctcaggtaatccccccaccttggcctccgaaagtgctgggattacaggtgtgagccaacgcacccagcctgaaaagtatatttaatagcaaggaataaaatgtataatatttaatattgtataaaatcatgacaggattaaaaactgttatctatgatcccagtttttaaagatgtacctaccatctttaaaaaaaaccactagaaataaacacacaaattgctctcaggagttttctctgaattgactgatttttctgcctgcatttctacatttgccaatttgtcttctttgtctaagtcttgcttttgtaatcagaaaaaataattttctcaatagctggcatcaaaagaaaaataccagaatcctgcttaccacctttgccatcattaggaaagatctttaaaaagtcaacatgttttcactttcttagtaaggatcaatagatcttgtgtctcacccagagctgttatcttactgtattgtttccacttctgcactttaagtgacaggccttattcatcctagtgtctttcacagcacttagcccagtaccttacccgttgaacggttaataaatacctgttggataaatatggattttaatgtaaataggtacactgaaaaatgtgttcagaaattttccaaaagacattctgtgttttcacttgtcatctgtaaagcactataaatgtatttgtttcaaaaatgagatagacttatggctggatagatggatgaatagatggtgaaatatgtaataaaaygaatgtggcagaatgttaattagagactccaggtggtggatgtagggaggtttgtgtgcaatcattgtacaattcttaaagcttttctgttcgaaaattttcattaaaatgttacagaaaatttaattattactatgattatcattattctgcttaaataatgaaacaatttggtaggttgatgtgactgtctactgacactactcccattaaattataagaatggataatgtaacataaaatatgttttatgca

SEQ ID NO: 40925 - DNA, 665 bp, Homo sapiens
ttcatttgtataggttcttcttaaccagtgatgtaagccctcaatttaaaaaaaaaaaaaaaaacaccaggtacggtggctcacacctgtaatcccagcacttggggaggccgaggcgggcggatcacgaggtcaggagatcgagaccatcctagcaaacatggtgaaatcctgtctctactaaaaatacaaaaaattagccaggcgtggtggtggtcagctgtagtcccagctactcgggagcctgaggcagaagaatggcgtgaacccgggaagcggagcttatagtgagccgagatggcaccactgcacttcagcctgggcaacagagtaagactccttctcagaaaaaaaaaaaaagaaaaaaaaaaaaagacatagctggagataggcttctctgacctagcaagaccttccttccatgagctgcagcacaaacagctagacacctattagggacttkggggacccagggcaagtgttatcaagacaggtttccttggcttctgttgcgtgggacctctgcatatcagctgcatggttgtgtctttttaaaaatatattgagaactgggtctaatctttctctccctctgtctctccactccctatccatttataggtactgaaatgtggcagtaaccagctaaattagcaacttaattt

SEQ ID NO: 40926 - DNA, 805 bp, Homo sapiens
caaagagtaggcttcagcctggactcatcgccaggtgcccagtacccggcagactgtattcagtagaggccctggaacagggcatggaaagctggctgctgcttggtacagagcatgggagcccttccctactggaggggacagggagttacatagccccatgagcccactcgtggcccaagcctgcctccacgatcccctacaaggatgcttacaaagggcygaagggtgagagattccagaacgggccagccagaacccgggaccaagagcctgctctctctcctacaacccaagcctagaggtgggcccctggggatctgccaggtggggcaggaataatgaggcaggactgaggggccagccactcccacctcctaggtctagctggcttcccccgcacctcacaaccacaggcagagcgtgtccacacacacacacacacacacacacacacacatgctcgcgctcctcctcgggcctctctgggggccactcccagcctgacaggctgagccttccaattctctgttttttatgcctcagtggtcagggtgtcaggttctggcatgcagagggagagcccgatgacagtgggctgcagccgcccggctccggcatatccatcagcaccacggagcctcctcctcctcaggtgggggagtagagacacagcgcagcctggagaacagggacagcgccctcccctcgggactctgagcacccgtggacctgccctatcagaggcacttcttgacaatgccgagcccagggcattgggctactgtggcagaggccacctctg

SEQ ID NO: 40927 - DNA, 805 bp, Homo sapiens
caaagagtaggcttcagcctggactcatcgccaggtgcccagtacccggcagactgtattcagtagaggccctggaacagggcatggaaagctggctgctgcttggtacagagcatgggagcccttccctactggaggggacagggagttacatagccccatgagcccactcgtggcccaagcctgcctccacgatcccctacaaggatgcttacaaagggccgaagggtgagagattccagaacgggccagccagaacccgggaccaagagcctgctctctctcctacaacccaagcctagaggtgggcccctggggatctgccaggtggggcaggaataatgaggcaggactgaggggccagccactcccacctcctaggtctagctggcttcccccgcacctcacaaccacaggcagagcgtgtccacacacacacacacacacacacacacacacatgctcgygctcctcctcgggcctctctgggggccactcccagcctgacaggctgagccttccaattctctgttttttatgcctcagtggtcagggtgtcaggttctggcatgcagagggagagcccgatgacagtgggctgcagccgcccggctccggcatatccatcagcaccacggagcctcctcctcctcaggtgggggagtagagacacagcgcagcctggagaacagggacagcgccctcccctcgggactctgagcacccgtggacctgccctatcagaggcacttcttgacaatgccgagcccagggcattgggctactgtggcagaggccacctctg

SEQ ID NO: 40928 - DNA, 1553 bp, Homo sapiens
tgcagggatgactatcctcaatttacatccgaggcaactgaggcccagacctgcctaggctcctccaggttatagacttgggcagtgcagggaccatttctcatgtttgtttctggccaatatcgtttgtgctcttcctgtgtttgtagagattctgcagtaggaggcctgcttctttgagccagaagtcagaactcatccttccagcttcccttgctgctagggcacaggtgtgtytcatgggctctgccaattagactttcttgtatatgaccttgattgagaaggtagccccttgaagcagtgggctgggggactccatctgttgggagtgggtggcaaaggcatccagctttggctgggggcaggacagagcttctggtgcccagttccaagcaccccgggaaaagttacagtggagtggagctgcaggctgggtgctggctggcagcagggctgttgatgctagtgcaactctagttgtgtggtgggtgttgtcctggctgtgtcccatgcctacctctttttgtcctcctggagattctaggagtcccaaatatcccttaataaattcattttctgcttaagccagtcagagtggattctgttgtttgaaactgaaagtctgacagatacagatagtaacctgctttcaaagctggaccagagccagtctcatcactcacacacaggtctgagtattcaggactcaggactcccaaggcctgtttctacagaggggtgaggcctcttttcctggcttgctgttgttcaaactgcgactcagtcagggagagtagagtaccacatcacatactggttccagaaataggctctggtgtcagggtgacctgaatttaaatcctccttctgccacctgaatgctgtgtgacctcaggtgaattagttcacctttctgagcctcattgtcctcttccgtataatagagataataatatgtgctctgtagggttgctgagaggacgacatcagatagcccatgtaaaaagggttttgggtgcctggtacaattagcaagcgctcatgtagatgaatggagctttgcttccttttcctcctctccatgctgtctctggccccctaaaggtactgagcacttcccagccagacacccctgcctgaggctcccacccacagcctgtgagctccctgggacagagtgtgcatcttttccacaacaggcacacagcccaagcctaacaattggggctgtgaactagatttcactccagcttgagtagcaaaagccttggatgtagtctagtcctgccctcccctccctatctcctcagacctacacagtcaggtccaaactccccagcctggccttcaaggggccactctgcacactccacagatagccccacctcctacaccaagcctttgccacacgtgcctgagaagtttcttctaatttctctgcttcttgaattcccaggcaaataaatgacagccactatcaacctctaggaaccttgtaaaaatgagaaaaatgtgtcccttttgagaaagtgcagccccgtgccagggct

SEQ ID NO: 40929 - DNA, 1553 bp, Homo sapiens
tgcagggatgactatcctcaatttacatccgaggcaactgaggcccagacctgcctaggctcctccaggttatagacttgggcagtgcagggaccatttctcatgtttgtttctggccaatatcgtttgtgctcttcctgtgtttgtagagattctgcagtaggaggcctgcttctttgagccagaagtcagaactcatccttccagcttcccttgctgctagggcacaggtgtgtttmatgggctctgccaattagactttcttgtatatgaccttgattgagaaggtagccccttgaagcagtgggctgggggactccatctgttgggagtgggtggcaaaggcatccagctttggctgggggcaggacagagcttctggtgcccagttccaagcaccccgggaaaagttacagtggagtggagctgcaggctgggtgctggctggcagcagggctgttgatgctagtgcaactctagttgtgtggtgggtgttgtcctggctgtgtcccatgcctacctctttttgtcctcctggagattctaggagtcccaaatatcccttaataaattcattttctgcttaagccagtcagagtggattctgttgtttgaaactgaaagtctgacagatacagatagtaacctgctttcaaagctggaccagagccagtctcatcactcacacacaggtctgagtattcaggactcaggactcccaaggcctgtttctacagaggggtgaggcctcttttcctggcttgctgttgttcaaactgcgactcagtcagggagagtagagtaccacatcacatactggttccagaaataggctctggtgtcagggtgacctgaatttaaatcctccttctgccacctgaatgctgtgtgacctcaggtgaattagttcacctttctgagcctcattgtcctcttccgtataatagagataataatatgtgctctgtagggttgctgagaggacgacatcagatagcccatgtaaaaagggttttgggtgcctggtacaattagcaagcgctcatgtagatgaatggagctttgcttccttttcctcctctccatgctgtctctggccccctaaaggtactgagcacttcccagccagacacccctgcctgaggctcccacccacagcctgtgagctccctgggacagagtgtgcatcttttccacaacaggcacacagcccaagcctaacaattggggctgtgaactagatttcactccagcttgagtagcaaaagccttggatgtagtctagtcctgccctcccctccctatctcctcagacctacacagtcaggtccaaactccccagcctggccttcaaggggccactctgcacactccacagatagccccacctcctacaccaagcctttgccacacgtgcctgagaagtttcttctaatttctctgcttcttgaattcccaggcaaataaatgacagccactatcaacctctaggaaccttgtaaaaatgagaaaaatgtgtcccttttgagaaagtgcagccccgtgccagggct

SEQ ID NO: 40930 - DNA, 456 bp, Homo sapiens
  misc_feature (1)...(456): n = A,T,C or G
ccaccaaatcaggtttgggaaggggtcaaggctgagattacatggcctttttcacagacctatggtttggcaacttgagtttgaagacaccaggttatggcttttctgatgaagcctgtttctcagtcccaaaataattaaggatccaaggaattaaaaggttcttccttaaggaggccttgttaagctgggcagataaacctgggtggtctcagagggcccttccatgtctgaccttttactgctcgaagtagaaaattmttagctgactgctgggggagggctccatgttgctatctgcaggctgattggctggctccacctcccagatggtgagtgactntttgagcccatnnnnnnnnnnnnnnnnnnnnnnnnnnnnnnnnnnnnnnnnnnnnnnnnnnnnnnnnnnnnnnnnnnnnnnnnnnnnnnnnnnnnnnnnnnnnnnnnnnnntt

SEQ ID NO: 40931 - DNA, 1301 bp, Homo sapiens
  misc_feature (1)...(1301): n = A,T,C or G
tattatgtacttcaatactattagtcattaattcggcagacttgcaatggacagcatcatgaagacactggagattaggtttttttcctactgaaacacaattctgggcttcaaggaaaaagtatacttcaagacatttcctccatttttacttgtgtagtacaaatctgcatggcatagtatatttctgaaaaagcaatagacatattaagaaaatagacactatttctaaatttcgttaggaataagaaggcaccactgatttgaggttgtgtcctgtcatcactgatagttgattttgagtcgttgatttcagcatttgttcttactaaacttttttccaggtggtatcacttgagaccattattgtggcttacggaccacaaacaagacacattcatagtagtatttcatcatagagagatcattcacagtatatgttgacaatacagattctttttccacctgcaatgcaaacaataatcataatactatgacagtcatcatgaccacaccactaacaaattctgagcacatatgtatcagtggcaggcactattttaagcatattcatttattacatacaactacccccataagagagtactattaatattagtagtctcactttacaaagaacagtcacactagtaagtggtggaactgagattcaaactcaggcagtcttgagctctgaactactataatatgtggcttctcgtcattcttaaaanacaaacctattgtgttctaaaatgggaatggcttnnctaaataaatgnagactgaaacacaatagccaaaatatcacaaaactttatagtaatgcacatgattaaaaaaagatgaagcagtacacaaggacatattgtgaatatccctcttacacctgccctccgacccccttttgttttccccagagcctactctactttctatcagtgagagtctgtaagatcagtattataatgatcggctaccatttattgaaaggctatktcaccagaaagtagttttccctttatgtacacattatcccaaatccttataattctgaaaactaaggaacacaggtcaagcatccctaatctgaaaatctgaaacgcttcaaaatccaaaatgttttgagcgcctacataatgccacaagtgacaaattccacatctgacttcatgtggcaggtggtcaaaattttaaaatattgtatcaaattaccttcgggctatgcttataaggcatatataaaacataaatgaatttcacatttagacttcagtcccctcccaagatatgtcacgtat

SEQ ID NO: 40932 - DNA, 1301 bp, Homo sapiens
  misc_feature (1)...(1301): n = A,T,C or G
tattatgtacttcaatactattagtcattaattcggcagacttgcaatggacagcatcatgaagacactggagattaggtttttttcctactgaaacacaattctgggcttcaaggaaaaagtatacttcaagacatttcctccatttttacttgtgtagtacaaatctgcatggcatagtatatttctgaaaaagcaatagacatattaagaaaatagacactatttctaaatttcgttaggaataagaaggcaccactgatttgaggttgtgtcctgtcatcactgatagttgattttgagtcgttgatttcagcatttgttcttactaaacttttttccaggtggtatcacttgagaccattattgtggcttacggaccacaaacaagacacattcatagtagtatttcatcatagagagatcattcacagtatatgttgacaatacagattctttttccacctgcaatgcaaacaataatcataatactatgacagtcatcatgaccacaccactaacaaattctgagcacatatgtatcagtggcaggcactattttaagcatattcatttattacatacaactacccccataagagagtactattaatattagtagtctcactttacaaagaacagtcacactagtaagtggtggaactgagattcaaactcaggcagtcttgagctctgaactactataatatgtggcttctcgtcattcttaaaanacaaacctattgtgttctaaaatgggaatggcttnnctaaataaatgnagactgaaacacaatagccaaaatatcacaaaactttatagtaatgcacatgattaaaaaaagatgaagcagtacacaaggacatattgtgaatatccctcttacacctgccctccgacccccttttgttttccccagagcctactctactttctatcagtgagagtctgtaagatcagtattataatgatcggctaccatttattgaaaggctatgtcaccagaaagtagttttccctttatgtacacattatcccaaatccttataattctgaaarctaaggaacacaggtcaagcatccctaatctgaaaatctgaaacgcttcaaaatccaaaatgttttgagcgcctacataatgccacaagtgacaaattccacatctgacttcatgtggcaggtggtcaaaattttaaaatattgtatcaaattaccttcgggctatgcttataaggcatatataaaacataaatgaatttcacatttagacttcagtcccctcccaagatatgtcacgtat

SEQ ID NO: 40933 - DNA, 1139 bp, Homo sapiens
cttctttcactcaacattttgyttatgaaattcatcctactgttgcatgcagttgtcaactattcattttcattgttgtatattactttgtttgaacattttatttagccaatctactgtagatgggaatttgaataatttctagtttgggcccattatgaacaaaactcctataattattcttatataaaacttttggtagagataagtactcagttcctttgagtatacacttagaagtggaacttcatatgtgtagcatatgatatactattctgcataataccacaaattttttcaagtactttaccattttaccatcccatagcagtatatgcaagttccagttgttccatgctatattttgattcttgagggtgctttaattttgtcctcttcatagcataagggtacatttgtgaaaatgcttgctctcctcccttcataaaagttccatgtgcatgggtttttctttataccttcaataggaaatatgatcaaacatccttaaaatcaaagaattattggctgaaggagcccagtgccttgttactttctcgtaataagctcagctgttgcatctcagatcctaacttgggtaccattttttcctttttctgttctgtattcctctcaatcaattgttgatgtttggttgcctcctactacattcttcatgctctgagttctaaggaagagtgctgtgagtgcatggaatggtgggatgttttggtggtaagcatagtcatggagactggcatgccacgaggacatttaaatgactaaccaggagagctgatcttctgtgttagagtccacactgtggccctggagcaggaaatgggctatttggagacagcaaatagtcatcttaatttttttttctatttctggtgtcaggtatttttgttggctctttctgacagggaaagagaaatagacttcttgctttgcaaagacctttataggaaaacaggacatgttgaaggactaatccttctctctgccatttctttctattttaccaagtcaaaccagagatgagtgtttgaggcagatgagacattttcattcattatcagtgataaagagtctatcatgaatcctgaggctcatagaatgttatagcttgcacactg

SEQ ID NO: 40934 - DNA, 921 bp, Homo sapiens
  misc_feature (1)...(921): n = A,T,C or G
cttaaagtttaaagaagagttatgtcaatcaacagagtcaatggaaacttttcagaaacttctttgctcttgcttttgtaaatcttaattggcacttagtccactgctttgcacaaaagttctcagcagtcgtgaatgccaaatatgtttcctggccatgcgcccatgccasttgagtggtagatatacccacaattctgaacatcttcagaaggcaaatcaaagaatggatactacatttcccactacatatactaacactgcaactggcctctgaaaatcaggtgactgattttttttcaatttttcaattttttttcttaagacagggtctcactatcacccacgctggagtgcagtggcacaatcatggctcactgtagcctcaacctccccacaggtgaccctcccacctcagcctcctaagtagcagggaacacaggcacgcgacgacacacctggttaacttttctatttttgtagagacagggttttgccacattgcccaggctttttttttttttcccaaatttttaagcctatagaaggacttccagggacatgaaaggaaagggaaatgataaagaacttcaaatagcatagtctgccctatctacctttgaaataagcaactcttcactctcctattacttttcctaaataacctacagctcttaattaacagacctaaaataccactccaccatcccagtgtaaccttatcagtcaacagagggctatggagaattgcctaatgtgtaaagaatgccacggggagttatgggccacatccctcgtgttttacaaattatcctctacataatccaacngngtgcctatttcatttagtttatattcttctagtttttttcctatgtacataagtactcatttttaaaatacaggtgtcatttttaaaaa

SEQ ID NO: 40935 - DNA, 921 bp, Homo sapiens
  misc_feature (1)...(921): n = A,T,C or G
cttaaagtttaaagaagagttatgtcaatcaacagagtcaatggaaacttttcagaaacttctttgctcttgcttttgtaaatcttaattggcacttagtccactgctttgcacaaaagttctcagcagtcgtgaatgccaaatatgtttcctggccatgcgcccatgccagttgagtggtagatatacccacaattctgaacatcttcagaaggcaaatcaaagaatggatactacatttcccactacatatactaacactgsaactggcctctgaaaatcaggtgactgattttttttcaatttttcaattttttttcttaagacagggtctcactatcacccacgctggagtgcagtggcacaatcatggctcactgtagcctcaacctccccacaggtgaccctcccacctcagcctcctaagtagcagggaacacaggcacgcgacgacacacctggttaacttttctatttttgtagagacagggttttgccacattgcccaggctttttttttttttcccaaatttttaagcctatagaaggacttccagggacatgaaaggaaagggaaatgataaagaacttcaaatagcatagtctgccctatctacctttgaaataagcaactcttcactctcctattacttttcctaaataacctacagctcttaattaacagacctaaaataccactccaccatcccagtgtaaccttatcagtcaacagagggctatggagaattgcctaatgtgtaaagaatgccacggggagttatgggccacatccctcgtgttttacaaattatcctctacataatccaacngngtgcctatttcatttagtttatattcttctagtttttttcctatgtacataagtactcatttttaaaatacaggtgtcatttttaaaaa

SEQ ID NO: 40936 - DNA, 666 bp, Homo sapiens
atccatctggcgctgtgtgcttgctggcacattctttatcgccactatgggaagctatagtagggtggccacagatggctctaataattacacccttttctccctctggatgagacagatttatgcacctggtcactgacagaggccttgctttgtagggacaagactcttgttacacagctgaagagtgcatcacagtgttatcttcttgccatgctgcagatctgaagaggggtcttagaagaggcagartcacccacactcaagaccatttctcaaattcatctacgagataagtccattctcctccttaggggaaaaggcaggagtatgaccctaatggaaatccctctgcattaaaacttgagcagtggggaaccagttttccttctcacaagggcaaaccaggaaaataaatgccttatactggaataataactttagaagttccctagggactagttatctcccaatttaaatatgtaaagcagagcctagaaatctaataaaggcatagcaatgtggaagaaagttgttgccctataagtggcatttaccaatctgaggtaagaacagttactgaaagagttgagagaaagcacagaatctagagaaagaggaaacaaaaactgtctgttgttgcagctccagcactcagtctcctgg

SEQ ID NO: 40937 - DNA, 977 bp, Homo sapiens
taattatttaatccattctctggcataaagaaatagcatgataaatatatattgagagaatctatattttactattgataaagccaagkttcagatagacaatgccacagatctagtaaatggtacagttgggacatgaatgaaggactgtcacgttctaaatgctgtgcactttccactataaaatatcttctttctcttttctttttatccactttgaagtgttattccattattttctttactaaaggtagttttcttggttgtcattactctcagatgggttctaatacttctctggttatccattatatttagagtagttcccatactgagaaaccatctaaattctttttagattgggtttcagtttataatttttttcacctttagtgacttttatcttctctcagtgttttcctacactagatactatcatcacctggcaactcttaaacaattaaaacttgaactgaagcattcttctccccagttatcaaccagtttattcatcttaattattatcaatatacattttcttcaactgcagatagtcctcctgttccttgaaccctccattttcgttctttgtacccctttccataatctcttcattcatcatgtctctgaaacttggtgtatcatttcaatcattttctgatcctatttttttccagttctcttttttcctattgctctttagccacactgcttgaagaaaacaacaacaacaacaacaacaacaacaaaagcctaacttttctacacatacacctggctactaagcaccattagagatacctgcagaattatgtagatttttgccaatactaatttatgacattcttcttcacccggaaccttgcaaccttttccaaattccgtcttcatttcttgctcccgtttcttatacaaactatttaaatattttgcacaagtctctataaattgccttaaactctccttaaattcccctc

SEQ ID NO: 40938 - DNA, 628 bp, Homo sapiens
atttttgtcacaaagttaatgatggttttatgtatttgtttgtgtatttggttggttggttttggtcaagcaaatactggcagctcaatgtaaagaacactagcatagttgagcatagcaagattggagggctgagtgctgtggctctcgcctgtaatcccagcactttgggaagcygaggcaggcagatcacaaggtcaggagtttgagaccagcctggccaatatgaagaaaccccatctctactaaaaatacaaaaattagccagaacgtggtggcactctcctgtagtcccagctactcgggaggctgaggcagaagaatcgcttaaacctgggaggcagaggttgtagtgagctgagattgtgccactgcactccagccagagcgacaaagcgagactctatctcaaaaaaaaaaaaaagattggaggaatactgaactccattcagccaagcttcttcttttgtactaaggtgattctccagtcaccttcagtacttcttttttattattttgaaatatttaattaacaaataaaaattgaatatattcgtgatgtacaatataaatatttgacataggtaaacattgtgtaatgattatcacaattagattaatgaacaca

SEQ ID NO: 40939 - DNA, 1224 bp, Homo sapiens
ccctaatacttagatcggggactgcatactcaagtattcagggtcaggtaatgtaaatgtaatgtaaggtaatgttatgtaatataattgacaggtaatgtaaatgagtgtatgacttgtttaaaacaatagggaatctcagagactatgtcaaatgcagagcatgtgacctgcctgtctgtggggcagccactatttagttccagtatattgttcctgtgcaaaaatgttaacctttgggtacaatgtacactatttgggtgacaggtacactaaaaacccagacagacttcaccattttacaattcatccatgtaaccaaaaaccacttggtacccctaaagctactgaaataaaaataatttctttaaaaaagtgaacccagattttgcccagattttccaatttttaagagaggacgtaaatcgatattttaatgtaaaatgtaccaatttttaagtatgtctgtggctaaaagtgtcttttttttttttgacacagagcctcactctgtygcttaggctggagtgcagtggtacaagcacggtgcactgcagcctcagcctcctgagctcaagcaatcctcctgcctcggcctcccaggtagttgggactacaggcatgcaccaccacatctggctaatttttaaattttttgtagagatgggggtgggtctcactatgttgccaggcctggtcctgaactcctgggctcaagggatcctctcgcctcagcctcccaaagtgcttggattacaggcatgagccaccacacccagccccaaaagtgtcttttttgtttttgattttttttttttttttttttttcactttttttccacacttggtaatcaggaagtaaaaggtgtctttttgactgtcgactttttgactgccatagccttagtctaaatgaatagacaacactgacaaaatggaaagggtcaaaggggaggcctattttggccagaaagagtgaaggggaagaaaagacagggaagaggcccaggatggacggtgagaagtgaatttcaccaaccttgaaacctcatatagggagccccaatctgcttgtcttctaatctaagagtaaaaaggaagagatgtcaagaaggaaataaaggaggaagaaaaagaatcacctgttgagcacttactggatggcagacactgcatgggatgctttcacatgttgttttattgagatatgtcaatgcaaaaaga

SEQ ID NO: 40940 - DNA, 549 bp, Homo sapiens
aggtgtgcaccaccacgccctgctaactttttaaattttttgtagagctggagtctctctctattgcccaggctgatcttgaactcctggggctcaagtgatcctcccgcctcagcctcccaaagtgttgagattacagacgtgagccattgcacccagctgcctttggttttcmgttttccatgctgtcactgtctttcagtaccacagtcgagttgataaaactttttattagttttgttttgttttgagacggacccttgctctgtcacccaggctggaatacagtggtgcaatcttggctcactgcagcctctgcctcccagactcaagtgatcctcccacttagcctcccaagtagctgagactacaggtgtgtgccactgcaccagctaattttttgtaaagacagggttttgtcatattgcccaggctggctttgaactcctgggcttaagagatttgcctgcttcagcctcccaaagtgctggaattacaggcgtgaaccactgtgcctggccaagagtttatgacacttttaagaaagag

SEQ ID NO: 40941 - DNA, 549 bp, Homo sapiens
aggtgtgcaccaccacgccctgctaactttttaaattttttgtagagctggagtctctctctattgcccaggctgatcttgaactcctggggctcaagtgatcctcccgcctcagcctcccaaagtgttgagattacagacgtgagccattgcacccagctgcctttggttttccgttttccatgctgtcactgtctttcagtaccacagtcgagttgataaaactttttattagttttgttttgttttgagacggacccttgctctgtcacccaggctggaatacagtggtgcartcttggctcactgcagcctctgcctcccagactcaagtgatcctcccacttagcctcccaagtagctgagactacaggtgtgtgccactgcaccagctaattttttgtaaagacagggttttgtcatattgcccaggctggctttgaactcctgggcttaagagatttgcctgcttcagcctcccaaagtgctggaattacaggcgtgaaccactgtgcctggccaagagtttatgacacttttaagaaagag

SEQ ID NO: 40942 - DNA, 549 bp, Homo sapiens
aggtgtgcaccaccacgccctgctaactttttaaattttttgtagagctggagtctctctctattgcccaggctgatcttgaactcctggggctcaagtgatcctcccgcctcagcctcccaaagtgttgagattacagacgtgagccattgcacccagctgcctttggttttccgttttccatgctgtcactgtctttcagtaccacagtcgagttgataaaactttttattagttttgttttgttttgagacggacccttgctctgtcacccaggctggaatacagtggtgcaatcttggctcactgcagcctctgcctcccagactcaagtgatcctcccacttagcctcccaagtagctgagactacaggtgtgtgccactgcaccagctaattttttgtaaagacagggttttgtcatattgcccaggctggctttgaactcctgggcttaagagatttgcctgcttcagcctcccaaagtgctggaattacaggcgtgaaccactgtgcctggccaagagtttatgacacttttaaraaagag

SEQ ID NO: 40943 - DNA, 572 bp, Homo sapiens
acgatgcttgctgacctcttcttgctaacgtcatgctatgtcttgtccgtgtaagccaatgctaatgtcttacctctctgcaaatgcctgtctcgttagtttagggggcaattggttgccctctgatctccgtattctgatggagtcagaatactttattttgttgttggagggttgaaagtgacattctttccagctctcaacattccaagcctttagctttattttagagttcctttgcttttaggtatttaatagtgtttgtctcccaagagaaagttaatcgcttcttgctctgatgttagtacttatataacttagtacttgtataactgtatttatcacattatgctgtaattatttgccaatatatctgtctccactcttagcacactgcttgagggaaatagaagagtataygcaaaatgcaagatctgtgacctctgtatacatagtgcttcctgattggttgtaggcacttattatgtgctcatagaatagaattacagtaagattttaatttataacacagtcctggtactttaagattctgaagaaatatttgttaaata

SEQ ID NO: 40944 - DNA, 1224 bp, Homo sapiens
gcatatcctgaacatgtacccatgaaattaaaataaarattgattataaaaccaaataaaagaatatatttaatttaaaaaatactttatgtataaatatacaatcttctaatattaatgttttaatactatttaatatgataaatcttttgataaattagtatttgtgattcaaataatttttttaatccagaaaattgacgaaaatattatcttaagtcacagaaaccgaattaaaagttgcttaaaaatatcaaacagatttctggagacatctgaagtggtactagtaaccaactccaaattagttatttatgtaaataacctgtttcttggtattggagtcttcttgtgcactgttcaataaatagtagaccccttcggatttcaacatggatgacctcccaggcacagttgctataattttggtggtgtaagtagttgtgaatcccttggaaataattttttagtctaaatatggtattccccctttgcaagagtgaacggccctctttcctggtttcctgctccaaacacacctctgtcttctctatttgctgataaagtctacttaggaatctctccaagctgctttcattccaaaaagattgggagacattaaggctgaaagtgttgaatatctgctgtaacatttcttatttggcaatgagggcattttcctttgaaaacaggttacttttagaaacctggaagaatctgaagttgctcctgtcctttagacattgcagaggaaatttttctcctaggttttttaaatgttctaaaatctcccagttgcccttgcacctttgaaagtgacagtccagagagaatgcagtagtggtgagaagtagcaccaaggcccaatccagcaagcattgactagtcatgttgagttccttcacactgctgttccttcctataagagagctcaggtatcagctctgactgcaggctccacatctccaaatttatatatctgagggagctttgttcttgcacggtgtttcaggatacctctactggtactttcatgtggtctttgccacttttcatttactattttccaaacataaacaaaagctttgtagcatcaccagacagcaatacatacatttacttttataatgtgatggatataaactatcttctatgaaagatcaaccatcagttacatgacaacaaagcagtggatatccttgccttaatttgcatttttatgca

SEQ ID NO: 40945 - DNA, 1224 bp, Homo sapiens
gcatatcctgaacatgtacccatgaaattaaaataaaaattgattataaaaccaaataaaagaatatatttaatttaaaaaatactttatgtataaatatacaatcttctaatattaatgttttaatactatttaatatgataaatcttttgataaattagtatttgtgattcaaataatttttttaatccagaaaattgacgaaaatattatcttaagtcacagaaaccgaattaaaagttgcttaaaaatatcaaacagatttctggagacatctgaagtggtactagtaaccaactccaaattagttatttatgtaaataacctgtttcttggtattggagtcttcttgtgcactgttcaataaatagtagaccccttcggatttcaacatggatgacctcccaggcacagttgctataattttggtggtgtaagtagttgtgaatcccttggaaataattttttagtctaartatggtattccccctttgcaagagtgaacggccctctttcctggtttcctgctccaaacacacctctgtcttctctatttgctgataaagtctacttaggaatctctccaagctgctttcattccaaaaagattgggagacattaaggctgaaagtgttgaatatctgctgtaacatttcttatttggcaatgagggcattttcctttgaaaacaggttacttttagaaacctggaagaatctgaagttgctcctgtcctttagacattgcagaggaaatttttctcctaggttttttaaatgttctaaaatctcccagttgcccttgcacctttgaaagtgacagtccagagagaatgcagtagtggtgagaagtagcaccaaggcccaatccagcaagcattgactagtcatgttgagttccttcacactgctgttccttcctataagagagctcaggtatcagctctgactgcaggctccacatctccaaatttatatatctgagggagctttgttcttgcacggtgtttcaggatacctctactggtactttcatgtggtctttgccacttttcatttactattttccaaacataaacaaaagctttgtagcatcaccagacagcaatacatacatttacttttataatgtgatggatataaactatcttctatgaaagatcaaccatcagttacatgacaacaaagcagtggatatccttgccttaatttgcatttttatgca

SEQ ID NO: 40946 - DNA, 1224 bp, Homo sapiens
gcatatcctgaacatgtacccatgaaattaaaataaaaattgattataaaaccaaataaaagaatatatttaatttaaaaaatactttatgtataaatatacaatcttctaatattaatgttttaatactatttaatatgataaatcttttgataaattagtatttgtgattcaaataatttttttaatccagaaaattgacgaaaatattatcttaagtcacagaaaccgaattaaaagttgcttaaaaatatcaaacagatttctggagacatctgaagtggtactagtaaccaactccaaattagttatttatgtaaataacctgtttcttggtattggagtcttcttgtgcactgttcaataaatagtagaccccttcggatttcaacatggatgacctcccaggcacagttgctataattttggtggtgtaagtagttgtgaatcccttggaaataattttttagtctaaatatggtattccccctttgcaagagtgaacggccctctttcctggtttcctgctccaaacacacctctgtcttctctatttgctgataaagtctacttaggaatctctccaagctgctttcattccaaaaagattgggagacattaaggctgaaagtgttgaatatctgctgtaacatttcttatttggcaatgagggcattttcctttgaaaacaggttacttttagaaacctggaagaatctgaagttgctcctgtcctttagacattgcagaggaaatttttctcctaggttttttaaatgttctaaaatctcccagttgcccttgcacctttgaaagtgacagtccagagagaatgcagtagtggtgagaagtagcaccaaggcccaatccrgcaagcattgactagtcatgttgagttccttcacactgctgttccttcctataagagagctcaggtatcagctctgactgcaggctccacatctccaaatttatatatctgagggagctttgttcttgcacggtgtttcaggatacctctactggtactttcatgtggtctttgccacttttcatttactattttccaaacataaacaaaagctttgtagcatcaccagacagcaatacatacatttacttttataatgtgatggatataaactatcttctatgaaagatcaaccatcagttacatgacaacaaagcagtggatatccttgccttaatttgcatttttatgca

SEQ ID NO: 40947 - DNA, 1224 bp, Homo sapiens
gcatatcctgaacatgtacccatgaaattaaaataaaaattgattataaaaccaaataaaagaatatatttaatttaaaaaatactttatgtataaatatacaatcttctaatattaatgttttaatactatttaatatgataaatcttttgataaattagtatttgtgattcaaataatttttttaatccagaaaattgacgaaaatattatcttaagtcacagaaaccgaattaaaagttgcttaaaaatatcaaacagatttctggagacatctgaagtggtactagtaaccaactccaaattagttatttatgtaaataacctgtttcttggtattggagtcttcttgtgcactgttcaataaatagtagaccccttcggatttcaacatggatgacctcccaggcacagttgctataattttggtggtgtaagtagttgtgaatcccttggaaataattttttagtctaaatatggtattccccctttgcaagagtgaacggccctctttcctggtttcctgctccaaacacacctctgtcttctctatttgctgataaagtctacttaggaatctctccaagctgctttcattccaaaaagattgggagacattaaggctgaaagtgttgaatatctgctgtaacatttcttatttggcaatgagggcattttcctttgaaaacaggttacttttagaaacctggaagaatctgaagttgctcctgtcctttagacattgcagaggaaatttttctcctaggttttttaaatgttctaaaatctcccagttgcccttgcacctttgaaagtgacagtccagagagaatgcagtagtggtgagaagtagcaccaaggcccaatccagcaagcattgactagtcatgttgagttccttcacactgctgttccttcctataagagagctcaggtatcagctctgactgcaggctccacatctccaaatttatatatctgagggagctttgttcttgcacggtgtttcaggatacctctactggtactttcatgtggtctttgccacttttcatttactattttccaaacataaacaaaagctttgtagcatcaccrgacagcaatacatacatttacttttataatgtgatggatataaactatcttctatgaaagatcaaccatcagttacatgacaacaaagcagtggatatccttgccttaatttgcatttttatgca

SEQ ID NO: 40948 - DNA, 2479 bp, Homo sapiens
tattgtttagaatgtatctctgtcacttaacaatatgttggctatggaatactttctgagtcaacacacagaaatctagcataatttttcttaattagtataatttttattagcataattttaaaaattaaccttcgaaggttagaaatgtatgtttttctcctaaatttggagtgtttacaaagtctgaaccaatagacacccttgtataacaccttttgaaaatgtgtctaattcatttatgcagccaaaagacacatgaaaaaatgctcatcatcactggccatcagagaaatgcaaatcaaaaccacaatgagataccatctctcaccagttagaatggcgatcattaaaaagtcaggaaacaacaggtgctggagaggatgtggagaaataggaacacttttacactgttggtgggactgtaaactagttcgaccattgtggaagtcagtgtggtgattgctcagggatctagaactagaaataccatttgacccagcaatcccattactggctatatacctaaaggattataaatcatgctgctataaagacacatgcacacgtatgtttattgmggcactattcacaatagcaaagacttggaaccaacccaaatgtccaacaatgatagactggattaagaaaatgtggcacatatacaccgtggaatattatgcagccatgaaaaaggatgagttcatgtcctttgtagggacatggatgaagatggaaaccatcattctcagcaaaccatcgcaaggacaaaaaaccaaacaccacatgttctcactcataggtgggaattgaacagtgagaacacatggacacaggaaggggagcatcacacactggggcctgttgtggggttgggggagggggtagggatagcattaggagatacacctaatgttaaatgatgagttaatgggtgcagcacaccaacatggcaatgtatacatatgtaactaacctgcacgttgtgcacatgtaccctaaaacttaaagtataattaaaaagaaaaaggaaaacaatgtcaaagaaaacaaaacaaaacaaaacaacaaaaaggaaaatttgtctaattatttccttaggacaaaatactagaaaatgaattgctgaatcaaagggaatatagttttaaggcttttggcagccttgttttctgctgccctccactatcataccaattgctaaatatttgaatatctagaataatataatatgaaaattatattattttgtattcaatgcatttttttatactaatgttgggtgcttgttatttctaaagcatggagtcaatgactattggttgcttttcaaagctaattgatgtttgacacagattcctacacttttctaaaaagcaatctctctaaaataaatttacaagggatattcttattctcatttatagatgggaaacctgagaagaaagaacattaaaggtactgactttattgactcagaagaaattagtttctttccaacctagaccaggcactgatcaaaagtactggctggctctcaccaaatggaagagtgccagatattctaacattggtcactttttgtgattcttcttcttctctcctttttaattttttttggagtttgcagatatttagttttacttttattaaaaatggttttataaataaatttttttattcacaaatactatgtgttcaatactgatgttaggtacacttgtaacaattccatcctgtttcacctgcctgaagtacaaaaacaagctcacattcttctctctacagttattactgcatcacatgcacaagtgtaagaaagatttatacaatgcaattaaatgaaaaaacattctttctcacttttccgtccctacttccaatctacggaagcaacttgtttttcgttttgtttcttttcttttgccatttattataaaccatgtaaatctacataatgtaccaaaatccttattgatttaccaatttagactatagcttttgacttcatgttctaactatagtttatttatatcactttccacctctcctcttttctcccgtattttgttggatattgctgcagctgtttttataactattacccattctgtatttctttgttttccttattaacagaggcaatgtgtccagctataaacacattctaaggctccatatgaaatatcagaaactctgagagatcttccacttcctaattcagataatacccctcctacttgatgaaatgtggaggcaatgcttgcaggtacaaccgtcatgttatagccgtgagttgacaaatataacagtgacatggtaaaaataatagagcagaaaaagagtgcccagctcccaggcacatcattagaaagctggcctgctctaactgcctccatctagatcttttgtaggtggagaagacaaacccctttagtttaagctactgctaataaggctgtttgttagctgtagctga

SEQ ID NO: 40949 - DNA, 2479 bp, Homo sapiens
tattgtttagaatgtatctctgtcacttaacaatatgttggctatggaatactttctgagtcaacacacagaaatctagcataatttttcttaattagtataatttttattagcataattttaaaaattaaccttcgaaggttagaaatgtatgtttttctcctaaatttggagtgtttacaaagtctgaaccaatagacacccttgtataacaccttttgaaaatgtgtctaattcatttatgcagccaaaagacacatgaaaaaatgctcatcatcactggccatcagagaaatgcaaatcaaaaccacaatgagataccatctctcaccagttagaatggcgatcattaaaaagtcaggaaacaacaggtgctggagaggatgtggagaaataggaacacttttacactgttggtgggactgtaaactagttcgaccattgtggaagtcagtgtggtgattgctcagggatctagaactagaaataccatttgacccagcaatcccattactggctatatacctaaaggattataaatcatgctgctataaagacacatgcacacgtatgtttattgaggcactattcacaatagcaaagacttggaaccaacccaaatgtccaacaatgatagactggattaagaaaatgtggcacatatacaccgtggaatattatgcagccatgaaaaaggatgagttcatgtcctttgtagggacatggatgaagatggaaaccatcattctcagcaaaccatcgcaaggacaaaaaaccaaacaccacatgttctcactcataggtgggaattgaacagtgagaacacatggacacaggaaggggagcatcacacactggggcctgttgtggggttgggggagggggtagggatagcattaggagatacacctaatgttaaatgatgagttaatgggtgcagcacaccaacatggcaatgtatacatatgtaactaacctgcacgttgtgcacatgtaccctaaaacttaaagtataattaaaaagaaaaaggaaaacaatgtcaaagaaaacaaaacaaaacaaaacaacaaaaaggaaaatttgtctaattatttccttaggacaaaatactagaaaatgaattgctgaatcaaagggaatatagttttaaggcttttggcagccttgttttctgctgccctccactatcataccaattgctaaatatttgaatatctagaataatataatatgaaaattatattattttgtattcaatgcatttttttatactaatgttgggtgcttgttatttctaaagcatggagtcaatgactattggttgcttttcaaagctaattgatgtttgacacagattcctacacttttctaaaaagcaatctctctaaaataaatttacaagggatattcttattctcatttatagatgggaaacctgagaagaaagaacattaaaggtactgactttattgactcagaagaaattagtttctttccaacctagaccaggcactgatcaaaagtactggctggctctcaccaaatggaagagtgccagatattctaacattggtcactttttgtgattcttcttcttctctcctttttaattttttttggagtttgcagatatttagttttacttttattaaaaatggttttataaataaatttttttattcacaaatactatgtgttcaatactgatgttaggtacacttgtaacaattccatcctgtttcacctgcctgaagtacaaaaacaagctcacattcttctctctacagttattactgcatcacatgcacaagtgtaagaaagatttatacaatgcaattaaatgaaaaaacattctttctcacttttccgtccctacttccaatctacggaagcaacttgtttttcgttttgtttcttttcttttgccatttattataaaccatgtaaatctacataatgtaccaaaatccttattgatttaccaatttagactatagcttttgacttcatgttctaactatagtttatttatatcactttccacctctcctcttttctcccgtattttgttggatattgctgcagctgtttttataactattacccattctgtatttctttgttttccttattaacagaggcaatgtgtccagctataaacacattctaaggctccatatgaaatatcagaaactctgagagatcttccacttcctaattcagataatacccctcctacttgatgaaatgtggaggcaatgcttgcaggtacaaccgtcatgttatagccrtgagttgacaaatataacagtgacatggtaaaaataatagagcagaaaaagagtgcccagctcccaggcacatcattagaaagctggcctgctctaactgcctccatctagatcttttgtaggtggagaagacaaacccctttagtttaagctactgctaataaggctgtttgttagctgtagctga

SEQ ID NO: 40950 - DNA, 1220 bp, Homo sapiens
attcatgcatttctagattagtaaatcattttctgctttgaaagttatttgttttacctctggactttcataaaaagaaaatgagccaagaaattaaaaagtgaaaggaaagagaaatttgctgtgtatttccattaagtaatgtaagccattttagtttttaagcattcctrtgagataacaaaatcagcttgtgtcagacttgagagggaaactgcacacagggctgtcttgctagtacatggataaaaatgtagtgctcaagagaaggaaatgcagccttgccaagggaaaaacgatgactcatgattcagacagttgcttacaaaaacctttggagaaaatattctccgtagagtctggcaaaggagcaaatgggaatttcctgctattctctttagaaaaaggaagagagagagagttcccttctgcatggggatggaaggagaccaactgcttgagtgaggacagcagtcctttctgcaaaagatccccacaggccactggacgttagtgcacccacttggagcaaaaccaggagttgtgctgtgcatgagctgccgggcagtagagcttcttgttccttctctaaattgcaatatttgtgctatgtagttgggtaaaaatagcattttgggtggtagtagatgattacaggtagttaagagtatagtccctggttccaaatatgtctctgttctttacctactgtggatttggtcaagttacttaaccttactgagcctcagttttcttatgtataaaaaggagagaacaatacttacctcatagatgttctctggatgattaaataagatggtctgtctatctatctatctatctatctatctatctatctatctatctatccatccatccatccatctctctaactatcatctatcgagctagctagctagctagctagttcatcctcagcagatcccttgcagaaagtaagtccttaagaaatgtagctgttattgttgtgtttgcattgtactatcattgcaaatatttccattatgaagacacaagttaaaaatagttgccttgatgatttctcatgaaattaaatatggaattactgcatgattcagcaattttatatctgggtatatagcccaagaagtaaaagctgggacatgaatagatatttgtatacccatattcatagcagcattattcacaatagccaaaaaaaggaagcacactaagta

SEQ ID NO: 40951 - DNA, 1220 bp, Homo sapiens
attcatgcatttctagattagtaaatcattttctgctttgaaagttatttgttttacctctggactttcataaaaagaaaatgagccaagaaattaaaaagtgaaaggaaagagaaatttgctgtgtatttccattaagtaatgtaagccattttagtttttaagcattcctgtgagataacaaaatcagcttgtgtcagacttgagagggaaactgcacacagggctgtcttgctagtacatggataaaaatgtagtgctcaagagaaggaaatgcagccttgccaagggaaaaacgatgactcatgattcagacagttgcttacaaaaacctttggagaaaatattctccgtagagtctggcaaaggagcaaatgggaatttcctgctattctctttagaaaaaggaagagagagagagttcccttctgcatggggatggaaggagaccaactgcttgagtgaggacagcagtcctttctgcaaaagatccccacaggccactggacgttagtgcacccacttggagcaaaaccaggagttgtgctgtgcatgagctgccgggcagtagagcttcttgttccttctctaaattgcaatatttgtgctatgtagttgggtaaaaatagcattttgggtggtagtagatgattacaggtagttaagagtatagtccctggttccaaatatgtctctgttctttacctactgtggatttggtcaagttacttaaccttactgagcctcagttttcttatgtataaaaaggagagaacaatacttacctcatagatgttctctggatgattaaataagatggtctgtctatctatctatctatctatctatctatctatctatctatctatccatccatccatccatctctctawctatcatctatcgagctagctagctagctagctagttcatcctcagcagatcccttgcagaaagtaagtccttaagaaatgtagctgttattgttgtgtttgcattgtactatcattgcaaatatttccattatgaagacacaagttaaaaatagttgccttgatgatttctcatgaaattaaatatggaattactgcatgattcagcaattttatatctgggtatatagcccaagaagtaaaagctgggacatgaatagatatttgtatacccatattcatagcagcattattcacaatagccaaaaaaaggaagcacactaagta

SEQ ID NO: 40952 - DNA, 672 bp, Homo sapiens
attcctccaagaaatcagatttctaagttatataataatttctattactaaacaagcctaattttgtaaagcacatatgtgcacattttctaggcacattcaaggtgctcagtgagttttcttccttaaaaaattatctattccctgtaggtgcattctctacactggcaataattaaataacactacttttgattttgaaaatgtttaccatgaaactagtagcagccacttagcctaaaaaagtaaaaaggcctttaaaaaataccaatagaaaacataactgagattttaaatraatttagtcatactccaagcaaaatcattccagatgatagaacacaacttttatttaacgttagttgttaattctattttccaacattaacattatgggatgctggtactacatgtattttggttgtttcaaagtacaccacattgtaaataagtaataaacaccaataaatcttgctcccagatactatgttgctgttgggacagatctgtatccccgtttattttgtaaggaactatactaaagggaattccatctaggtcttagctagttaagtgactactatgttattagtttatacaccattaccctaacttttattttatatttgatatttcaacattttaaatgtctttatcctaatggatactattt

SEQ ID NO: 40953 - DNA, 672 bp, Homo sapiens
attcctccaagaaatcagatttctaagttatataataatttctattactaaacaagcctaattttgtaaagcacatatgtgcacattttctaggcacattcaaggtgctcagtgagttttcttccttaaaaaattatctattccctgtaggtgcattctctacactggcaataattaaataacactacttttgattttgaaaatgtttaccatgaaactagtagcagccacttagcctaaaaaagtaaaaaggcctttaaaaaataccaatagaaaacataactgagattttaaatgaatttagtcatactccaagcaaaatcattccagatgatagaacacaacttttatttaacgttagttgttaattctattttccaacattarcattatgggatgctggtactacatgtattttggttgtttcaaagtacaccacattgtaaataagtaataaacaccaataaatcttgctcccagatactatgttgctgttgggacagatctgtatccccgtttattttgtaaggaactatactaaagggaattccatctaggtcttagctagttaagtgactactatgttattagtttatacaccattaccctaacttttattttatatttgatatttcaacattttaaatgtctttatcctaatggatactattt

SEQ ID NO: 40954 - DNA, 761 bp, Homo sapiens
tggccaggctggtcttgaactcctgacatcaagtgatccgcctgccttggcctcccaaagtgttatgattacaggcgtgagccactgtgcccggcctcaaagttctaaaatggaatcccgtgaagtatctttcaacaataaaggtaaatatcttttctggcaaacaccatttgtcactgatagacttgactaaagggaatacccaagggtatttatcaggcagtaggaagattgtgtcaggtggaagcttggagatgcagggagagatgaagagtggaaaaaaacccatgaaaatatttctaaatgagtattaatgacataaaacaataataatatcttgtatgatctatccaatgatatagggaaaaaaccgaagtatttcttctattccctcactyagtagtcaacacagaagacttctgtaaccaaatatgtgggagttttctctgcacactaaccaagcaatcagttttgcagtggacaccagctggtgtcctccaattcaattctgatgctatcttcctggagagaacatcagatcccacaggttaaggtttcagtcccatgagattgcccccacttctatgccaatcaaaagccccactggcttctgacccatcagctgtaagtagggtttctcacaactcccttcttgggttcaactaatttgccggggaagctcccaaaactctggtaaacactttacttacatttactgggttattataaaagatattacaaaaaatacagatgaagagatg

SEQ ID NO: 40955 - DNA, 761 bp, Homo sapiens
tggccaggctggtcttgaactcctgacatcaagtgatccgcctgccttggcctcccaaagtgttatgattacaggcgtgagccactgtgcccggcctcaaagttctaaaatggaatcccgtgaagtatctttcaacaataaaggtaaatatcttttctggcaaacaccatttgtcactgatagacttgactaaagggaatacccaagggtatttatcaggcagtaggaagattgtgtcaggtggaagcttggagatgcagggagagatgaagagtggaaaaaaacccatgaaaatatttctaaatgagtattaatgacataaaacaataataatatcttgtatgatctatccaatgatatagggaaaaaaccgaagtatttcttctattccctcactcagtagtcaacacagaagacttctgtaaccaaatatgtgggagttttctctgcacactaaccaagcaatcagttttgcagtggacaccagctggtgtcctccaattcaattctgatgctatcttcctggrgagaacatcagatcccacaggttaaggtttcagtcccatgagattgcccccacttctatgccaatcaaaagccccactggcttctgacccatcagctgtaagtagggtttctcacaactcccttcttgggttcaactaatttgccggggaagctcccaaaactctggtaaacactttacttacatttactgggttattataaaagatattacaaaaaatacagatgaagagatg

SEQ ID NO: 40956 - DNA, 1582 bp, Homo sapiens
tgctcctgtctctgctttcgttgtacaaaaccaatgcaacacctacagctaagatgatatttaaattaaatttagaagtgaacataagctcctggatgaagtaaataatatgatttcgttataagcacagggaatgtgggatgtttcaatgcagatttatggtgttttaaagaaactttgaggaaaaaccaaccacatacacatatgctgactccatggcttatgtttgctctaccccacctgtcctgctacaactgggactggcaaagtgcggcctgcaggccaaatcccgccrgggcctggttttgtccagcaaactaagaatggattttacatttttaagcacttgaaaaaaaattgaaagcatataatatttgtgacacatggaaatgatccgaaattcaaatttcagtgtccatgaataaagtttttacttttgaaaataaaatggtgaaaatttttatgaaaatacctatttctagtatcctcaattttgcctcttggtctgcaaatccctgaacatttactctctggctctttagagaagaaaatgccaagccttatgttagaatgtcttactcccattgccataacttctgagttactttccctggctttattctctggtcagttctgtcagacccctgaggccgggcagattttggcctttgtaggggaggttgctaattctcccccctaattaaaaaattaataataatgatcttggggtctttctgtagtatattgttgaaggttgtataaacataaagggttgatgatgagaattttctggaccaggctggagttgccttggctgtttcttggtccagccacgtaggaacagctggggagtgtttcatgccttcacagtttctcctattttatccagcctttcctctctgacatttttaacatgcagatgtgtattttctggatattattttgtgtccaggcacagacatgataaccggaatgttaaatttgtggcaggagaaaagctcccatctgcattagcttataaacactctgggggcaaatttccacgtacagagctactcaccagagtaacagtgtgcacagaaggtcttctgtcaacattgctagtcagtactttttatcccctttgctgtgtaaacttctctgcatcatgggttttaaattgaaaataacttttgttttcctcattatattgtctgttacatcaacatttgacaaaaggattgtctgctacatgccgtgattgtctcagtgggcttgcaaaactcagacgtgacctcatggttatgtgcagtttgttgatcaagtgaccatattctgctccaaagtgttgccaggcactttctgtgattcatcatatttcagccagaattggaattacagtatggctgtctctatcgtctttccatcatcacctcccacatgaggtgcctttggaaccccacagcaggccattccgttctcccgttggctttgtcaggagagagggggatgaacagcctgtgccttatcccctccccttgttcctcaccagacacggtgattttgtagtccttacccctttcctcctcatggcaagccccaa

SEQ ID NO: 40957 - DNA, 1582 bp, Homo sapiens
tgctcctgtctctgctttcgttgtacaaaaccaatgcaacacctacagctaagatgatatttaaattaaatttagaagtgaacataagctcctggatgaagtaaataatatgatttcgttataagcacagggaatgtgggatgtttcaatgcagatttatggtgttttaaagaaactttgaggaaaaaccaaccacatacacatatgctgactccatggcttatgtttgctctaccccacctgtcctgctacaactgggactggcaaagtgcggcctgcaggccaaatcccgccggggcctggttttgtccagcaaactaagaatggattttacatttttaagcacttgaaaaaaaattgaaagcatataatatttgtgacacatggaaatgatccgaaattcaaatttcagtgtccatgaataaagtttttacttttgaaaataaaatggtgaaaatttttatgaaaatacctatttctagtatcctcaattttgcctcttggtctgcaaatccctgaacatttactctctggctctttagagaagaaaatgccaagccttatgttagaatgtcttactcccattgccataacttctgagttactttccctggctttattctctggtcagttctgtcagacccctgaggccgggcagattttggcctttgtaggggaggttgctaattctcccccctaattaaaaaattaataataatgatcttggggtctttctgtagtatattgttgaaggttgtataaacataaagggttgatgatgagaattttctggaccaggctggagttgccttggctgtttcttggtccagccacgtaggaacagctggggagtgtttcatgccttcacagtttctcctattttatccagcctttcctctctgacatttttaacatgcagatgtgtattttctggatattattttgtgtccaggcacagacatgataaccggaatgttaaatttgtggcaggagaaaagctcccatctgcattagcttataaacactctgggggcaaatttccacgtacagagctactcaccagagtaacagtgtgcacagaaggtcttctgtcaacattgctagtcagtactttttatcccctttgctgtgtaaacttctctgcatcatgggttttaaattgaaaataacttttgttttcctcattatattgtctgttacatcaacatttgacaaaaggattgtctgctacatgccgtgattgtctcagtgggcttgcaaaactcagacgtgacctcatggttatgtgcagtttgttgatcaagtgaccatattctgctccaaagtgttgccaggcactttctgtgattcatcatatttcagccagaattggaattacagtatggctgtctctatcgtctttccatcatcacctcccacatgaggtgcctttggaaccccacagcaggccattccgttctcccgttggctttgtcaggagagagsgggatgaacagcctgtgccttatcccctccccttgttcctcaccagacacggtgattttgtagtccttacccctttcctcctcatggcaagccccaa

SEQ ID NO: 40958 - DNA, 677 bp, Homo sapiens
ggaaaagctgaccttatgtgcctcctgatataatgcactgggagggacacagcaccactttgtattcttgccccacagacataacctaaatctaatcatgaaaagaacattaaaaaccttaagttgaggcacatgctacaaaataactgctctatagtcttcaaaaaattaatgtcatgaaagataaggaaagacagaagaattccactagataatatgagattgaragacatgacaacaaagtacgacctgggatttcctagaatataagaagaaatggttggaaaaattggcaaaatctgaatcaagtctgcagatgctactatatcagattagatatagtagcattatgtcaatatgcattttctgattttgaaaatcacactgtggttttgtaagactgtcttcacttttacataactgcatcatgcctacagtttactttcaaatgattaaaaaaactcacatgtatacatgcattcacacatacatctacatgtgtgtctatatctagagagaatgatagatgtggtaaaatgtggaagatcattccttctgcccctagctcctgaggtagcatggcgaacaggatcaatttcatgatctgaaatgagttagctgtgttgagcttttgtagccagattcactcatcaaattgtcctcaatgaactctcctg

SEQ ID NO: 40959 - DNA, 677 bp, Homo sapiens
ggaaaagctgaccttatgtgcctcctgatataatgcactgggagggacacagcaccactttgtattcttgccccacagacataacctaaatctaatcatgaaaagaacattaaaaaccttaagttgaggcacatgctacaaaataactgctctatagtcttcaaaaaattaatgtcatgaaagataaggaaagacagaagaattccactagataatatgagattgagagacatgacaacaaagtacgacctgggatttcctagaatataagaagaaatggttggaaaaattggcaaaatctgaatcaagtctgcagatgctactatatcagattagatatagtagcattatgtcaatatgcattttctgattttgaaaatcacactgtggttttgtaagactgtcttcacttttacataactgcatcatgcctacagtttactttcaaatgattaaaaaaactcacatgtatacatgcattcacacatacatctacatgtgtgtctatatctagagagaatgatagatgtggtaaaatgtggaagatcattscttctgcccctagctcctgaggtagcatggcgaacaggatcaatttcatgatctgaaatgagttagctgtgttgagcttttgtagccagattcactcatcaaattgtcctcaatgaactctcctg

SEQ ID NO: 40960 - DNA, 1215 bp, Homo sapiens
actcctgcccccaccccactcagcagttccacaacctacatatgtccctgagaccatgatctggtcacagagtaaggaaagtgccttggtttgctagggctgccccaacaattccacagactgggtggcttcaacaacagacttttttttttgtagcacttctagaggtcagaagtccaagatcaaggtgtcacttggctatttctgaggcctctctccttggcttgtggatgactgtcttctgcctgtgtcttcacatgggcttctctctgtgcctgtctgtgtcctaatatcctcattacaacactgatcatatggatttagggcccactctaatgatctcatagtaacttaattgcctctttagtggtcctgtctccaaataccatcacattcggaggtactggaagttagaacttcaacagaagaattttaggagtccgaattcagccctttacaaagaggaactttcaggaaatgatccagcttggtgaagaaatggttctcttgaaataaaatttaagtaaataaaaaacacagatttctcttttgtacacacctcgggatgtggactgattcatgcctactggcccccacaggtgccttttccccaggcaggaaggtacagatcctgggaggggcatgattgkgtttttgttttttattttttaaaggaaatctccaggtgattttcagtccctcccacagaggcccactgctgtgccaagtgggcacagggcaaatcccaaagctcttgctcagttataagacaaatagtcagtaggtgccttctataggcgaagcgttgtgcaaggcacctggaggaaaactaaagtatgtggcctgcccttacctgttatatacagcaaggcgctcggtcaaagcaaagaaagcccaaaggcattcccaagcttggtgctccagacctccctgtgcactcacatgcctgcgctctttactctcatccaggttctttctccctccctagatctgctaagaagtgtatatggatgggtcaccttttccaaagaagggtgggaacgtcctcccatcaagggaaacaagtgtcctgtggtggcaaggaataaggagagtgaggaatatgactttgtggcaaatgctttaacttggacgtaagagctaagtctggcattgctgcaattgaatggatactattgtcccaactttgcagaagactctgcgtatcttactttg

SEQ ID NO: 40961 - DNA, 518 bp, Homo sapiens
cagagctgggaaatatatgaatgtcttttcatgcacacatatttacatatgccaatgtatatacacatatatttatatttatttctagatccatctatccatgtatattagaactcatgaattcacaccagtacctcctattctaatccaatactgcagaattttttccagcctttccccttctgcctttgtaactccctactctgtgaagagcctggctctcattatcctcaatgtgtttccttatttgctcagtcttcttacatgtgacaaawctccctcccacataagccatctcctcagtccagccccagctcaactccacaaaatacactgtggatctttggctgagttaaatacttagttttgaagtaagttttcaacttactgttttctctcttccaacaccacagttactatttaattagctcagtacttctcttttttctcccaatgtttaattgcaaattgaagttgaaaacaagcttttaaaataggtgttctatatctagccaatg

SEQ ID NO: 40962 - DNA, 518 bp, Homo sapiens
cagagctgggaaatatatgaatgtcttttcatgcacacatatttacatatgccaatgtatatacacatatatttatatttatttctagatccatctatccatgtatattagaactcatgaattcacaccagtacctcctattctaatccaatactgcagaattttttccagcctttccccttctgcctttgtaactccctactctgtgaagagcctggctctcattatcctcaatgtgtttccttatttgctcagtcttcttacatgtgacaaaactccctcccacataagccatctcctcagtccagccccagctcaactccacaaaatacactgtggatctttggctgagttaaatacttagttttgaartaagttttcaacttactgttttctctcttccaacaccacagttactatttaattagctcagtacttctcttttttctcccaatgtttaattgcaaattgaagttgaaaacaagcttttaaaataggtgttctatatctagccaatg

SEQ ID NO: 40963 - DNA, 523 bp, Homo sapiens
caggcagtaacatttaaagctactgctatggaagaaaaaatgctttaagtaatgaaggtgacagcagattgagctgagaggggaaccaagcagttgttagggggtggagtggtgaggaggatttaaagcagctctggatgtgaaaaacatctgattttagagtcagaaaccctaaaattagagaaatagtggaaaactgaaaataaacttcgcacatatgtaacatgtagctttcaaaaatgtacaacattctgaaccttcccaaataaattaaactctataccatattggagataagatcatttaaggggaaattttattcagaatttaaatctgagaaaccgcatgcctcaccctcacactagggtgaaaagtgaaaatggcctaaaactgcctggattttccagtgcaatakaacccaactgttactctcctgctaggatgtcacattttacaatatgctacaacagactggcttggaagaggaacaggcagaaacgcagccaagtatatacaacctcag

SEQ ID NO: 40964 - DNA, 1352 bp, Homo sapiens
gtgtagtaatttcccaataacatctatttaaaaatccattttttcccactggtttgcggtaacattctcggatatactgtgtttctgtgtgcacataagcatttttttgaaccctttattgcttcccaggattctattggcctattgtttctattgtaacacatattttaaatgttctttttgttatcaaaactgacttagctatctatgaactcttatttttctacagagtttaaaaataaggctatttctttgacaacagttctgctgaaatattatttgaggttgctttgaatttagattaatttggttaaaactggtattgttataatattaatcactctatccatgaaaaatgggatgccttttcccttttctcatgttcccaataatccttttcttttccttaacaaagcttataaagtttttctttgtaagatcatgtacagcttttgttgatgtctcctagatattttgttatttctgttgctgccgcagatctcttcctatttggaatttcatagtgctgtggtcagcctaagcaaataagamtatttgataggcttgaaaggcaagaacctcttcagagaatgaacttcattagtcactaacccaagatcccatcaagtgagacagaatttccagagcaaagggaagtgagaggttccccctgctgtgcaactttgcatcattctagaaaacaactttcatttaaatgcaaacttttcattgtctgcttaataaaaaatgttatgagataacacggaattcacattcccttgaaagcaagataggttggtctccatttttctgtttgtcttttctcacattcaaagaatttgagaagatgttacaccttgtcaagagttaataggactctggggtgatgttttgtggttgctgcctctctattctttggccagagccaagtcaaagtgggagctgctgccacggtgtctttccccaacctattgtatttccgtgggctttgaaaactcattcctccccaacccctttcctcatcccttgggcttccctcctgtacatctttatatcttttccaggacacatccccctgggccgtgaagtgcttggttcttcagctcccatccactgttctattccccccaggggtgtctcacctgcttccatcacctgccaccctcacctggaccctcatcctgatgtgctgacaatgcgcattcatagtcactctacttcctgacttcctctttccagtgtccatcttgccatcttcttatcactggcccccctaggctcagtcacctctgccacgctttgtttcccttactgctttcttgataccaagaagtggtgtctgtcttagatac

SEQ ID NO: 40965 - DNA, 729 bp, Homo sapiens
catttattgagaatctttcttattttagacttgatgacagaggctggggtactgcrgttgagtaaggccttcatggtaatgcaggcaggtgagcccccaaattggaacttagtccaagagggttcttggcttcacccaggaaagaattcaagcgtgagtggtggtgttagacagcaacttttattaaagcgaccatgcacagcagcagcagaggtactgctcccttgtaaagcagggctaagccataggcactgagcccagaatagcagctcagaggcagttctgtagtcatattcatacccagttttagttatatgcaaattaagggttggattatgcagaaatttctagataaagggtattaactttcaggtgttgccatggcaatggtaaactgacatggcacattggtgggcatgtctatggggaggtgctttcaccctgtcccctgttttagctagtcctcaattaggtctggtgcccaagctacacctccagagttgaattccacctcctgagtcaggcgccacctcctacctcaatgggacatagagtctgttcgggtagactgtcttatagctagacaactacaacatggtgtggtaggtgctgcttttgaagttttatggaaatacaggagaggataaacttcattccgccacagctaaggtgaggactaggcaatggaagtctttacaaaggaggtaatatttgtgctggacctcaaag

SEQ ID NO: 40966 - DNA, 1051 bp, Homo sapiens
atcttctgaaatctggattatcataggaacctctttacttcttgttctgccttgattttcttctcatctgcaacccattgtttacaatgcttccacagcaattcccagaaacacaaatcagatcgtgacctccacctcctcaaccttttagtatcctgacacgaaaccaggccctctgtctccaccgtggccttcaaaaccttcaggatctgatgcagtcccccttcccaggcttgtttcctccatgacctgtcccctctggggcacgttaatctatctacagttgcttaagcggttcttttactgcttcatgcctttgcttctgaaactctggttcgtcagctttgtgactctttcctgggtcttctaagcagaatgaaatttctctttctttgggattccatgggcactgggttttacttaatttcattcttctatattttacagttttttacagttagttgcttgtatgaaacacacttgagtttgaatcttggactgtcatatcctagctgggtgcctttgagcaattcatggctttttttttgtttgtktgttttttgttctttttttttttttttttgagacagggtctcactctgtttgttgtctaggctagagtgcagtggcacaatctcggctcactgcaacctctgcctcctggattcgagcaattctcctgcctcagcctcccaagtagctggtattacagttgtgcaccaccacacctgggtaattttttagtatttttagtagaaacatggttttgccatgttggccatgctgatctcaaactcctgacctcaagagatccacctaccttggcctcccaaagtgctgggattacaggcatgagccactgtgtctggctgattgttttttcagcaacagttttataatctttaaagttgacatggcaatacttaccttttagcattgcttgcaggattaagtaaaatatactgcacacattgctaaattctgttttctttatcattgcttctcatgtatctggatcatctgaagtgatattaatgagtgtagatttctg

SEQ ID NO: 40967 - DNA, 563 bp, Homo sapiens
gctttcttcattccccaaacaaaaaggtaatctaatttataaaagtggtgttttccaatcaacacagggtaaaaggtatatgttcagtaattctctggcaaatcattttattatattcatagaaatgcatattttatttcatattaagtaaaacatcttggctagcttcaattccttgatccatagaactcaaaagggagcaaccaggatgagggctcagctgccgayatccccaagtccattgttaggagtcaagtgggaatttcatggactcaagtgatactgctcctctttcatcactgaggtttctatcagcagaaatcaagaagtagcctgtgcacttgatgcgagactgtttctttgtcagctggctaagatgaaaggaatcacataaattcaaaattagaccactgtgttgtcaagacctccagtcacttcccaggcttttctttcactttggttactactcaatcctctttgctggtgttcttctcttctccctattattaagatgtgcagctctctgtccttgcaccttttccctttttaatgttagtcactct

SEQ ID NO: 40968 - DNA, 601 bp, Homo sapiens
cacttgcctataatcccagctacttggctactcaggaggccgaggcaggggaatcgcttgaatccagtaggcagaggctacagtgagccaagatcatgccactgcactacagcttgggcaacagagtgagacttggtctcaaaaaaaaaaaaaattatatatatatatmttatatatatacactattatatatatacacacacacacacacacacacacacacacacacacacacaattaatatgagatgcccaaaaatccaattgtaaaaaggggcaaaggttgtaaactggtaattcataaaaacaaatgaagagatgcttattggtactatatgctcagtattaagcaaattaaatgagataggatcgtgcatattcaaccaacaaaatatctgaatgtctgaaaataataaatgttaatgagggagtggagaaaatgggaatgctcatactgctgatagagagtaaactggtacaactattgtggcagccaattaatatttagtaaagctgaagatgcatggtccactgtggtacaggccctggagatattatcaaatgtgtacacaaagaaacacgcacaaggatattttctgcga

SEQ ID NO: 40969 - DNA, 601 bp, Homo sapiens
cacttgcctataatcccagctacttggctactcaggaggccgaggcaggggaatcgcttgaatccagtaggcagaggctacagtgagccaagatcatgccactgcactacagcttgggcaacagagtgagacttggtctcaaaaaaaaaaaaaattatatatatatatcttatatatatacactattatatatatayacacacacacacacacacacacacacacacacacacacaattaatatgagatgcccaaaaatccaattgtaaaaaggggcaaaggttgtaaactggtaattcataaaaacaaatgaagagatgcttattggtactatatgctcagtattaagcaaattaaatgagataggatcgtgcatattcaaccaacaaaatatctgaatgtctgaaaataataaatgttaatgagggagtggagaaaatgggaatgctcatactgctgatagagagtaaactggtacaactattgtggcagccaattaatatttagtaaagctgaagatgcatggtccactgtggtacaggccctggagatattatcaaatgtgtacacaaagaaacacgcacaaggatattttctgcga

SEQ ID NO: 40970 - DNA, 601 bp, Homo sapiens
cacttgcctataatcccagctacttggctactcaggaggccgaggcaggggaatcgcttgaatccagtaggcagaggctacagtgagccaagatcatgccactgcactacagcttgggcaacagagtgagacttggtctcaaaaaaaaaaaaaattatatatatatatcttatatatatacactattatatatatacayacacacacacacacacacacacacacacacacacacaattaatatgagatgcccaaaaatccaattgtaaaaaggggcaaaggttgtaaactggtaattcataaaaacaaatgaagagatgcttattggtactatatgctcagtattaagcaaattaaatgagataggatcgtgcatattcaaccaacaaaatatctgaatgtctgaaaataataaatgttaatgagggagtggagaaaatgggaatgctcatactgctgatagagagtaaactggtacaactattgtggcagccaattaatatttagtaaagctgaagatgcatggtccactgtggtacaggccctggagatattatcaaatgtgtacacaaagaaacacgcacaaggatattttctgcga

SEQ ID NO: 40971 - DNA, 780 bp, Homo sapiens
ccgtagtgaaggaattgtcctgtatcttcattgtatcgctgtccataccctggtggtgatactgtattttagtactgcaagatgctaccattgaggaaaccaagtaaaggtacatgggatctctctatgtcttataacccaattatctcaaaatcaaaaatttaaataaaaagattagcaaggggtgggagcaatgtggaaaatgtcaggcttcgggtcatgatggatcattaaaattagagggaagagcatgccaaatttaagcttaaaaggcattccagraagtcttaccaatacgcactctaataccccctctgtcaatgtaccctcacctatgctaacttgaaatttttaaatgctatgtcaatttaattttttcaactaatgtttcttttgtaattgtatatttacaccctgggcaactttgtttttaatcataaacctgagtttataaaatattagtgtcacataacttaagaaaaattaaaagtttatattcttcaaactggtataaaatcaagtccggaattatatctatacccaaattggaagacctagaactttaagctttacttactcttaagtgaacaggtaaagacacgccctggaatcttcgtatgagacttggctgggtgggttgaagattgtgaactgctgatacttcatactggaaacaaatacttgttcttggaataagagggccctcactcacatcaatgaagtcacctattctgattgatttaaaaataaataaacaaaactgcaacatcaaataatttg

SEQ ID NO: 40972 - DNA, 807 bp, Homo sapiens
acagttggagccaaggtcagacagaagaatgggcttggcctatgttccaggcacatggcttcttcaccctgccccattccaggtaatcacgcacccaccatgtgtcatccatccaccccctctcccaggggcaggaccaatccgaggtctcaggcttctccgaatctgtccctgtcgccaatgagcagccctcccgagaggtaggatgtctgcccgtggttgtttcctcattgttttctccaaagccgactttgctttttctttaagcatggttgggcactccatcaaatattcatgtgcctaagtgacatggatatggaaggaaggtttcttgtaaaattcaaattcagtctcatgatccctgacggaacctgccgaggtcgtcttgaccctcgctactcactacttaaagtgtggtcctctgaccggcatcagcttcatctgggagcttattgaaaataccccaggtgtcctgttgtgcacctatggtcccagctattcaggaggctgaggcaggaggatcacctgggcctaggagtttgaggctgcagtgagctatgaacacatctatgaatagtcacagcactcccacctgggcaacacagcaagaccccatctctaacagagaaaaaagaaaaacagaatctcagcccccactcaaacccactgaatgagaatctgcacttgaamaagacccccaggtaatctgacctagaacagagttctgccttcagactcaaggtccccagaaatcaccaaaacaagctacacagaacagtgaacatgatggttagccagatatgcatc

SEQ ID NO: 40973 - DNA, 496 bp, Homo sapiens
ttgcccaaggtcaaacaactagctggttgcaaagtaagaattggaagccacccatgttattccttccgctacacctccctccagagacagggctggccagcatcgcacggaacaggaaattgaaatggctcccggtaaggcagcgagcctgccaaccaccgagagaagctgacaagtgacccaaacccgcccagaatttaaaatgcctcctcagaggagttgccgactaaccycctcccacctgctgcagtgaagaaataagttccaagagtctgcaacccaccatgcctgtttttccacgggaaggaccaagttagaaaggaagcttgaataagtgggatgctgttgaagaactaagatgtagaagcagtttcccaatatgaacttactagcttttttcccactcctatcacatcgccactccccccacacacttcccttaatccccaccccttaaccacagaactctaagaggggcaaagcagaagagagagaa

SEQ ID NO: 40974 - DNA, 812 bp, Homo sapiens
gacataaaaaggatgccctgaaattttactgggtgcaattttcactaaatatagcctaatgaactgaatagttcaatgcttttgcagaaaaagtcctaagcagtgcaattaagaaaaatctaaaacaayacaatgattttatataagcagcagaaatcttcttcccaaatgagaacaagtcatatgcaccactcatttaagactcttcaaaatgcagaaagatgtctggattttgaaagtgaggaaggaagactaatagttcagggcagcagcatgaaatagcaaaagctcccagacatcagggatacagcctgaagcctccaggctcaacctagctgtttactaattgtgtgactgtgggcaaatctcttcatctctgaacctcagtttgctcatcaataaagtggagataatagtacgtactcagtggggcaagatggctcacccctgtgatcccagcactttgggaggccaaggcgggcagatcacccgaggtcaggagttcgagaacagcctggccaacaaggtgaaaccccatctctactaaaaatacaaaaattagccaggcatggtggcctgtaatctcagctacccgggaggctaaggcacaagaatcacttgaacccgggaggtggaggttgcagtgagctgagatcgcgccactgcactccagcctgggtgacagagccagattccatctcaaaaaaaaaaaaaaaaatagtatgtactctgcctgctctgcaggcatgataattcccaatgctcactccagcctgggtgacgaagccagaccccaactcaaaaaaaaaaaa

SEQ ID NO: 40975 - DNA, 812 bp, Homo sapiens
gacataaaaaggatgccctgaaattttactgggtgcaattttcactaaatatagcctaatgaactgaatagttcaatgcttttgcagaaaaagtcctaagcagtgcaattaagaaaaatctaaaacaacacaatgattttatataagcagcagaaatcttcttcccaaatgagaacaagtcatatgcaccactcatttaagactcttcaaaatgcagaaagatgtctggattttgaaagtgaggaaggaagactaatagttcagggcagcagcatgaaatagcaaaagctcccagacatcagggatacagcctgaagcctcyaggctcaacctagctgtttactaattgtgtgactgtgggcaaatctcttcatctctgaacctcagtttgctcatcaataaagtggagataatagtacgtactcagtggggcaagatggctcacccctgtgatcccagcactttgggaggccaaggcgggcagatcacccgaggtcaggagttcgagaacagcctggccaacaaggtgaaaccccatctctactaaaaatacaaaaattagccaggcatggtggcctgtaatctcagctacccgggaggctaaggcacaagaatcacttgaacccgggaggtggaggttgcagtgagctgagatcgcgccactgcactccagcctgggtgacagagccagattccatctcaaaaaaaaaaaaaaaaatagtatgtactctgcctgctctgcaggcatgataattcccaatgctcactccagcctgggtgacgaagccagaccccaactcaaaaaaaaaaaa

SEQ ID NO: 40976 - DNA, 530 bp, Homo sapiens
gagagttataaaggtattcaaatcttctaaaattttccagcattaattttgtttttttttttctgcctgagtgttgatttataaagtgggccctatatctgggcatagttgggggagacattttcttcacaatatagagagtttccaaaagaccacccccatgctttttgtcagcccttttctcctccccacagggagayggtatccaagtccatcttcggctaaaatccgtgcttgtattgacagccccacttcctccttctgaaagcagcattttaatttggagctgttggtgcttaggtataaaatctatttcatttaatgctgctatgaaaatttcccagttttgaatttaagacagtctcttattgttttttcctgctcttgcatgggggaccatctgctctgccaagctttcaaaactttgctctcaagttaggtggcaaatgggctaacaatttggtatatgttaagagcttgttataaagaatacttttgccccagctggtactacagtatggtatttaatg

SEQ ID NO: 40977 - DNA, 1200 bp, Homo sapiens
agtgacattgactctctagcactaaacgcaaacttccatagtcaaaaagaaaggaaggaaggatggggggaagagggaaggagggaaggaaggaaggaaggaaagaaggaggaagggagggagggaaggagggagggagggaaggagggagggagggaaggaaggagggaaagagggaggcagggaagaaagaaagaaaagagtccttaggcagaaagtcccagctgtattcaggaggccatgttcacatatagtggaaactgctgagaacatatggatggggcattgagagcatctgctaaagcaatgtatttattttaaaatttaattaatttatttatttttaaagagataggatctcattctgtcaccctcatagctcactgcaacctcagactcctggactcaagcaatcctcctgcctcagcctcctgagtggctgggactaaaggcatgcaccactactcatggctaagttattaaaaacattttttttagagatggagtctctgcctaggcttgtctcaaatgcctgacctgtaatgattctttcacctcagtctcccaggtagctcggactacaggcaggcaccaccatgcatggctaattaaaaaaaaattttttttagagaagtctcactatgatgccaggctggtctcaatctcccaactgctagtgatcctcccacttcagcctcccaggtagttgggactataggtgtaagccatcatgcttgtcttgctataacaatttatattaaaagttataaaataagtgcttctggataaaggtggaggattgaacacttttcccccagaaatctcacaaaaatgacaattaaagtacaaggaatgggaagataatcagagaagtggaaactttcttggccaactgaagaattctatatcttaaagtagtactgccgaaaggcaagaatcaagctaatcttcagagtagaaaactcattgctcagaactagaagcctggatcacatcaggacctgcagcaaacagagaactagtatgaaagggcttgctggaaagctctttaggacacaattgacttcacgctactggataacatcctctccctataactttcacatgaaacwggggccatagtctcatggagttgatgtttgccagctcttttctttcactcgactcccagagggcaccagaagaatcttctcttgggaa

SEQ ID NO: 40978 - DNA, 583 bp, Homo sapiens
gccttggtgtatcaggaaaagatgaygcaggcccagtctattctatgtaagcagcaaagtgaaggtaaaatacaatttaaaggtcttctatctaaagagttatgctgttagagagctctgaacctgaagtcaacatattttccaggtcaaaatctcgggtatctaactattatttcttttaagctctattatatgccatgagctatgtacatgttcctccacctcaaagacaaaggccattatccttattaaattgagacacagagaggttaagaaatgttctcggtcacacatatgccacctagttaatccaagatacgtactcttgtctttctgactccaaaatctatgctgtgtcattatcccacgtggctctatgtatccaaaagtcacctttctaaggttactaaaatggtacatttttctctctgtacattttacaaaattaatagtaaaaggtttaagtttataacccagagttatcagtatgcttgagttacatatctgccttagggaataattagatatctaggttgctactgtgtttaatttgtacctaccatatgccctggtgccctgtgga

SEQ ID NO: 40979 - DNA, 583 bp, Homo sapiens
gccttggtgtatcaggaaaagatgatgcaggcccagtctattctatgtaagcagcaaagtgaaggtaaaatacaatttaaaggtcttctatctaaagagttatgctgttagagagctctgaayctgaagtcaacatattttccaggtcaaaatctcgggtatctaactattatttcttttaagctctattatatgccatgagctatgtacatgttcctccacctcaaagacaaaggccattatccttattaaattgagacacagagaggttaagaaatgttctcggtcacacatatgccacctagttaatccaagatacgtactcttgtctttctgactccaaaatctatgctgtgtcattatcccacgtggctctatgtatccaaaagtcacctttctaaggttactaaaatggtacatttttctctctgtacattttacaaaattaatagtaaaaggtttaagtttataacccagagttatcagtatgcttgagttacatatctgccttagggaataattagatatctaggttgctactgtgtttaatttgtacctaccatatgccctggtgccctgtgga

SEQ ID NO: 40980 - DNA, 560 bp, Homo sapiens
gtgttccgccatctaaaactgtggaacaaatggacactactgttggttgaggatgggaataaaagccatttccaggcaaaatggaaaaagggaatagaaaataggaaaaaaaacaaacaaactcygacttctattgagaagagacaaaaattcttgttcacttttatctcagcaccagcaaaatacagcatccctctctccaatcaccacattagaactaccccaactcaaagctactggaaatatttgttaatgatttgcatgctgaagtatctaggagtaaagtgtgttaatgtctacatctttgaaatatgtcaaaaataagatgaggtgatggatgacagatggattctaacagatgagtgataatgagaatatagaaaaacattatagaatatagatggtaggtatgaattctttcagctcttctataagtttaaacattttcataagaaaatagatagaacaaagaaaaaaatttttaattgggttattggcaaacgtatagtactttaggctgaatatggaagcagagtatttggctttactatcctagccaa

SEQ ID NO: 40981 - DNA, 780 bp, Homo sapiens
ccgtagtgaaggaattgtcctgtatcttcattgtatcgctgtycataccctggtggtgatactgtattttagtactgcaagatgctaccattgaggaaaccaagtaaaggtacatgggatctctctatgtcttataacccaattatctcaaaatcaaaaatttaaataaaaagattagcaaggggtgggagcaatgtggaaaatgtcaggcttcgggtcatgatggatcattaaaattagagggaagagcatgccaaatttaagcttaaaaggcattccaggaagtcttaccaatacgcactctaataccccctctgtcaatgtaccctcacctatgctaacttgaaatttttaaatgctatgtcaatttaattttttcaactaatgtttcttttgtaattgtatatttacaccctgggcaactttgtttttaatcataaacctgagtttataaaatattagtgtcacataacttaagaaaaattaaaagtttatattcttcaaactggtataaaatcaagtccggaattatatctatacccaaattggaagacctagaactttaagctttacttactcttaagtgaacaggtaaagacacgccctggaatcttcgtatgagacttggctgggtgggttgaagattgtgaactgctgatacttcatactggaaacaaatacttgttcttggaataagagggccctcactcacatcaatgaagtcacctattctgattgatttaaaaataaataaacaaaactgcaacatcaaataatttg

SEQ ID NO: 40982 - DNA, 780 bp, Homo sapiens
ccgtagtgaaggaattgtcctgtatcttcattgtatcgctgtccataccctggtggtgatactgtattttagtactgcaagatgctaccattgaggaaaccaagtaaaggtacatgggatctctctmtgtcttataacccaattatctcaaaatcaaaaatttaaataaaaagattagcaaggggtgggagcaatgtggaaaatgtcaggcttcgggtcatgatggatcattaaaattagagggaagagcatgccaaatttaagcttaaaaggcattccaggaagtcttaccaatacgcactctaataccccctctgtcaatgtaccctcacctatgctaacttgaaatttttaaatgctatgtcaatttaattttttcaactaatgtttcttttgtaattgtatatttacaccctgggcaactttgtttttaatcataaacctgagtttataaaatattagtgtcacataacttaagaaaaattaaaagtttatattcttcaaactggtataaaatcaagtccggaattatatctatacccaaattggaagacctagaactttaagctttacttactcttaagtgaacaggtaaagacacgccctggaatcttcgtatgagacttggctgggtgggttgaagattgtgaactgctgatacttcatactggaaacaaatacttgttcttggaataagagggccctcactcacatcaatgaagtcacctattctgattgatttaaaaataaataaacaaaactgcaacatcaaataatttg

SEQ ID NO: 40983 - DNA, 780 bp, Homo sapiens; identical to SEQ ID NO: 40971

SEQ ID NO: 40984 - DNA, 780 bp, Homo sapiens
ccgtagtgaaggaattgtcctgtatcttcattgtatcgctgtccataccctggtggtgatactgtattttagtactgcaagatgctaccattgaggaaaccaagtaaaggtacatgggatctctctatgtcttataacccaattatctcaaaatcaaaaatttaaataaaaagattagcaaggggtgggagcaatgtggaaaatgtcaggcttcgggtcatgatggatcattaaaattagagggaagagcatgccaaatttaagcttaaaaggcattccaggaagtcttaccaatacgcactctaatacccccyctgtcaatgtaccctcacctatgctaacttgaaatttttaaatgctatgtcaatttaattttttcaactaatgtttcttttgtaattgtatatttacaccctgggcaactttgtttttaatcataaacctgagtttataaaatattagtgtcacataacttaagaaaaattaaaagtttatattcttcaaactggtataaaatcaagtccggaattatatctatacccaaattggaagacctagaactttaagctttacttactcttaagtgaacaggtaaagacacgccctggaatcttcgtatgagacttggctgggtgggttgaagattgtgaactgctgatacttcatactggaaacaaatacttgttcttggaataagagggccctcactcacatcaatgaagtcacctattctgattgatttaaaaataaataaacaaaactgcaacatcaaataatttg

SEQ ID NO: 40985 - DNA, 780 bp, Homo sapiens
ccgtagtgaaggaattgtcctgtatcttcattgtatcgctgtccataccctggtggtgatactgtattttagtactgcaagatgctaccattgaggaaaccaagtaaaggtacatgggatctctctatgtcttataacccaattatctcaaaatcaaaaatttaaataaaaagattagcaaggggtgggagcaatgtggaaaatgtcaggcttcgggtcatgatggatcattaaaattagagggaagagcatgccaaatttaagcttaaaaggcattccaggaagtcttaccaatacgcactctaataccccctctgtcaatgtaccctcacctatgctaacttgaaatttttaaatgctatgtcaatttaattttttcaactaatgtttcttttgtaattgtatatttacaccctgggcaactttgtttttaatcrtaaacctgagtttataaaatattagtgtcacataacttaagaaaaattaaaagtttatattcttcaaactggtataaaatcaagtccggaattatatctatacccaaattggaagacctagaactttaagctttacttactcttaagtgaacaggtaaagacacgccctggaatcttcgtatgagacttggctgggtgggttgaagattgtgaactgctgatacttcatactggaaacaaatacttgttcttggaataagagggccctcactcacatcaatgaagtcacctattctgattgatttaaaaataaataaacaaaactgcaacatcaaataatttg

SEQ ID NO: 40986 - DNA, 1170 bp, Homo sapiens
ctctgcctgacttttcaaatgggctgttctcagtgactctggccccctcccaccctgggctcactcttgagaaactcctaagccttctctggcccttcaggggccttaacgcttatgtgtaggaccaggatgctctgagtgacctacttggtcaatgggctgctacagcagagctgttggggaaggcagagagaaaaaggacaatgacagacaaagaaccactcaacacctcagagaccagctttgtcccccacccaaccgccttgctccccacatgaacacctgcttgcaggaagccaaagtgggtccacagcagcccacctctgttctcactcccagggcagacaaagcagcaagaacaggtgacacacagccccggtgaccctgtcccctccctacccgtgcctactctcccatcaaacctggcttcgagggctgcccgccagtcctgtccaggccttatctggctcagagcagatgatcccctgcacctcccaccctgaatcacacagctacacccagcacatgctacagaggcccagcacactctggatcacatccagaaactccacaataggggaggagacatgctgtttcccaggaagggcagctccccagacttggtcattctcagactcctccagtcaaaggccgggcacagccagctgggatcgccatgcttcactctgaccyacacgactggccttgcctcctctatgggaagagacccctcagcacaacctcaaaccgagacataacaggacaggacaggctggatgctagagaggccagccagatctccacacaaaggctctgctcttaagcaggaggtagcctgagggtcaaaggtttcctgaagcaactcaggtgagacctcacatacaagagccccaaagaggctgcaaaagcaccagctcagccagccaagaacccaggtgtcacacccttctcagaccactgaggatcgctgggattcagcaggaaaaggtggacatgacagctgatggaccaatacttcccaacacccttccagcaagcagctgtgccccgcccctccccacatgagtcactcaacttcagtcctgcacatggatgcctttgaccatggggtcatggctttggtctcctgccataggggcagtgagaggaacaatggtggtctgggaagga

SEQ ID NO: 40987 - DNA, 1170 bp, Homo sapiens
ctctgcctgacttttcaaatgggctgttctcagtgactctggccccctcccaccctgggctcactcttgagaaactcctaagccttctctggcccttcaggggccttaacgcttatgtgtaggaccaggatgctctgagtgacctacttggtcaatgggctgctacagcagagctgttggggaaggcagagagaaaaaggacaatgacagacaaagaaccactcaacacctcagagaccagctttgtcccccacccaaccgccttgctccccacatgaacacctgcttgcaggaagccaaagtgggtccacagcagcccacctctgttctcactcccagggcagacaaagcagcaagaacaggtgacacacagccccggtgaccctgtcccctccctacccgtgcctactctcccatcaaacctggcttcgagggctgcccgccagtcctgtccaggccttatctggctcagagcagatgatcccctgcacctcccaccctgaatcacacagctacacccagcacatgctacagaggcccagcacactctggatcacatccagaaactccacaataggggaggagacatgctgtttcccaggaagggcagctccccagacttggtcattctcagactcctccagtcaaaggccgggcacagccagctgggatcgccatgcttcactctgacccacacgactggccttgcctcctctatgggaagagacccctcrgcacaacctcaaaccgagacataacaggacaggacaggctggatgctagagaggccagccagatctccacacaaaggctctgctcttaagcaggaggtagcctgagggtcaaaggtttcctgaagcaactcaggtgagacctcacatacaagagccccaaagaggctgcaaaagcaccagctcagccagccaagaacccaggtgtcacacccttctcagaccactgaggatcgctgggattcagcaggaaaaggtggacatgacagctgatggaccaatacttcccaacacccttccagcaagcagctgtgccccgcccctccccacatgagtcactcaacttcagtcctgcacatggatgcctttgaccatggggtcatggctttggtctcctgccataggggcagtgagaggaacaatggtggtctgggaagga

SEQ ID NO: 40988 - DNA, 1170 bp, Homo sapiens
ctctgcctgacttttcaaatgggctgttctcagtgactctggccccctcccaccctgggctcactcttgagaaactcctaagccttctctggcccttcaggggccttaacgcttatgtgtaggaccaggatgctctgagtgacctacttggtcaatgggctgctacagcagagctgttggggaaggcagagagaaaaaggacaatgacagacaaagaaccactcaacacctcagagaccagctttgtcccccacccaaccgccttgctccccacatgaacacctgcttgcaggaagccaaagtgggtccacagcagcccacctctgttctcactcccagggcagacaaagcagcaagaacaggtgacacacagccccggtgaccctgtcccctccctacccgtgcctactctcccatcaaacctggcttcgagggctgcccgccagtcctgtccaggccttatctggctcagagcagatgatcccctgcacctcccaccctgaatcacacagctacacccagcacatgctacagaggcccagcacactctggatcacatccagaaactccacaataggggaggagacatgctgtttcccaggaagggcagctccccagacttggtcattctcagactcctccagtcaaaggccgggcacagccagctgggatcgccatgcttcactctgacccacacgactggccttgcctcctctatgggaagagacccctcagcacaacctcaaaccgagacataacaggacaggacaggctggatgctagagaggccagccagatctccacacaaaggctctgctcttaagcaggaggtagcctgagggtcaaaggtttcctgaagcaactcaggtgagacctcacatacaagagccccaaagaggctgcaaaagcaccagctcagccagccaagaacccaggtgtcacacccttctcagaccactgaggatcgctgggattcagcaggaaaaggtggacatgacagctgatggaccaatacttcccaacacccttccagcaagcagctgtgccccgcccctccccacatgagtcactcaacttcagtcctgcacatggatgcctttgaccatggggtcatggctttggtctcctgccataggggcagtgagaggmacaatggtggtctgggaagga

SEQ ID NO: 40989 - DNA, 1170 bp, Homo sapiens
ctctgcctgacttttcaaatgggctgttctcagtgactctggccccctcccaccctgggctcactcttgagaaactcctaagccttctctggcccttcaggggccttaacgcttatgtgtaggaccaggatgctctgagtgacctacttggtcaatgggctgctacagcagagctgttggggaaggcagagagaaaaaggacaatgacagacaaagaaccactcaacacctcagagaccagctttgtcccccacccaaccgccttgctccccacatgaacacctgcttgcaggaagccaaagtgggtccacagcagcccacctctgttctcactcccagggcagacaaagcagcaagaacaggtgacacacagccccggtgaccctgtcccctccctacccgtgcctactctcccatcaaacctggcttcgagggctgcccgccagtcctgtccaggccttatctggctcagagcagatgatcccctgcacctcccaccctgaatcacacagctacacccagcacatgctacagaggcccagcacactctggatcacatccagaaactccacaataggggaggagacatgctgtttcccaggaagggcagctccccagacttggtcattctcagactcctccagtcaaaggccgggcacagccagctgggatcgccatgcttcactctgacccacacgactggccttgcctcctctatgggaagagacccctcagcacaacctcaaaccgagacataacaggacaggacaggctggatgctagagaggccagccagatctccacacaaaggctctgctcttaagcaggaggtagcctgagggtcaaaggtttcctgaagcaactcaggtgagacctcacatacaagagccccaaagaggctgcaaaagcaccagctcagccagccaagaacccaggtgtcacacccttctcagaccactgaggatcgctgggattcagcaggaaaaggtggacatgacagctgatggaccaatacttcccaacacccttccagcaagcagctgtgccccgcccctccccacatgagtcactcaacttcagtcctgcacatggatgcctttgaccatggggtcatggctttggtctcctgccataggggcagtgagaggaasaatggtggtctgggaagga

SEQ ID NO: 40990 - DNA, 550 bp, Homo sapiens
caccccacagtaaggacagctaagtaagctattgggcccataccctgaaaatgttggttatacccttcctatactaattaatcctccagtgtatgccatgcagaggagcccagaaacttcctggcctgggttggggctgcagtggccagactgtgcacctggtggcccaggaaggtaactagagccccacgtagaggactgagtgccactcactctatgctttgtgatttaataggtctaggctcagaaatgggactgatcccacttccagtgacagagtaagcctggagacaagcgaagagcatgcagtrtgtttattgcagacagcagggtgcagtgcagtgggctgtacccactcagtggagccactcctgcagcaactgcacctgcttctgggccagctgggggtcctgccgagcctcactgtggttcagaggctggagtatgagcttgtgggcctccaggaagagctcagtaccaagggcagccttcatatgggcctgtcacactgccagccagggccagtcttggaagaggtcgcagccaacgg

SEQ ID NO: 40991 - DNA, 804 bp, Homo sapiens
attgagcttggaaggtcaagactgcagtgagccgtgactgcaccactgcactccagcatgggtgacagagtaagaccctgtctcaaaaaaacggtgaacagggggtatttgggtctgatatggctaagaaccagccggtctaagtgatctcaagctgccagcctccttgaacagtctgcatctcagcatctttaaaggtttgactgtgtktcttttctcctcttggacctctgcaaaaccataatctttctctttatcacatattttacagcattggcatatattttccagaagtccttgttcgacttacaatgtttttatttcatcataagtttaggaaaaacttatggttttttttttaattttagctctattgatatgtaatttatatgtcatacaatgcacttatttaaagtgtaaaacttagtggttttcaatatattcacagtattgtgcaactatcaccgtgatctaatgttagaactttgcatgtctacaaaaagaaaccctgtatccattagtagccagcctctatactccctaccccaacccctggcaatcacttatattctttttatctctatagatttgtttctgctagataatttatataaatggaatcatataatacatggtcctttgtggccttccagtttttttgttctttatttaaaaaagaaaacaagatacatgtgcagaacatgcaggtttgttacataggtatacatgtgccatggtggtttgctgcacctattgacccatcctctaagttctctcccctcgttccccaccccacaacaggcc

SEQ ID NO: 40992 - DNA, 691 bp, Homo sapiens
atatttattttaaaaaattaacagtctttatgtttctgaatgggaattttgctccattccaaacaaatagggaaagttttggctgagttggtccacacatcaaagggtgacttaagtcagttaatacattctatttctccagaaactgcatcaagaatsggtatgtaaggcaatcacagcccatgagatactggcaaatattaatggaagctttcgggaaaacaaacaaaaatccacactgtctcctttgtaggagttaccagagaaaactctgactgttttcccaaacctccttatgtgaaaatgtgaacactaaagccgccactgccagaggcatgttggggctccccttatctgtggtttatgacggctgatttgacaatcaattctgcacgtggtagcttgaaactgaccatggtagaagaatttacatctcagaaattgcagatgatacaaataaagggtctttaagttttttcttccctttttttaagggaggtgcagatagccagcttactctgagtccatagtgtggagtcatatggaaacttagtgtgagaccagcagagagtcatgagaaattaggtcttgataccgtaagttgaactaccagatcaagctttagtagaaacctgccctaggtctggagttttcatttaatgtgagcatataacttcttcaaaaaataaac

SEQ ID NO: 40993 - DNA, 691 bp, Homo sapiens
atatttattttaaaaaattaacagtctttatgtttctgaatgggaattttgctccattccaaacaaatagggaaagttttggctgagttggtccacacatcaaagggtgacttaagtcagttaatacattctatttctccagaaactgcatcaagaatgggtatgtaaggcaatcacagcccatgagatactggcaaatattaatggaagctttcgggaaaacaaacaaaaatccacactgtctcctttgtaggagttaccagagaaaactctgactgttttcccaaacctccttatgtgaaaatgtgaacactaaagccgccactgccagaggcatgttggggctccccttatctgtggtttatgacggctgatttgacaatcaattctgcacgtggtagcttgaaactgaccatggtagaagaatttacatctcagaaattgcagatgatacaaataaagggtctttaagttttttcttycctttttttaagggaggtgcagatagccagcttactctgagtccatagtgtggagtcatatggaaacttagtgtgagaccagcagagagtcatgagaaattaggtcttgataccgtaagttgaactaccagatcaagctttagtagaaacctgccctaggtctggagttttcatttaatgtgagcatataacttcttcaaaaaataaac

SEQ ID NO: 40994 - DNA, 593 bp, Homo sapiens
ttttagcttcattataatcttaccggaccaccttcatatatgtggtacctcaatgatgaaaatattgttattcagagcatggctgtattttcagatccaaaaagtagttattatagtatctcctttctgtaaagtggtctagaattatttaatacctggatttaaaaagaacataaaataatgaggcacataattgaggtaatcagcaaaataaagctagtgagacttaagttaatataaagttgatcactaagttttaccttagttttaacaaaaagaatatatcttgaaacataaactaagccttaattaaaattttggtgtagaccatggttatcttaaatgcactttttctccaactgcaattcttctcttcttcccacaactaaacatcagtagtgacatgttgccttctatttactcagtaatgagtattactagcactcttagttctttccaaattcctcctttcttttctctccttttcactcatcctcaattttctctttctttattcaccatccactaacagtttttaggaaatttcctctcartaatgttgcagaatgatttgttttcttactttgtagtgg

SEQ ID NO: 40995 - DNA, 635 bp, Homo sapiens
ttcagctctgtgagtttatacattttaaatatttgaatacatattttagggggatcagatgacagtaaaaggctttatagtttttacttcgttgtaatttttaagttctatccttcctcattcacaaagtatgtgtattcctactatagtggaataggaagataatactgagataatatatttcccatgctggcattatttcctggcagaactaacaataatagttcagacatgggtattattgagaaatagctggaaactaatataagccatactttaagagaaaaaaagattatgttatacgatagacctgaaagtatattttacaacsctattttctagatgtggaagatgaatctacttgctcacacattcagaaaacgacacttatgagattgcatagaaatttaatgtctctacagaaccttggtgggaattgaggtaacacaaatcaatagaattaaacatctatatggagaataggaaagtaaaaatgagtgtaataatgtcacattatgcatgagaaaatgcatacaattatcttaagtagaaattatttcacaaatagtttgtatttattgtgtaaaaatagccacatatattttaataaacagttttggacacggtttctttcc

SEQ ID NO: 40996 - DNA, 591 bp, Homo sapiens
ggtggcttatgcctgtaatcccagcactttgggagactgaggcaggtggatcacttgaggccaggagttggagaccagcctggccaacataatgaaaccctatttctacaaaaaatacaaaaattagccgggtgtggtggtgtgcacctctagtcccagctacttgggaagctgaggcagagaatcgtttgaacacaggaggtggaggttgcagtgagctgagatcatgccactgcacaaaacaaaacaaagaaacaaataaaaacaagaaaaaaagaaataattatactttaggataaagtaggaaatggattttttttagtatttgaaaaagggtgctaacaagctcagagaaattaagagacttattcaatggtcttctgactccatgccttttattttttctacaatattttaaacatgatgattgatatggtttggatttgtgcccccarccaaatttcatgttgaattgtgattcccaatattacaggagggccctggtgggaggtgactggatcatgggggtggatttcctctttctgttctcgtgatagtgagtgagttcccacgagatctaattgtttaaaa

SEQ ID NO: 40997 - DNA, 553 bp, Homo sapiens
gagatgacatgaattaatcaatttgagtcaacttttgtcaatttaaggagattcttgatacttgataatgtgactcatgattgtttcacgagtataagaaagttgaagcaagagttacctttgtcagagatttccatcattcataaaatgagcaataagaatcactgtctttgaacaagtctcttgaagaaatttcagctaatttcatatccctgtccattgagctgtagctcgctagaacaaaacacaggtatgaaaatgatttttcawttttccaatagaaagtgcacatgatgaaatgtgtagaaaacaaaactttaggagtttattaaataatcatttttaaatgatttaatcacattaattttaaatgtatgcttcaaatggatcttttctgtaagtttttgtaactgtgcagctatggtttcacttctattaaaatcagcaaccctaagtgttttgttatttttgcctaaggactgaaaagctggtataagaaaaccaaaacaaacctaaaacattttgccgagctgccccctcttcaaattagtat

SEQ ID NO: 40998 - DNA, 518 bp, Homo sapiens
aaggtgacttctggcttctcagtgactcagccacacttctctttttcactcactcttctttctggtcctcactaagacaaaatacagaatacagagcagcagttcacgggctatagcatttraggagattaaatacaggcctccaaccacacaggccatctggaagctttggcctccagatgaggacataacgaggtcatctctgctttcagggagctctcagagtctcaggaacagatgtacatggtccatcagagtgtggctcagggcccagggtgggttggggaaaaggtgagttatttagcattggaggagcctgtttgtagccatggctgccaacatgcatgagccacttagaagggctttagggtggtgagggtacaggtctacctgtgaagctgagtgatagtcacggtaattacagtcacctactatagcctcacaatgagccattataaaaatgaggaaactggggctccagaaagatttctcagccccaggacggtgcagccaggaaa

SEQ ID NO: 40999 - DNA, 320 bp, Homo sapiens
ttttcttttctgagcccagatccccaacaacagatggcctctcccattttatccatatcccctcccccagccagcctgtcccacatatcttcagggctcacagaaccctctggaccacttccccaggcttcagttgctcacacactctttatccttccccagtctcctgcttccaatcaggatagaggtcagtactaacatccacccccctatagctttaggcaactcccttccctctctctgcttttgtycccccatcagcactgggctaagaacagtgtaggggaggcatccctgggcctcctcaggggtgacagtct

SEQ ID NO: 41000 - DNA, 559 bp, Homo sapiens
tgacggggaagaaggatgtggctaagggcagtgaaggtgaaaaccttctcacggtcccagggagggagaaggaaggcatgctgatgggggttaagccgggggaggacgcatcggggcctgctgaagaccttgtgagaagatctgagaaagatactgcagctgttgtctccagacagggcagctccctgaacctctttgaagatgtgcagatcacagaaccagaagctgagccagagtccaagtctgaaccgagacctccaatttcctctccgagggctccccagaccagagctgtcaagccccggtgagttttggctcttctmgtgcagggcatttctgccttgccattggtggttttcaggcttacgttagaccagctcttgtgggtcccatgatatcatagtacccatatatgccaaaggtttgctggtctaaattatttttttaaccagtccctactgccagcctggcctgccctgtataaattgcagtgatgtttcccagctcagagctactgcccagcaggcatggtctgtcctttcagtcagcttatcagatc

SEQ ID NO: 41001 - DNA, 618 bp, Homo sapiens
tggaagacctggagcggaacaacggctccctggaccggccctactacatgtccaagagccttctaaagattctgggcaagaagaacgaggcgcccccggacaacaagaagaggaagaagtgacagctccggccctgatccaggactgcaccccacccccaccgtccagccatccaacctcacttcgccttacaggtctccattttgtggtaaaaaaaggttttaggccaggcgccgtggctcacgcctgtaatccaacactttgagaggctgaggcgggcggatcacctgagtcaggagttcgagaccagcctggccaacatggtgaaacctccgtctctattaaaaatacaaaaattagccgagartggtggcatgcacctgtcatcccagctactcgggaggctgaggcaggagaatcgcttgaacccgggaggcagaggttgcagtgagccgagatcgcgccactgcactccaacctgggtgacagactctgtctccaaaacaaaacaaacaaacaaaaagattttattaaagatattttgttaactcagtaaatctgtgactcattctctccacgacgacaggcggcctttttttttccgcgcccggctcttta

SEQ ID NO: 41002 - DNA, 549 bp, Homo sapiens
aatctggctgttagagaggatagatgttggtgtcaggcagaatgtgtccaaaccctaactacaggcagggcaggtagctcatgcctgtaatctcagcactttgagaggccaaggtgggcggatggcttgagcccaggagttcaaaaccagcctgggctacatggcaaaactctgtctctacaaaaaatacaaaaattagccgatgtggtggcacacgcctgtagtcccagctactagggaggctgaggagggaggattgcttgagcctgggatgtcgaggctgcaatgagccctgattgtgccactgcactccagcttgggcgacagagactctgtctccaaacaaacaaaacaccaccaacccctaactgctatgtctgttttttcatctgtaaaattggcaaatcatcaatcttataggattaaatgaaataatgcacataaagcccttagcaaagacttgcacatggtaaktccaaagtatatatttgctataattaatagtaatgtttgcaaagcacttagtttctggtgggtaataagttctca

SEQ ID NO: 41003 - DNA, 518 bp, Homo sapiens
taagggatttacatgaattaaatcatttaaacctcacaagagccctatgacctagagacagctatcagccccattttacagacaaggaaactgaggtcactaggaagtttagtaactgtcartgggctgactcatgactctaaggagacagtctgactgctgagcccaagtaactgctctgtcatactcaccctcacacccacctactactggctccctgtgggtcacctcctcctgtgggctctgaccagcttccctttcttctccaggcacagagactggactgaagtctattgcatttgccacagtcccgactggggagtcatggggttgaagtgacccataggctgatggagtgtgcttgctggatgcgggggaaagggagatttatatctgccctggagggagtcaatggtgtttgcatcatggcatatgaggtgcactatctagaatgctgaagggtaaagaccagcaggggccatgcagagtctattcatcacggttttatttcacagcct

SEQ ID NO: 41004 - DNA, 531 bp, Homo sapiens
gtctgcagacaaatgtcagatgccagcccattgcagtctgtccactggggagggggaagctttatgcaggacaataggaaaaaagagtgaaactattctgaattagatgtttatatacataaaatgatattgcttgacacctgaagggaacaagaaaaactctggagctttcttgatctagtgacatgaaagaaagatgaggtccatgtgctgtggctcatgcctrtaatcccagcactttgggaggctgaggctggaagataccttgagtccaggagttcaaggccagcctgggcaacatggtgagacctaatctttattgaaaaaataaaaataaaacgtagcagggcatggtggtgcatgcctatgatcccagctatttgggaagctgaggtgagaagattacttgagccagtgagattaaggcttctatgagccatgatcatgccactgcattccagcaaattaaaaaaacttaaaattttttttaggcttgacttgaaactcagagaccttgaaaaagaaagaaaa

SEQ ID NO: 41005 - DNA, 531 bp, Homo sapiens
gtctgcagacaaatgtcagatgccagcccattgcagtctgtccactggggagggggaagctttatgcaggacaataggaaaaaagagtgaaactattctgaattagatgtttatatacataaaatgatattgcttgacacctgaagggaacaagaaaaactctggagctttcttgatctagtgacatgaaagaaagatgaggtccatgtgctgtggctcatgcctataatcccagcactttgggaggctgaggctggaagataccttgagtccaggagttcaaggccagcctgggcaacatggtgagacctaatctttattgaaaaaataaaaataaaacgtagcagggcatggtggtgcatgcctatgatcccagctatttgggaagctgaggtgrgaagattacttgagccagtgagattaaggcttctatgagccatgatcatgccactgcattccagcaaattaaaaaaacttaaaattttttttaggcttgacttgaaactcagagaccttgaaaaagaaagaaaa

SEQ ID NO: 41006 - DNA, 531 bp, Homo sapiens
gtctgcagacaaatgtcagatgccagcccattgcagtctgtccactggggagggggaagctttatgcaggacaataggaaaaaagagtgaaactattctgaattagatgtttatatacataaaatgatattgcttgacacctgaagggaacaagaaaaactctggagctttcttgatctagtgacatgaaagaaagatgaggtccatgtgctgtggctcatgcctataatcccagcactttgggaggctgaggctggaagataccttgagtccaggagttcaaggccagcctgggcaacatggtgagacctaatctttattgaaaaaataaaaataaaacgtagcagggcatggtggtgcatgcctatgatcccagctatttgggaagctgaggtgagaagaytacttgagccagtgagattaaggcttctatgagccatgatcatgccactgcattccagcaaattaaaaaaacttaaaattttttttaggcttgacttgaaactcagagaccttgaaaaagaaagaaaa

SEQ ID NO: 41007 - DNA, 531 bp, Homo sapiens
gtctgcagacaaatgtcagatgccagcccattgcagtctgtccactggggagggggaagctttatgcaggacaataggaaaaaagagtgaaactattctgaattagatgtttatatacataaaatgatattgcttgacacctgaagggaacaagaaaaactctggagctttcttgatctagtgacatgaaagaaagatgaggtccatgtgctgtggctcatgcctataatcccagcactttgggaggctgaggctggaagataccttgagtccaggagttcaaggccagcctgggcaacatggtgagacctaatctttattgaaaaaataaaaataaaacgtagcagggcatggtggtgcatgcctatgatcccagctatttgggaagctgaggtgagaagattacttgagccagtgagattaaggcttctatgagccatgatcatgccactgcattccagcaaattaaaaaaacttaaaawtttttttaggcttgacttgaaactcagagaccttgaaaaagaaagaaaa

SEQ ID NO: 41008 - DNA, 1784 bp, Homo sapiens
catctttccttcttcttttttgatggagtctcactctgttgcctgggctggagtgcagtaagtggtacgatattggctcactgaaacctccgcctcccgggtttaagtgattctcctgcctccacctcccaagtagcttgggattacaggcasctgccactgcacccagctaattttttgtatttttaatagagatggggtttcaacatgttagccaggctagtcttgaactcctgacctcatgattcaccggctttggcctcccaaagtgctgggattacagcctcttttcttatacattacccaatctcatggagtttctttatagcagggcaaggatggcctattccacccccgcaggatgttatccttattgagaccagttggccagaagagaaattaagtttactgcactctgatttggtgttggtcctacaatcctcaaataagattgatcataaacttcaaaagtctattgacaaggaagctatgcatgttgcaagtttcactaaagaatatgatgatgcatgtggggacttttttggctggttgtgttgtttactgtcctctgattctatctataactttcttgtatgcccaatcttcactatttttatacatgtattgctattttatcattgtatgtctcttgtcaatgtcatgcctattgtaggaaaagaaaaggatgcaatcaaagacccacaaatcatcataaattgtaggatagatctgatccagttggcttttcagattgaaccctaggccttactccctctcaccacttaaacaattggctattaaatcaggtcagattgtgtccttcttctgtgatctgaactcactaatattgaaactatcatcaccaatgacagatgaccaaataaacaaccctgggaatgagatttcctagcattgtgggacttcctgctggttgttggccttcacatacattccataaaatgatctttggccaatagtggggactgaggcctcaactctgaccttttattctcttgccaaaaatcctgtctaaggggcctggagattcacactccacaagccataaaatctcgtgatttttttttcaattaacctggtataatgtggcttattttccaagctgaccctgtgatagcatcacataacacatggcagacccccttatcttaactcaagtgttcctttctactgacttcatgtctttacacaatggtttaactcccttgaccaactgtcaactaaagaattcctaaaactcacctatgacttgtaagacccctcgttgagatgtcttaccttttcaggatgaaccaatgtataccttccacttattgatttacaatttaatttgcaacttgtgtctccatgaaatgtacaaaatcaaactgtaagctgaccacattgggctcactctctcagaagctcttaagactgtgtaaccctaggccatggtcactcatattggcttagaataaagctatctaaatactttggcagaatttggttttttcatcaccacaactgaaaaaacttgaccttcacaaaaccacttttctgtttagtagaaatttcccagggctacaaagccttcactgtatgagctgcaaatcaagccaaaatgttatcagagatgaagagatggggatagccatcaggcctggggatggacctccctggagctgggcattcaagaggatgagtgcagcagaacgcgtatccagggaggtctggtctgctgatttttctaggcataaagcaaatttattttttaaattaaaataaaa

SEQ ID NO: 41009 - DNA, 1784 bp, Homo sapiens
catctttccttcttcttttttgatggagtctcactctgttgcctgggctggagtgcagtaagtggtacgatattggctcactgaaacctccgcctcccgggtttaagtgattctcctgcctccacctcccaagtagcttgggattacaggcagctgccactgcacccagctaattttttgtatttttaatagagatggggtttcamcatgttagccaggctagtcttgaactcctgacctcatgattcaccggctttggcctcccaaagtgctgggattacagcctcttttcttatacattacccaatctcatggagtttctttatagcagggcaaggatggcctattccacccccgcaggatgttatccttattgagaccagttggccagaagagaaattaagtttactgcactctgatttggtgttggtcctacaatcctcaaataagattgatcataaacttcaaaagtctattgacaaggaagctatgcatgttgcaagtttcactaaagaatatgatgatgcatgtggggacttttttggctggttgtgttgtttactgtcctctgattctatctataactttcttgtatgcccaatcttcactatttttatacatgtattgctattttatcattgtatgtctcttgtcaatgtcatgcctattgtaggaaaagaaaaggatgcaatcaaagacccacaaatcatcataaattgtaggatagatctgatccagttggcttttcagattgaaccctaggccttactccctctcaccacttaaacaattggctattaaatcaggtcagattgtgtccttcttctgtgatctgaactcactaatattgaaactatcatcaccaatgacagatgaccaaataaacaaccctgggaatgagatttcctagcattgtgggacttcctgctggttgttggccttcacatacattccataaaatgatctttggccaatagtggggactgaggcctcaactctgaccttttattctcttgccaaaaatcctgtctaaggggcctggagattcacactccacaagccataaaatctcgtgatttttttttcaattaacctggtataatgtggcttattttccaagctgaccctgtgatagcatcacataacacatggcagacccccttatcttaactcaagtgttcctttctactgacttcatgtctttacacaatggtttaactcccttgaccaactgtcaactaaagaattcctaaaactcacctatgacttgtaagacccctcgttgagatgtcttaccttttcaggatgaaccaatgtataccttccacttattgatttacaatttaatttgcaacttgtgtctccatgaaatgtacaaaatcaaactgtaagctgaccacattgggctcactctctcagaagctcttaagactgtgtaaccctaggccatggtcactcatattggcttagaataaagctatctaaatactttggcagaatttggttttttcatcaccacaactgaaaaaacttgaccttcacaaaaccacttttctgtttagtagaaatttcccagggctacaaagccttcactgtatgagctgcaaatcaagccaaaatgttatcagagatgaagagatggggatagccatcaggcctggggatggacctccctggagctgggcattcaagaggatgagtgcagcagaacgcgtatccagggaggtctggtctgctgatttttctaggcataaagcaaatttattttttaaattaaaataaaa

SEQ ID NO: 41010 - DNA, 522 bp, Homo sapiens
gatgtcagtaacatcttagatgaccaagaataatcttgtgggccccaagaacatatgacaatatggaytacgccagcaaaaatctcacccatcagacaacagcaaatgacactgtggctcaaatgttaaatgtcctctcttgatgtgtgaaagcacatgaccagcaggaggcaaaaacatcagggagacaaaggctttgttgcatatctgtggacttcagtctccagtgagacactcagagcctacatctcctctgttaccactgctgttttgattgcacagaacatttccatatatgtttcattctacaagaaacgtttcgacaaacatacatctgataaaaggctgtcttcaaaatgtctaagcaactaacactactcactagcaaaaacacaaaagagaaactaataaccaaacaaaacctgaatagacatttctacaaaaaagacataacattgaaaacaagttttaaaaacttgaataacatcacaaaccatgagaaagatataaatcaaaacaaca

SEQ ID NO: 41011 - DNA, 1066 bp, Homo sapiens
ccccagcgactggcacgctgctccgagtgagcttgtcctgccttggcacaaattctcagtctggccagggccacagaaggccgagtcccccggacggtaatcttggctgctttctgcacttgaatgtaaagtcctcctcaagacggcctgtggtctgcctcttggcaaccaagaagcctgcagtgccatatgacccgagtcatggactggagccygaaaggcagtgtacaccctgtcctgatcttgctgcttgtttcctctctgtggctccattcatagcacagttgttgcactgaggcttgtgcaggccgagcaaggccaagctggctcaaagagcaaccagtcaactctgccacggtgtgccaggcaccggttctccagccaccaacctcactcactcccgcaaatggcacatcagttcttctaccctaaaggtaggaccaaagggccatctgcttttctgaagtcctctgctctatcagccatcacgtggcagccactcgggctgtgggaaccaggccatgtatttccttggttaagtgaggtttgtggttggtctacctgctgcaggtccaccctcgaataggtggcttgttgctttttgagccagcttgcccttgcctggcatgcacacgcccgagcgactgccacacagctccgagtgatcttgtcctgcattggcccaaattctaagtctggccagggccacagaaggacaagtaccctagatggtaatcctggctgctttctgcagttgaacatgaagtccttctcaaaacggcctgtgatctgcctcttggcaaccaagaagctcgcagtgccataccatccctgaggcacggactggagccccaaaggcagtgtacaccctggtcctaagcctgctgctcatttcccctatgtggctccatttatagcacagttgttgcactgaagcttgtgcatgccaggcaaggccaagctgcctcaaagagcaaccagccacctctgtaagggtacgcttggagcagatggaccagccaccaacctcacccactcaaggaagcagggaatgcgcgtttgtacc

SEQ ID NO: 41012 - DNA, 1066 bp, Homo sapiens
ccccagcgactggcacgctgctccgagtgagcttgtcctgccttggcacaaattctcagtctggccagggccacagaaggccgagtcccccggacggtaatcttggctgctttctgcacttgaatgtaaagtcctcctcaagacggcctgtggtctgcctcttggcaaccaagaagcctgcagtgccatatgacccgagtcatggactggagcccgaaaggcagtgtacaccctgtcctgatcttgctgcttgtttcctctctgtggctccattcatagcacagttgttgcactgaggcttgtgcaggccgagcaaggccaagctrgctcaaagagcaaccagtcaactctgccacggtgtgccaggcaccggttctccagccaccaacctcactcactcccgcaaatggcacatcagttcttctaccctaaaggtaggaccaaagggccatctgcttttctgaagtcctctgctctatcagccatcacgtggcagccactcgggctgtgggaaccaggccatgtatttccttggttaagtgaggtttgtggttggtctacctgctgcaggtccaccctcgaataggtggcttgttgctttttgagccagcttgcccttgcctggcatgcacacgcccgagcgactgccacacagctccgagtgatcttgtcctgcattggcccaaattctaagtctggccagggccacagaaggacaagtaccctagatggtaatcctggctgctttctgcagttgaacatgaagtccttctcaaaacggcctgtgatctgcctcttggcaaccaagaagctcgcagtgccataccatccctgaggcacggactggagccccaaaggcagtgtacaccctggtcctaagcctgctgctcatttcccctatgtggctccatttatagcacagttgttgcactgaagcttgtgcatgccaggcaaggccaagctgcctcaaagagcaaccagccacctctgtaagggtacgcttggagcagatggaccagccaccaacctcacccactcaaggaagcagggaatgcgcgtttgtacc

SEQ ID NO: 41013 - DNA, 2017 bp, Homo sapiens
tcaggtttggaaatctgagagtcagagagacatccaggctttgccgcaagcctcaccagaacctcccggggtgtgaagagtcctgttcgggagcagggctgtgaggcggggcaggccagggctcgtccgggtcacaggtacagccttgtgtgttgcaaacgacaaggacctcccaagtgtgccaccatgtgcccacccactaccctgcccagagtccactgtggatggactggcagtggctatacagtgggcagacccagaggagctgtctgggggcccagggcaggcaggggtcattctggaaaaccaagcttctagtgctgcagggacagcctctgtgcccctccccggctcaggccccttcctcccctcttctggctcctcctgtgtggaatctctcaggttccagtggtaacctgagagataggagtctctgctcttctgtgtccctttgccccttcatcttgtgtccggtcagctttccagggtggctgtgttcagtggctgaggggtgagaaaccctacgcctcaaggacagaccccgcttttcccagaggccactagggagctcagtggagctgacaggtcctaccagtagcttgggcacacaagaccccatctgggtgatgtgtctccaaagagagtcatgttgacaggagtcagtctccctgagcccagagctggcacatagcagagccagggctgggtccccaaggttgtcagaggcaaagccttgagctccaaatcccgttcagattcagttcttcactgatgatgaggctccgggaggagagcctgatggccaggcaggcagcgtgcagggatcctcctggtgcttcagccagtcctggggctgccacttcccagagcactgccgggtgtgcagggcgtgggtgcagcgccagctgcctcaggctcatgcccactgttcggttgcaggcaccaaccccttcctcaggtcgatgcaccaccgcgtgacctccaggcrgctgcagctcccggacaagcactaggttaccaccttgctcagcacctgtgcccagagcatccacaaggcctgcctctcggctgcctagccaggactgcagggatggcccgcagcctcatcggggccaaggatgcatgcctcctgtcagacacttctagatgttggcgtccatggagagcctggagttaggttagctttcctccttttctctcctgccttggggatctgccaaatgaaatcccacacttgtacagactgataggtgcgcagtggagtgtgctgcctgcagggagttggctgtcttcttggagaaggcactccatgtgacttcctccatgaagccagacacagtccccagccacgatcctcgggctgctctcaccacggcctgtccagggtccgggtgcatctcagcagcatgaggttgtgctcaggttgttgttagcgcgtcttgtgtgtgctcgacacacccctgctgctttctataggagaacacagaggacataggaaacccttcaaacacacatgggactctctgctcacagttttgggttcaggctgcactgctttgggcaagtggggcaccccctagggaagcctctgagtccagggcacaggatgcctctttcaatacttgttttttttctcatactcaggatctatactgtagactttataacactgtacccttaagctacaccaaatttattaaaaaatattttttctttgataattaacttttctgtagcttttaaaatttataaacttttaaattttttaactttttgacttgcaataacagcttaaaatacattgtacagctagctgtataaaaatatttttctttatagcctgtaagtttttttatttgaaaaacgttctattttaattttcttgaaaactctgttaaaagctgtgacacaaacatatacattagcctaggcctacactgggtcaagatcatcagtgttactgtcttccacctccacatctgctcccattggaaggtttttagaggaaataacgtgt

SEQ ID NO: 41014 - DNA, 2017 bp, Homo sapiens
tcaggtttggaaatctgagagtcagagagacatccaggctttgccgcaagcctcaccagaacctcccggggtgtgaagagtcctgttcgggagcagggctgtgaggcggggcaggccagggctcgtccgggtcacaggtacagccttgtgtgttgcaaacgacaaggacctcccaagtgtgccaccatgtgcccacccactaccctgcccagagtccactgtggatggactggcagtggctatacagtgggcagacccagaggagctgtctgggggcccagggcaggcaggggtcattctggaaaaccaagcttctagtgctgcagggacagcctctgtgcccctccccggctcaggccccttcctcccctcttctggctcctcctgtgtggaatctctcaggttccagtggtaacctgagagataggagtctctgctcttctgtgtccctttgccccttcatcttgtgtccggtcagctttccagggtggctgtgttcagtggctgaggggtgagaaaccctacgcctcaaggacagaccccgcttttcccagaggccactagggagctcagtggagctgacaggtcctaccagtagcttgggcacacaagaccccatctgggtgatgtgtctccaaagagagtcatgttgacaggagtcagtctccctgagcccagagctggcacatagcagagccagggctgggtccccaaggttgtcagaggcaaagccttgagctccaaatcccgttcagattcagttcttcactgatgatgaggctccgggaggagagcctgatggccaggcaggcagcgtgcagggatcctcctggtgcttcagccagtcctggggctgccacttcccagagcactgccgggtgtgcagggcgtgggtgcagcgccagctgcctcaggctcatgcccactgttcggttgcaggcaccaaccccttcctcaggtcgatgcaccaccgcgtgacctccaggcagctgcagctcccggacaagcactaggttaccaccttgctcagcacctgtgcccagagcatccacaaggcctgcctctcggctgcctagccaggactgcagggatggcccgcagcctcatcggggccaaggatgcatgcytcctgtcagacacttctagatgttggcgtccatggagagcctggagttaggttagctttcctccttttctctcctgccttggggatctgccaaatgaaatcccacacttgtacagactgataggtgcgcagtggagtgtgctgcctgcagggagttggctgtcttcttggagaaggcactccatgtgacttcctccatgaagccagacacagtccccagccacgatcctcgggctgctctcaccacggcctgtccagggtccgggtgcatctcagcagcatgaggttgtgctcaggttgttgttagcgcgtcttgtgtgtgctcgacacacccctgctgctttctataggagaacacagaggacataggaaacccttcaaacacacatgggactctctgctcacagttttgggttcaggctgcactgctttgggcaagtggggcaccccctagggaagcctctgagtccagggcacaggatgcctctttcaatacttgttttttttctcatactcaggatctatactgtagactttataacactgtacccttaagctacaccaaatttattaaaaaatattttttctttgataattaacttttctgtagcttttaaaatttataaacttttaaattttttaactttttgacttgcaataacagcttaaaatacattgtacagctagctgtataaaaatatttttctttatagcctgtaagtttttttatttgaaaaacgttctattttaattttcttgaaaactctgttaaaagctgtgacacaaacatatacattagcctaggcctacactgggtcaagatcatcagtgttactgtcttccacctccacatctgctcccattggaaggtttttagaggaaataacgtgt

SEQ ID NO: 41015 - DNA, 2017 bp, Homo sapiens
tcaggtttggaaatctgagagtcagagagacatccaggctttgccgcaagcctcaccagaacctcccggggtgtgaagagtcctgttcgggagcagggctgtgaggcggggcaggccagggctcgtccgggtcacaggtacagccttgtgtgttgcaaacgacaaggacctcccaagtgtgccaccatgtgcccacccactaccctgcccagagtccactgtggatggactggcagtggctatacagtgggcagacccagaggagctgtctgggggcccagggcaggcaggggtcattctggaaaaccaagcttctagtgctgcagggacagcctctgtgcccctccccggctcaggccccttcctcccctcttctggctcctcctgtgtggaatctctcaggttccagtggtaacctgagagataggagtctctgctcttctgtgtccctttgccccttcatcttgtgtccggtcagctttccagggtggctgtgttcagtggctgaggggtgagaaaccctacgcctcaaggacagaccccgcttttcccagaggccactagggagctcagtggagctgacaggtcctaccagtagcttgggcacacaagaccccatctgggtgatgtgtctccaaagagagtcatgttgacaggagtcagtctccctgagcccagagctggcacatagcagagccagggctgggtccccaaggttgtcagaggcaaagccttgagctccaaatcccgttcagattcagttcttcactgatgatgaggctccgggaggagagcctgatggccaggcaggcagcgtgcagggatcctcctggtgcttcagccagtcctggggctgccacttcccagagcactgccgggtgtgcagggcgtgggtgcagcgccagctgcctcaggctcatgcccactgttcggttgcaggcaccaaccccttcctcaggtcgatgcaccaccgcgtgacctccaggcagctgcagctcccggacaagcactaggttaccaccttgctcagcacctgtgcccagagcatccacaaggcctgcctctcggctgcctagccaggactgcagggatggcccgcagcctcatcggggccaaggatgcatgcctcctgtcagacacttctagatgttggygtccatggagagcctggagttaggttagctttcctccttttctctcctgccttggggatctgccaaatgaaatcccacacttgtacagactgataggtgcgcagtggagtgtgctgcctgcagggagttggctgtcttcttggagaaggcactccatgtgacttcctccatgaagccagacacagtccccagccacgatcctcgggctgctctcaccacggcctgtccagggtccgggtgcatctcagcagcatgaggttgtgctcaggttgttgttagcgcgtcttgtgtgtgctcgacacacccctgctgctttctataggagaacacagaggacataggaaacccttcaaacacacatgggactctctgctcacagttttgggttcaggctgcactgctttgggcaagtggggcaccccctagggaagcctctgagtccagggcacaggatgcctctttcaatacttgttttttttctcatactcaggatctatactgtagactttataacactgtacccttaagctacaccaaatttattaaaaaatattttttctttgataattaacttttctgtagcttttaaaatttataaacttttaaattttttaactttttgacttgcaataacagcttaaaatacattgtacagctagctgtataaaaatatttttctttatagcctgtaagtttttttatttgaaaaacgttctattttaattttcttgaaaactctgttaaaagctgtgacacaaacatatacattagcctaggcctacactgggtcaagatcatcagtgttactgtcttccacctccacatctgctcccattggaaggtttttagaggaaataacgtgt

SEQ ID NO: 41016 - DNA, 2017 bp, Homo sapiens
tcaggtttggaaatctgagagtcagagagacatccaggctttgccgcaagcctcaccagaacctcccggggtgtgaagagtcctgttcgggagcagggctgtgaggcggggcaggccagggctcgtccgggtcacaggtacagccttgtgtgttgcaaacgacaaggacctcccaagtgtgccaccatgtgcccacccactaccctgcccagagtccactgtggatggactggcagtggctatacagtgggcagacccagaggagctgtctgggggcccagggcaggcaggggtcattctggaaaaccaagcttctagtgctgcagggacagcctctgtgcccctccccggctcaggccccttcctcccctcttctggctcctcctgtgtggaatctctcaggttccagtggtaacctgagagataggagtctctgctcttctgtgtccctttgccccttcatcttgtgtccggtcagctttccagggtggctgtgttcagtggctgaggggtgagaaaccctacgcctcaaggacagaccccgcttttcccagaggccactagggagctcagtggagctgacaggtcctaccagtagcttgggcacacaagaccccatctgggtgatgtgtctccaaagagagtcatgttgacaggagtcagtctccctgagcccagagctggcacatagcagagccagggctgggtccccaaggttgtcagaggcaaagccttgagctccaaatcccgttcagattcagttcttcactgatgatgaggctccgggaggagagcctgatggccaggcaggcagcgtgcagggatcctcctggtgcttcagccagtcctggggctgccacttcccagagcactgccgggtgtgcagggcgtgggtgcagcgccagctgcctcaggctcatgcccactgttcggttgcaggcaccaaccccttcctcaggtcgatgcaccaccgcgtgacctccaggcagctgcagctcccggacaagcactaggttaccaccttgctcagcacctgtgcccagagcatccacaaggcctgcctctcggctgcctagccaggactgcagggatggcccgcagcctcatcggggccaaggatgcatgcctcctgtcagacacttctagatgttggcgtccatggagagcctggagttaggttagctttcctccttttctctcctgccttggggatctgccaaatgaaatcccacacttgtacagactgataggtgcgcagtggagtgtgctgcctgcagggagttggctgtcttcttggagaaggcactccatgtgacttcctccatgaagccagacacagtccccagccacgatcctcgggctgctctcaccacggcctgtccagggtccgggtgcatctcagcagcatgaggttgtgctcaggttgttgttagcgcgtcttgtgtgtgctcgacacacccctgctgctttctataggagaacacagaggacataggaaacccttcaaacacacatgggactctctgctcacagttttgggttcaggctgcactgctttgggcaagtggggcaccccctagggaagcctctgagtccagggcacaggatgcctctttcaatacttgttttttttctcatactcaggatctatmctgtagactttataacactgtacccttaagctacaccaaatttattaaaaaatattttttctttgataattaacttttctgtagcttttaaaatttataaacttttaaattttttaactttttgacttgcaataacagcttaaaatacattgtacagctagctgtataaaaatatttttctttatagcctgtaagtttttttatttgaaaaacgttctattttaattttcttgaaaactctgttaaaagctgtgacacaaacatatacattagcctaggcctacactgggtcaagatcatcagtgttactgtcttccacctccacatctgctcccattggaaggtttttagaggaaataacgtgt

SEQ ID NO: 41017 - DNA, 2017 bp, Homo sapiens
tcaggtttggaaatctgagagtcagagagacatccaggctttgccgcaagcctcaccagaacctcccggggtgtgaagagtcctgttcgggagcagggctgtgaggcggggcaggccagggctcgtccgggtcacaggtacagccttgtgtgttgcaaacgacaaggacctcccaagtgtgccaccatgtgcccacccactaccctgcccagagtccactgtggatggactggcagtggctatacagtgggcagacccagaggagctgtctgggggcccagggcaggcaggggtcattctggaaaaccaagcttctagtgctgcagggacagcctctgtgcccctccccggctcaggccccttcctcccctcttctggctcctcctgtgtggaatctctcaggttccagtggtaacctgagagataggagtctctgctcttctgtgtccctttgccccttcatcttgtgtccggtcagctttccagggtggctgtgttcagtggctgaggggtgagaaaccctacgcctcaaggacagaccccgcttttcccagaggccactagggagctcagtggagctgacaggtcctaccagtagcttgggcacacaagaccccatctgggtgatgtgtctccaaagagagtcatgttgacaggagtcagtctccctgagcccagagctggcacatagcagagccagggctgggtccccaaggttgtcagaggcaaagccttgagctccaaatcccgttcagattcagttcttcactgatgatgaggctccgggaggagagcctgatggccaggcaggcagcgtgcagggatcctcctggtgcttcagccagtcctggggctgccacttcccagagcactgccgggtgtgcagggcgtgggtgcagcgccagctgcctcaggctcatgcccactgttcggttgcaggcaccaaccccttcctcaggtcgatgcaccaccgcgtgacctccaggcagctgcagctcccggacaagcactaggttaccaccttgctcagcacctgtgcccagagcatccacaaggcctgcctctcggctgcctagccaggactgcagggatggcccgcagcctcatcggggccaaggatgcatgcctcctgtcagacacttctagatgttggcgtccatggagagcctggagttaggttagctttcctccttttctctcctgccttggggatctgccaaatgaaatcccacacttgtacagactgataggtgcgcagtggagtgtgctgcctgcagggagttggctgtcttcttggagaaggcactccatgtgacttcctccatgaagccagacacagtccccagccacgatcctcgggctgctctcaccacggcctgtccagggtccgggtgcatctcagcagcatgaggttgtgctcaggttgttgttagcgcgtcttgtgtgtgctcgacacacccctgctgctttctataggagaacacagaggacataggaaacccttcaaacacacatgggactctctgctcacagttttgggttcaggctgcactgctttgggcaagtggggcaccccctagggaagcctctgagtccagggcacaggatgcctctttcaatacttgttttttttctcatactcaggatctatactgtagactttataacactgtacccttaagctacaccaaatttattaaaaaatattttttctttgataattaacttttctgtagcttttaaaatttataaacttttaaattttttaactttttgacttgcaataacagcttaaaatacattgtacagctagctgtataaaaatatttttctttatagcctgtaagtttttttatttgaaaaacgttctattttaattttcttgaaaactctgttaaaagctgtgacrcaaacatatacattagcctaggcctacactgggtcaagatcatcagtgttactgtcttccacctccacatctgctcccattggaaggtttttagaggaaataacgtgt

SEQ ID NO: 41018 - DNA, 520 bp, Homo sapiens
aagaaagcaaagcctagaaaaattaaatgtctaagggaactaacttcacatatcaaatcagaatgaggaatataaactaggtcttctgggtttctaaaccattttcaaagagtaagtgattcacattaaaaagacatatttcagctgctctgcctatggagtagccattccgttcttttattcctttaccttcttaataaacttgaaaaaataaaaattaaaaaatactaagacatatttgtactttccagttagtaaaatcaaaaattattttccacttcttattgtagtatctaatgatagaaatcttaattcagcatttctcaatctttggtgtgaataaaastcacttgagaaatatgttaaaatgctggttctcaggccataacacagaactatgtttgtaaatttgagaaagggcccaggagaatttgcatttttaacaaaaacttagattattctgatataactgatcacagatctacactttgaaatatattgccttaaagttagcagaaaa

SEQ ID NO: 41019 - DNA, 581 bp, Homo sapiens
taagttctttattgtttccttatttttaattccagaataattccaaataatttcaaagcaaacagtattgattggtattagtttttcttttatcacataaaaatttggaaagttctcatcctcttttatcttcaaataacccctctactactttttccctacatttgtcttctaagatttcttttccaaacgtagtaatctagttaatggtgttcagtaagtttaacattccatgttttcattttgttttgcaattttattttatttcatttcactttattttatatatatattttttgagatggagtctggctctgtcgcccagactggagtgcagtggcacgatctcygctcactgcaagctctgcctcccaggttcacgccattctcctgcctcagcctcctgagtagctgggactacaggtgcccgccaccatgcccagctaatttttggtattttttagtagagacggggtttcaccgtgttagtcaggacggtctcgatctcctgacctcgtgatccgcccccctcagcctcccaaagtgctgggattacaggcgtgagccaccacgcccaacca

SEQ ID NO: 41020 - DNA, 551 bp, Homo sapiens
tttaatttttgatagtcatatcattatccctaggtattttagcttctatcttaaattctaaaatrattttgaaacaggagaaagtattctttattactatatgtattaaacatcatggttttcaaatttaactgcaaatgtatcttttcattgcttcttgatgacgcccttcaccctatccatattgtcactaccaagtggcgattacttttcaggttcacatacttattctttagaaaaatcttctctgtgccttataaagaatatgattgttggcattcaaaagccagcgaagtatacattattagcctgttgcctaactcatttctttaagaaactacactaattacccacatacttatgtttttatttcctcattatttctggagaaaacaaatactgctaacatgatatttgtaagagagaaaaaagtcttttcttgaaaagtgctgtcattgtagtactaacttatagtatcaacttctttatcaactccttatacactttttattctgagagaaataaaaaagctaaaagtgaaatgacttttt

SEQ ID NO: 41021 - DNA, 551 bp, Homo sapiens
tttaatttttgatagtcatatcattatccctaggtattttagcttctatcttaaattctaaaataattttgaaacaggagaaagtattctttattactatatgtattaaacatcatggttttcaaatttaactgcaaatgtatcttttcattgcttcttgatgacrcccttcaccctatccatattgtcactaccaagtggcgattacttttcaggttcacatacttattctttagaaaaatcttctctgtgccttataaagaatatgattgttggcattcaaaagccagcgaagtatacattattagcctgttgcctaactcatttctttaagaaactacactaattacccacatacttatgtttttatttcctcattatttctggagaaaacaaatactgctaacatgatatttgtaagagagaaaaaagtcttttcttgaaaagtgctgtcattgtagtactaacttatagtatcaacttctttatcaactccttatacactttttattctgagagaaataaaaaagctaaaagtgaaatgacttttt

SEQ ID NO: 41022 - DNA, 551 bp, Homo sapiens
tttaatttttgatagtcatatcattatccctaggtattttagcttctatcttaaattctaaaataattttgaaacaggagaaagtattctttattactatatgtattaaacatcatggttttcaaatttaactgcaaatgtatcttttcattgcttcttgatgacgcccttcaccctatccatattgtcactaccaagtggygattacttttcaggttcacatacttattctttagaaaaatcttctctgtgccttataaagaatatgattgttggcattcaaaagccagcgaagtatacattattagcctgttgcctaactcatttctttaagaaactacactaattacccacatacttatgtttttatttcctcattatttctggagaaaacaaatactgctaacatgatatttgtaagagagaaaaaagtcttttcttgaaaagtgctgtcattgtagtactaacttatagtatcaacttctttatcaactccttatacactttttattctgagagaaataaaaaagctaaaagtgaaatgacttttt

SEQ ID NO: 41023 - DNA, 551 bp, Homo sapiens
tttaatttttgatagtcatatcattatccctaggtattttagcttctatcttaaattctaaaataattttgaaacaggagaaagtattctttattactatatgtattaaacatcatggttttcaaatttaactgcaaatgtatcttttcattgcttcttgatgacgcccttcaccctatccatattgtcactaccaagtggcgattacttttcaggttcacatacttattctttagaaaaatcttctctgtgcyttataaagaatatgattgttggcattcaaaagccagcgaagtatacattattagcctgttgcctaactcatttctttaagaaactacactaattacccacatacttatgtttttatttcctcattatttctggagaaaacaaatactgctaacatgatatttgtaagagagaaaaaagtcttttcttgaaaagtgctgtcattgtagtactaacttatagtatcaacttctttatcaactccttatacactttttattctgagagaaataaaaaagctaaaagtgaaatgacttttt

SEQ ID NO: 41024 - DNA, 551 bp, Homo sapiens
tttaatttttgatagtcatatcattatccctaggtattttagcttctatcttaaattctaaaataattttgaaacaggagaaagtattctttattactatatgtattaaacatcatggttttcaaatttaactgcaaatgtatcttttcattgcttcttgatgacgcccttcaccctatccatattgtcactaccaagtggcgattacttttcaggttcacatacttattctttagaaaaatcttctctgtgccttataaagaatatgattgttggcattcaaaagccagygaagtatacattattagcctgttgcctaactcatttctttaagaaactacactaattacccacatacttatgtttttatttcctcattatttctggagaaaacaaatactgctaacatgatatttgtaagagagaaaaaagtcttttcttgaaaagtgctgtcattgtagtactaacttatagtatcaacttctttatcaactccttatacactttttattctgagagaaataaaaaagctaaaagtgaaatgacttttt

SEQ ID NO: 41025 - DNA, 780 bp, Homo sapiens
tctgctacccaaactacttggcttctggagcctggcagtcttcttgttacagaccaatctgtggatctcgcttctatcaattcacctgctaaatttctagatccttttgagtattgggatcaaagtctctactgaatgcagccattattttcattcttgccagatcccaatatcyttttattcttccaccaccagcttcttgcatgaccaacttctggcagactgcgaaattaatgagtaacctaatattaacttctaatatctttaccattgatcgaatatatgctatctgattttcatccaaaaactgttgaaaatggaaattttaatctaataaatgtatgtaatctggtacccaaatatattgttcacattgttattattttattattattattttgcttacatttttgcattcaagaatttgggagatttaagtaaaaatcaatatgactgtgtaactggatttggggcccatataatctgacagatctgagaacatttctcttgaaattaggtatgttgtctattaagagtaatcatttctggaagaacatagtttgcatctgcagacttgtctcaacagcagtgagaattgtctaagaatgaaggacatgcatttctactgatataggaaagcagaaaatttgatgcataaactagaaatgcagacaacaagactaggatgtaatttataaggtaaactgtatgcttgcactaaaggttacttaaagtctagtatctgaatgtggattttcaaccaagagaaaagtgaagctt

SEQ ID NO: 41026 - DNA, 780 bp, Homo sapiens
tctgctacccaaactacttggcttctggagcctggcagtcttcttgttacagaccaatctgtggatctcgcttctatcaattcacctgctaaatttctagatccttttgagtattgggatcaaagtctctactgaatgcagccattattttcattcttgccagatcccaatatctttttattcttccaccaccagcttcttgcatgaccaacttctggcagactgygaaattaatgagtaacctaatattaacttctaatatctttaccattgatcgaatatatgctatctgattttcatccaaaaactgttgaaaatggaaattttaatctaataaatgtatgtaatctggtacccaaatatattgttcacattgttattattttattattattattttgcttacatttttgcattcaagaatttgggagatttaagtaaaaatcaatatgactgtgtaactggatttggggcccatataatctgacagatctgagaacatttctcttgaaattaggtatgttgtctattaagagtaatcatttctggaagaacatagtttgcatctgcagacttgtctcaacagcagtgagaattgtctaagaatgaaggacatgcatttctactgatataggaaagcagaaaatttgatgcataaactagaaatgcagacaacaagactaggatgtaatttataaggtaaactgtatgcttgcactaaaggttacttaaagtctagtatctgaatgtggattttcaaccaagagaaaagtgaagctt

SEQ ID NO: 41027 - DNA, 1011 bp, Homo sapiens
attaagaggggctaacacacatttacttcatgaaataattttaaaattctttggaaggatggtccaacatcactgagagtcttaactggagtagctccaaataaagttttattttactgcgggttgctgagtagcccagtggaatcatgttctgtttgccaaggctggtaacttgattttatgcttttttccgtattttcatccttttttctttttgtacttctctctggttattttctgttgatgtaactttcagtataatgaaattatcatctgagatgatcatgtactttttagatctattttaatttttttagctctagaatttccatttgatttttttctatttctgttctatggtaataatctccattttatcactattttgaatgacgtaaccactattagtgttaactctgctttttataactccaatatcttggacatattttggtttggctttattttccgttttttttgtttgcttgtttgtttgtttgttttttgacacagtcttactctgtcgcccaaggcactggctagatctcaactcactgcaacctctgcctcttgggttcaagcaattctcatgcctcagcctcctgagtagctgggactacaggcgctttccaccacacccggataatttttttgtatatatagacgaggtttcatgttgcccagactggtctgraagtgctgagctcaggcaatctacccgccttggcctcccaaagtgctaggattacaggcgtgagccagcgcacctagccattttctgttttacaccttgatcttttgtttggcattactcattaatcttgaaatgttttaatgaatgcaagatattgtgcatgaggaaaattcaaatgtaaacattctctcaattctatcttctccctaggagcaaaggggcagatcatcacattccagtgactcctttctgaattgcaatcttacaacgtttgggctatctccagtttattttgcactccttaaatatttccttat

SEQ ID NO: 41028 - DNA, 531 bp, Homo sapiens
tgtaattatattacgtgcactggctattttggtcatttattgaaataaggtacatgggataatttaaaaactaaattcagtcagtcacttccaaaaacatccagctggtttgtgtgtgcagcaataaagtgtgaaagtgacattgcattcaaattgtagccatgtgtgacttggcttttttatttgagagaaagaaaatggctaggcccaaaggcttgtatttctctgtgtcactctgacttgcaggaataatgaattcctgcttgtgacacagtgtcttgaggaagcaaggagagaggtggtttggtgcacttccaaagttgtgtgtgagccttcaccacaagaaccctggttctgtgggaaggacacgcagagsaccttgctgaagcaggagctgggagtgccacacattcgcatgcagactcccctgagatcccgaagcacttctcaaacatgaattaacttgagcactttcactgcagggcactgtgcacagttactcattcaggtattcatcaaagattcacacag

SEQ ID NO: 41029 - DNA, 515 bp, Homo sapiens
acaaatagaagtttacttcttgccctaattcagtgtgaggtagatattcctagttgcttgacagctctcttccacatagtgattcaggaacccaggttctgtcatttctcagggctttgtcatcttctgcatcaagaatctagaaagagaatgaggatgaagagggcatatgtgcctctttaaaaccctggctcaaaagtgacatataaaaagcttctactgacaaaccattggctagaactcatttatgtgctatgcctacctgcaagggtgctagaaatgtagtctagctacatgcccaagaaaaagaaggaatagattttttggtgaacaggtaaccagctgcttagaagcagatgaatgctttattcatgtctgcgtgaatacctcctgctgcacgttgcagygtttgtggtaagtaaacattagtgaaataaaggaacacttgaatgactactgaagtcatagtaataataattataaaagcagttattgggagcagatcatacgcacca

SEQ ID NO: 41030 - DNA, 830 bp, Homo sapiens
ggatcccaaaacctgaccatctgaacttgtcttttgtctctctgggtcatgttttaagcgtgtagacctgggatgacctgactgcgtgatgctggggcacaaggtgtggaggggtggatatataatggtggtcttatcgcaggcatttaggtgaatgycagtgtctctctccagagatgaaggaactgggatatggcagtaactttgagggtggatctttttatttttatttttaatgtttgtgggtacatagtaagtgtatatatttatggggtacatgaaatgttttgataagggcatgcaatgtcaaatagtacatcatgaagaatggggtatccatcccctcaagcatttatcctttgatttacaaacaaccctattatactctttcagttattttattttatttttaatttttttgagatggagttttgctcttgttgcctaggctggattgcaatggcacggtcttggctcactgcaacctccgtctcttgggttcaagcaattcttctgcctcagcctcccaagtagctgggattacaggtgcccaccaccatgcctggctaatttttgtatttttagtagagacggggttttaccatgttggccaggctgctctcgaatgcctaacctcaggtgatccgcccacctaggcctcccaaagtgctgggattacaggcacaagccactatgcctggcctctttatttaaaaatgtacagttaagttattgttgactatagtcaccctgttgtgctatcaaatagtgggtctcatttattctttctaagtattttatttttttacctattacaccccctgagggcg

SEQ ID NO: 41031 - DNA, 1327 bp, Homo sapiens
cattgtgtgaacatcaatatgcttacacaggcccagaggctagagcctacctgacacctaggctgtgtggtatggyctacagctcctaagttataaatttgtacagcgttttcgcctactgaatactgtaagcaactgcaacacaatggtaagtatttgcgcatctaaacatagaaaaggtacagtaaaaaataccatattattataatcttatggaactcctattgtatattcagtctgtcttgcacagcccatgactgtaatagggaaaccttggagggccttacctcaagatatgttggttttggcctttatttatgtgttttattcaagaggcatttagtagctgtgtgcccttgagcaagttacttcactttcctgaatctcagtttctttatctgcaaaatggcaatagcaatatttaccttgaagggttataattgggcctaagtgaaatgatacatgcaaaacactcagttatcaagcatttattgagcttatactgtgagcacagtctggcttcaacaacaattttcctgatgatgttgaacataaaaacattcgaatgtatttaaagtatgtctgtgaaggtatgtaaacatatatactaattcaaacatttttaaatatctagatgaagtctcactgtgttgcccagggtggtctcaaactcctgggctcaagtgatcctcccacctcagcctcccaaagttctggattattggcgtgagccaccgtgcccagccaaaagatatattctggctttggagggcagctctgatttttacatactctgccccattgtctaaccctgatgtgtccttatttttaattcaaaaaccttttaccacatgtgaattactgcttaaccaaaggatagttttatataccactcttaattgtttgagtaattagctcaaactgttctgggaatatcttgaacttggtagattggatcagggaacaagaggctattgagctagcaacccagactgtggaaatgacctccgaagaattatcaagtaaaatatgtacacacacacacacacacacacacacacacacacacactagttactagttatatagaagaaagagactttagagtagtccagtctatctgaaatttactttacggctctgggtaagtctaaccatagtcctaggtttttagctttccacctataattcaatgataagagtattattgttgtgaggataacttggtaaaatgaatggagtactctatgaacccggaggggaaaaagttgtaaagatcacagcaagtttaaaaaaaattactttaaaaatttactataagaatgca

SEQ ID NO: 41032 - DNA, 925 bp, Homo sapiens
gggttattgggggtgaggacggaacaggaagtgctaggaggaaaagtactgacccctgaaacttcaagattgtctggttttcagcctctattcccagcaaaatgtggattctaggttttcttcaactgacttaagaggattttcacttctctaattttttaatgtaacttttcagtttcttagcattaagtagaaattggggtgaggtgaggaagttggtggtggttgtgtataagttaatacttcacattgtttcctggcgaatgtattgacttctaacttttgttctgatgtgattaatattttacagataaggatactttaaaaataatagcagccagacatttggaaggagcagagaaggcaatatggtgttataaggaaaggactggaaggtagagcactaacactatctagattttagtttcatttctgacagtgaagagctgtttagccttggtcgattcagtaaactccctaggcgttagttttgcaatttgaaacaaaaggtagttgggcctcatggtttctaatagtttctcagctttatatataaatgtgtgctctgccgcagttgaagttgttacaatatagtcatgctctgcctaaggaagtttcaatgatggtgatcctgtaagattatagtagagctgccctatataggtgtaccattttttatttttttatactgtgtaattactgtatctcttctacatttagttaygtttaaatacacaaatactgttacagttgcctgcagtattctgtacagttgtgtgctgtacaggtttgtagcctgagagaaataggccatactatatggcccaaggttgtagtcagctataccacgtaggtttgtgtaagtacactctagagtgttcacataatgtcagaattgcctaatgaggcatttctcagaatatat

SEQ ID NO: 41033 - DNA, 925 bp, Homo sapiens
gggttattgggggtgaggacggaacaggaagtgctaggaggaaaagtactgacccctgaaacttcaagattgtctggttttcagcctctattcccagcaaaatgtggattctaggttttcttcaactgacttaagaggattttcacttctctaattttttaatgtaacttttcagtttcttagcattaagtagaaattggggtgaggtgaggaagttggtggtggttgtgtataagttaatacttcacattgtttcctggcgaatgtattgacttctaacttttgttctgatgtgattaatattttacagataaggatactttaaaaataatagcagccagacatttggaaggagcagagaaggcaatatggtgttataaggaaaggactggaaggtagagcactaacactatctagattttagtttcatttctgacagtgaagagctgtttagccttggtcgattcagtaaactccctaggcgttagttttgcaatttgaaacaaaaggtagttgggcctcatggtttctaatagtttctcagctttatatataaatgtgtgctctgccgcagttgaagttgttacaatatagtcatgctctgcctaaggaagtttcaatgatggtgatcctgtaagattatagtagagctgccctatataggtgtaccattttttatttttttatactgtgtaattactgtatctcttctacatttagttatgtttaaatacacaaatactgttacagttgcctgcagtattctgtacagttgtgtgctgtacaggtttgtagcctgagagaaataggccatactatatggcccaaggttgtagtcagctataccacgtaggtttgtgtaagtacactctagagtgttcacataatgtcaraattgcctaatgaggcatttctcagaatatat

SEQ ID NO: 41034 - DNA, 639 bp, Homo sapiens
ttcctctgtctctccacatttgctctgtcctctgatcagaatcccctctgccctcccttgagtggctactcactcaagacctctgtcaagtgtccaagaattgcctgggtagaagtgcagagatgaatttcgggaaggatttacagctgcccacagtgcctatttccctttccaagtatgatttcttaaatgtgcctattttggtttaacttcttattttgagttttttggatacaactagaacaagcacaataaataatcatctatccaccgtctaaatacaattgttaggccaggcacggtgactcacacctgtaatcccaacactttgagaggccgagatgggcaactcacgaggtcaggagttcgagaccagcctggccaacatggtgaaaccccaactctattaaaaatacaaaaattagctgggtgtggtggcccaggcctgtaatcccagctactcrggaggctgaggcatgagaattgcttgagcccgggaggcagaggttgcagtgagctgagaacatgccattgtagtccagcctgggcaacagagcgagactccttctcaaataaataaataaataaataaagttgttgatctttcaccatatcatttaacatgtataaagataacac

SEQ ID NO: 41035 - DNA, 639 bp, Homo sapiens
ttcctctgtctctccacatttgctctgtcctctgatcagaatcccctctgccctcccttgagtggctactcactcaagacctctgtcaagtgtccaagaattgcctgggtagaagtgcagagatgaatttcgggaaggatttacagctgcccacagtgcctatttccctttccaagtatgatttcttaaatgtgcctattttggtttaacttcttattttgagttttttggatacaactagaacaagcacaataaataatcatctatccaccgtctaaatacaattgttaggccaggcacggtgactcacacctgtaatcccaacactttgagaggccgagatgggcaactcacgaggtcaggagttcgagaccagcctggccaacatggtgaaaccccaactctattaaaaatacaaaaattagctgggtgtggtggcccaggcctgtaatcccagctactcgggaggctgaggcatgagaattgcttgagcccgggaggcagaggttgcagtgagctragaacatgccattgtagtccagcctgggcaacagagcgagactccttctcaaataaataaataaataaataaagttgttgatctttcaccatatcatttaacatgtataaagataacac

SEQ ID NO: 41036 - DNA, 934 bp, Homo sapiens
actggcctgcaacaggcatctcttttgagctactgtaaaatctcaataaggaattaaaaactgaccccatccagaaaaccctctttattgcctctttcttgtcacttctaacactctcatgcgtgtaacaaatgacttctatatgtcactctcaaatggtctggacccaaaacaatactggaaaaaaatataaaaaggcttttaagaatagagaatcaaaaagaactattttaaaaggtaacaaaaatcatactctctctmtatatatgtatatacacacacatatatagtatgttttctattatagtatatatattatatataaatatataaatttatatatggtatgttaccttttatatatatatatataaatcactatagtgctcttgtatcatttgggttattaaagaaactgtaagaaaaacatgaaaactatctagtggacttgaaaacacagaaataacttcatcttagagaaagcacttgtagttccagctattcaggaggctgaggcaggaggactacttgagtccaagagtttgaggccagattgagaaacatatcaagacctcatctcaaaagaaaagagaaaaagaaagaaagtaaagaagaaagaatgaaagaaagagagagaaagaaagaaattcatcttaatccttaaaatcaacaaaaaaactatgaaccaacacagcagacaggttctgtctatcaacaatactgtaaagtcaatgtgtatattcaatactacataataacaattacactggtttgagtttctccaacatgaggtttcttctcttcttatataacattataatccaactttagaaaaataataaaacataggcaatgaagaatattttaaaactatacaatattaacacctaagtacaaccaccattaaaactttgaaagagaaagaaagagagag

SEQ ID NO: 41037 - DNA, 645 bp, Homo sapiens
agactgtggtgacatacttaagcagcaagtaaattctgccctaaataaatgctcattctctctaggagaggtcaagagtggcttgaaggtttggctggtaaggcatgttagcccctcaggggaatatctcccaatgctgagggagtttttggagtgagatgggccagggaaagaaggtacctttataatttcaaagcaaactatgggatatgcaggagccttgatcagtttaagcttgaaaccaaataaattggtcaccccatggttttcttttgaagttctagtatgcttgaaatgaaccccaaaagccagtcttcaatggctccttcatctacagagccaaaaaactgcttgtggctcaagcttgcaggagctgggcaaggtaagacagaggcaaggaagaaggtgacaggagggtttatcagatggcgattaaaaaatttatttacctctagcctcttagcctccctctaaaaaaaaattatctggaatacactggcaaaaaayatttttttcttaccaatacctccttgaccctgtggttcaggaatccacagtgattctccagttgctcccgcaccctctgaccatgttggcactcagaatcttgaggccgggaggggcgctggctgtcatcttggctaa

SEQ ID NO: 41038 - DNA, 645 bp, Homo sapiens
agactgtggtgacatacttaagcagcaagtaaattctgccctaaataaatgctcattctctctaggagaggtcaagagtggcttgaaggtttggctggtaaggcatgttagcccctcaggggaatatctcccaatgctgagggagtttttggagtgagatgggccagggaaagaaggtacctttataatttcaaagcaaactatgggatatgcaggagccttgatcagtttaagcttgaaaccaaataaattggtcaccccatggttttcttttgaagttctagtatgcttgaaatgaaccccaaaagccagtcttcaatggctccttcatctacagagccaaaaaactgcttgtggctcaagcttgcaggagctgggcaaggtaagacagaggcaaggaagaaggtgacaggagggtttatcagatggcgattaaaaaatttatttacctctagcctcttagcctccctctaaaaaaaaattatctggaatacactggcaaaaaatatttttttcttaccaatacctccttgaccytgtggttcaggaatccacagtgattctccagttgctcccgcaccctctgaccatgttggcactcagaatcttgaggccgggaggggcgctggctgtcatcttggctaa

SEQ ID NO: 41039 - DNA, 645 bp, Homo sapiens
agactgtggtgacatacttaagcagcaagtaaattctgccctaaataaatgctcattctctctaggagaggtcaagagtggcttgaaggtttggctggtaaggcatgttagcccctcaggggaatatctcccaatgctgagggagtttttggagtgagatgggccagggaaagaaggtacctttataatttcaaagcaaactatgggatatgcaggagccttgatcagtttaagcttgaaaccaaataaattggtcaccccatggttttcttttgaagttctagtatgcttgaaatgaaccccaaaagccagtcttcaatggctccttcatctacagagccaaaaaactgcttgtggctcaagcttgcaggagctgggcaaggtaagacagaggcaaggaagaaggtgacaggagggtttatcagatggcgattaaaaaatttatttacctctagcctcttagcctccctctaaaaaaaaattatctggaatacactggcaaaaaatatttttttcttaccaatacctccttgacccygtggttcaggaatccacagtgattctccagttgctcccgcaccctctgaccatgttggcactcagaatcttgaggccgggaggggcgctggctgtcatcttggctaa

SEQ ID NO: 41040 - DNA, 635 bp, Homo sapiens
cagctgggtcagttgagggggaaaaacacagatatctaaacaagggattataattgatggtgacaagtaactcagatttgtcttttgtatgctttgtttggccatttgggatttgagtagggaccaggctttcccagaataggcttttcaaaatgaaacttggcttttcaaaatgaaacttatcttttcatccaaataagatcttctagacatttctttgaaaatataagcattgttgaatgatgtattttagacactgtcctataaaaatacacgttccctttttttgaattgcacattaactttattatttaagaaaaactaatgcccattcttatttctctcttttagtactgtcatctgcattataacggactgtgatgggatcacatgagcaaattttcagctctcaaaggcaaaggacactcctttytaattgcatcaccttctcatcagattgaaaaaaaaaaagcactgaaaaccaattactgaaaaaaaattgacagctagtgttttttaccatccgtcattacccaaagacttgggaactaaaatgttccccagggtgatatgctgattttcattgtgcacatggactgaatcacatagattctcctccgtcagtaaccgtgcga

SEQ ID NO: 41041 - DNA, 1584 bp, Homo sapiens
ggggaagggaacacaaagtccgttttggcctatagtttcagtatcttccccgcaaaacagtttacggaattggctagtaggcagacagatgtaagctgcaccttctttcatttctaccttcttgtcaaggggctaatgaactgtaaaacagccccaactagacagcaggaggggtaaggaacaaaaagaacttggtaataaaccatctacataattggttcttgaaagaaaatcaagcttaaatattaatatttaaggctgttagtagccctcaacttccacaattgcaagacacatcagctacttagtatactattttattatagtcaaataccacctcatttgaaatagaggcctagattgatgtttcagtcagagttatccgtataatctctaactaaatccgcctaattggatcatctgcaatggctcctttggccattagtcttaattaacgtggcaccatggttactgcacatgctcactggctttaaagtagcagctaacctgatcatctatcagcctctttatgaaacgattcacttgtcaagtttctgtatgcgcatgggtctctccaaatgccaaccacacatcagtgatgtttgtaaactccaggattttttgtttcattttgtttttttgagacagggtcttgctctgttgcccaagcaggagtgcatggcacgaactcagctcactcccacctcagcctcctgggtaaactccagttttaataatgcttaagtcatttcatgagctacctgtggccacccaggtcccagagctggcatgtcacagaaatggactaaacagagatgaggttgaagaaacaactgaaggtaatcctggcaatgaagaggtggatcttagggtcttcctgcctccaactctgcactgctcttccttctctggaaccctctctccttgtgtccaagtgtgctcacatggtgcccttctccagttctctccaagtacttcttcctcctataacaacactccctctcctgtggagtgtctacatcaggtgtgggaaggaaagcagcccagttacattattcacaattcagtgaataatattaacaatggaaaagatgagcttgttgatacaattggatttataattgatagcattcagctaaagtaattttgcaaaggaagttatttcaggcagaattagaaaataatttttgaaaagtagggggatataaaaaaataaatgtccattacacacacacacagacacacacacacacacacggccatgatatagaatactgtgcagcaatttttttttttttttggagatggagtcttgctctgtcgcccaggctggagcatagtggcacgatctaggttcactgcaagctctgcgatctcggctcactgcaagctccgcctcccaggttcaagtcattctcctgcctcagccttccgagtagctggractacaggcgcccgccaccatgctcggctaattttttgtatttttagtagagacggggtttcgccatgttaaccaggatggtcttgatctcctgacctcatggtccgcccacctcggcctcccaaagtgctgagattact

SEQ ID NO: 41042 - DNA, 1111 bp, Homo sapiens
tctgtcaagtgacctggaatgcccagtcagctctggaaccagatcttggatggaccttgttgctttgttgagtttgtgtctactttccctggatccttccttagttctgtgtatctatagaaagacaaggagatttcctgtccttctgatttgtacagtatgtcctccaagttctttccctcttatcygtggcttctatcatccattcagactttgtttgcaggcaggtttgtcctctgaggccaccacccctacttttgaacatcaaccttagtcaatgacattccctaagcagtaggttccaagcattttgaacatacacccccaccccatgctctattttattcattatttatttgggacctaataaattatctacacaggccattatcattacttaatagtccaaggcgcaaaatatactttgagtgtaagatatatgataacaattatagatgtagatttttcatccctgtgtcctagttagatttttataattttgaagggttttttgtttctttgttttggccagctgcttggcacatcagatcatcagtctttctttcttgtaatggtgtctggcaaagagcttttgggaaggggagcagaagtgctacctttgctgtttttgtcagtttggttttttgggtggcctgtgttattagtctatctttaacccatggtttcttcagaggaggctttttaagccatgtgtccatcttgtgaaggttaaagctagataatacctcactgataagtccatttaacccggtacaagtatccaggtccactagactctctgcccttgaatttgagaacttgtagaaaaggccaaagattggcccattcagttagggttaaaatcgtgtcacccagccaggaaaaaatgtaaaggattttggagctgccagagaaggatagtttcacagttgattccatatctacaccatttctagtttagagaactttttaaaaagggaagggaagttacagatacaaaatatgtccaaatgtcttaaatacttacacaggtccatggcccaggtctatgacctaactttctatgttaccaaaaaaacacaaaaaaacagcaaaaagcagaacatgtctt

SEQ ID NO: 41043 - DNA, 527 bp, Homo sapiens
tctgtaaaatctccagtaactgccactaaagaaaatgcagttaccattggcttcctgacagggattcaacccgtattccaagggaaacagaccaggatttcaaaaggccaattgcaagaatgttacagccaaggcttctcagttgcctgtgaaagtataattattatcatcagaaaagatccttctaattgtcaccaaggacttgtccttagtgctcagcractgcctcggactagaagcgttgaggtgtaacagggagggccagtgttctggcctttgattcacaatgcatcctcctggtatcccaacgtttttgcttacaaagttgggttatcatcccttggagatactttaataccttagagggagtataatcaaaaatttgctttagtatagttcttggggacatggtactgggtacaatgtattgaggcttcatagcaggcttcaagccctctctcttcagggttcaaggacagaaaggctgaacacactggccacgctacatgatgatctgaaacttggcg

SEQ ID NO: 41044 - DNA, 594 bp, Homo sapiens
gtctgttttctttactcttgtttctgcttttctcaagaagaaggggtctctcctcatagccatgacagctgtgaaacagttggtcacacctgaagtcagcacatctcagagtctcacccaatgcccagagagtgtggttgcccacagtgtgtgctacctggctactgctgctgattattcagaggccaaaagctctttagtcagcccgtgatgaatcctgccaggactgagttcttccactcaaggcarcaggttcccttctggcccaggttttgtctagaaatgtcaaccaggagttagggcctggaatgagtgtctcaggactctgctcagtgttctatgctcattctcatttctctaactagaattttccaagttgtatctaaatgattgaagctattatctgactggttatataaaaatgtcatgaggttacagctaagaattaagttataatgatttagctctttaatgtagacattcaccttcctatggcaatgatatgtgccataaggatgctctttggactacttctctgttctctgtatagactgggaagggtgatattttatgttatagtagtggattctgaaa

SEQ ID NO: 41045 - DNA, 584 bp, Homo sapiens
acttaaaactagaggcagaatggaccaatacaaaaggcagagacatttgaatatttcacatttgtttctggggctgatacctcaaatggcctgggttggaggtaaagttagtcatctaatgtaccaaatggtgccatacttcacatcacttgacatattcctccaaattgacttcaaagtgtgattttacatttaagccccattttccttctgacctctcagctatgctgaaatyaactaatgtcttatttacctataaatgttatttctgcctacctgtatttacccaaattctatttattttaaaaaatcgagtttaaaactaaactcttctccctcagttctcatctttataaaagtttctctgtcagcaagttctggtaatctaatcttggtgatatttagctacatattatcctgctttcctgtgtaactgtttcataggtgcgctacttgcatctctcaaatcagttaaccattgatgtttaataaatgactccaaaattcaatggctaaaaactatgaccatttacttagctcacgattctgctgagcagtttgtctggcctggttaggtactgctg

SEQ ID NO: 41046 - DNA, 544 bp, Homo sapiens
attttggtgaaattggtttttaattctgccacttaatgtttttattatatgaaccttggtgatatgttactgtattaagcatcaccagacacctattacttggtcaaacatttgaaaattttgtcttttgtgaagtttagatgcagagaaaagggtttaatgtgaaggttaaatggatgtggatcagctagtatattgttgatgaattaactaaatactttaaaggaatgatgaacaatccagttgtcctcagttcttccttacctrtaacttgcctgaatggccttttccccaccttgttctcaagattgtctcggggccttagagcagcattgtccaatagaaatataatgtgagccacatgtgtaatttcaaattttctagtaatcacattttaaaaagtgggaaaaaaaaaactaggtaaaagtaaatgtaatttcttatttaactcagtatatccaaaatatcctttaaacatgtagtatatattagaaattatgagtttttttattctcttttcattcttagtcatggaaatccagtg

SEQ ID NO: 41047 - DNA, 554 bp, Homo sapiens
accttattcctacatgctagcccagcatagctacacaataagaaccaagtcagacctgtcctggtcaacacctgggaaagccacactctgaaccagcagcagaaaagatacacaatgatgtaacccaaatgtttaaaaaatatagcaaaataacacactataaactattcctcctattttatcatgaatgatgagggaaaatgtgggaggacaaaataaataatggagagtgacagagaccaaaggagagccatgcagaaagaaacaaacaagaagtcacagagaaaaaagagcaaaagcaaagacagaatatttaaccagaaaggcaggctcatttggagatgcccacacaraaagcaaaatgtggaaatgaaaaatggtcacagagcagcatccctatcttgaggcttacgggcataaataaaaatattaaagtgcacttgctgattcttggaacaagaagaatacatccagcccattcttttaacaaataccaaaaatgcttctaacacatctctgaaatactctaacaataatcacactggaaacaactc

SEQ ID NO: 41048 - DNA, 543 bp, Homo sapiens
gctttttttttttttaagaaccatttcctttcagttttagccatataactgtgtctgcaagcagtttgtactcagtttgtcaagagagcagctttctgtttkgattatataccttcatctctgaaaaaagacatgctagttaaatttcaagatgttttacttagaagatgacaaggaagatgaggtggtttgtaaaggctcattaagtaaaactcaagatgtttaccatgacaagtcccctcctggtatcttggtgagttacatctcccaatgtccctgctcccttcgctgcttgctcaatctggacactactgagagacaaggggatggcatccaccaaaagaaaaagactaatgccctttcttaggaaaatgtaatgttgtagtgaattttattaacttctaagtgttatgttgaacagaaatctttggctacctgccctcctgcatttactatgccatctttctgctatctctattcgttgttatttaacaaaagacttttttttcctaggaaaaaaatgaagttgctgttttaaactga

SEQ ID NO: 41049 - DNA, 543 bp, Homo sapiens
gctttttttttttttaagaaccatttcctttcagttttagccatataactgtgtctgcaagcagtttgtactcagtttgtcaagagagcagctttctgtttggattatataccttcatctctgaaaaaagacatgctagttaaatttcaagatgttttacttagaagatgacaaggaagatgaggtggtttgtaaaggctcattaagtaaaactcaagatgtttaccatgacaagtcccctcctggtatcttggtgagttacatctcccaatgtccctgctcccttcgctgcttgctcaatctggacactactgagagacaaggggatggcatccaccaaaagaaaaagactaatgccctttcttaggaaaatgtaatgttgtagtgaattttattaacttctaagtgttatgttgaacagaaatctttggctacctgccctcctgcatttactatgccatctttctgctatctctattygttgttatttaacaaaagacttttttttcctaggaaaaaaatgaagttgctgttttaaactga

SEQ ID NO: 41050 - DNA, 611 bp, Homo sapiens
tcccgtatttttcatgaatgaacctacattcttaagcaccaaaacttgcttctattgcaggcagtccaaggaccactctttgagaaatactgacctagagtgtgctccttgccagttttcctcatttagtggggaaaaagaagttagatataaaaacctccctgactgcgacttcaaacagtggaggtgatggggttgctctgatttagaaagacagagtttgtgatctacggggaattgactagaacctcagatcctccaaagcacacctcatcctggctaaatctcattctctcaggagggagtcctctgaggyccaacaccagctcagaacgattcaaaaactcccctgtactttttctctgtaaaagacaaaggacaggacaattcccaaggctcagagcctttgtgtagtcagttttctgttgaactgattttggaagtagcacaaagtagcaagagctcttacttttacatggaactatgcttccctaacctggctcatcttcataattagttcttaagctttaaaacagtcagaaatttgcattttttaaaaccacccagaatgattttcatgtacacaaacttttgaagcagtgtggtagtaa

SEQ ID NO: 41051 - DNA, 611 bp, Homo sapiens
tcccgtatttttcatgaatgaacctacattcttaagcaccaaaacttgcttctattgcaggcagtccaaggaccactctttgagaaatactgacctagagtgtgctccttgccagttttcctcatttagtggggaaaaagaagttagatataaaaacctccctgactgcgacttcaaacagtggaggtgatggggttgctctgatttagaaagacagagtttgtgatctacggggaattgactagaacctcagatcctccaaagcacacctcatcctggctaaatctcattctctcaggagggagtcctctgaggcccaacaccagctcagaacrattcaaaaactcccctgtactttttctctgtaaaagacaaaggacaggacaattcccaaggctcagagcctttgtgtagtcagttttctgttgaactgattttggaagtagcacaaagtagcaagagctcttacttttacatggaactatgcttccctaacctggctcatcttcataattagttcttaagctttaaaacagtcagaaatttgcattttttaaaaccacccagaatgattttcatgtacacaaacttttgaagcagtgtggtagtaa

SEQ ID NO: 41052 - DNA, 2308 bp, Homo sapiens
gaaacgtattcttttgagaaaaacttgaaatgcttacacatcttaagttttattaggatcagccttgtaatgctcccagaagtgcttcgttcctgaaaatatttttaccaactaaaattcttccaagatctaccaaaaagagcactgaagtaatgcttttgtcttagaattttgttgacctgtgtcctttgtcagacataatagagcaacatttagaattcctgaacaacctacagcttgggaaattaaaacaatttctaaaacatatgccaagttccctactaaattgtacaagaatcattattctaaaggaatttgcaaacgaatgttgtaagccaattgcagaaatattagtacataccttgtttttcctgatggtgtgaaaggctgtatccactgtgtactgatgtgtttgacaggtatgaatggctgccagcctatctctaagccagcagcttgctggcttggtaagcaggcatgtcacaacacacgtaagctagggccttgcagtcgttttcaggaggttggtgttttgctttttctttaggttaccatggaataattgatgctgccacctggaggagctcttccatgaaatttccttaaaatagaatctgcttaaataatatagccaacagaaattaggactttaaaaaaagaaaacaaaatgtaaacatctgtgaaaattcaggttgttttctgaaataagcactgagctaaaaggtagacagactgggcccattatagattgtagaacagtagcctcttcatcgctcagggcgttggtttcttaatctataaagtgagagggtcgaaggggcctttaaaaggcccctttcagctcagcacctagactctgacattatttgagggaagctatttacggtcattaacagcatatgaaacaacgtgttcaaaatctaagagaaaaagaaaaggaaatcaattgcttttgcagttgtgaggactaggaattacgtggcgttgcggaatttgcagctttcctatagcatattctcctcagctcctaccacttagaaaagaaattatttttccagagaagataaatgcataaaataggtttctgttttgttttgacaaatggcatttcgtttaaattctttacttttcaagaattttgttgataatagaattaaggttaattgaggctccttgaaggaggcagatggaagagggaatcattctttaaagcagattgctatagcacagctggaagaaactcatttctggaaatcggagagctttaaactatacacggctttaaaaaactgtacctagtaagtctccctcccttcctaaagatgggcgttgggcttaaatataacatagaagccttgtttgtccttctagaggatggatggatgtctttgtgtgagagagagattaaaaacattgcacctaggcatatgtagccttttggagggaagagactctgcatattggatggtgttctagcataatcttgagtgcaaatatatgaaacatgccaccgatggaaatatttcaaatacccagcaatagcaaaaatggaggctcaatatcacaccatcagaaaggagtctcaacttttaatccactaaagcagacttacttaaaagtgatatctgggagctaaatccagggagcctaagacttttcacagatagcacctactgctctgatgatctgcatacttcatctcctgatcggtaattggcttctagagaaccctccatgttcttctggggtgagtgtagacactcagggtgacatggatcttacagatgctccctgccttttctctccttcgtttctgacacagaacacagagagaagtattgcagggctccatatgtcttacgggaaatgctctgtatccaaatgccagctgagatcattagccacgctgaaattcgttgwctcgtactgtgctaaggttgctgctagacgttgttaacagagttagtggtctttggttatggtggttagcagccccacttatctgttccatactaccagtgaatagtttaaaattcatgttgcacctataatttatcccacataaataattcaggctatttattttggcattcaattgatttttttctcactttaaaaaactgaggtatggagactggtgctagcaacacgggattggctaacgcatcctcttgctgttcccggtgtttgggccttgcctgtgacagtgggaaaaaaaatggccttgctgtgctacaaccggagctgcggtcagcgcttcgatcctgagaccaattccgacgatgcttgcacatatcacccaggcgtt

SEQ ID NO: 41053 - DNA, 1179 bp, Homo sapiens
tggaacccctctatggttagtctgcagaccccaagtaaaaaacctctggttctaaaccacactgctatttgaaagatgagagcatacaggtattgaaaaagtcaattacttcccagccaaagtagttaaaacatgctcaatctagccttacaccacacagtaacagcccttaaaatgaagcagtacagactgtacataaatgtacgcctatcattcaagaacttgcccagtgcctgtaatatctcaggtaccaatactgcctttagtcctgggtcctgcactttagaaggctctgtgtatcataaacccaaaatacaaaggcagtaagtgtttttcttcttcatttcagacctctaggaaagttttttgaagacaatttagctaaaggaacaggtggttatcacaagccaagctgccccagacctgtgccctggtcagtgtagatgtgtgcagcagacctatggtcaggctccctagggcagctggcaaaggacaaggcttctgcagggccactggtggccatggaggccgggccatgggggtggtgactggatttatagctttaaaaaaattttttaatgatatatcatagttggggaggacatataataatattttatacatgtatacaatgtgtaatgctcaaatcagggtaaatgggatatccatcccctcgaacatttatcttttctttggatttacagcttttaatagtttagatacaggttttctcagcctattgacatttttggtcagataattctttgcttgggaggtgaggagtgtagcagccctggcctccaaccaccagatgccagtagcaccctccccagtggtgacagccaaaaaaatgtctccggttatttctgaatgtccccggcggsgggtgggggcggtgtgtgggcaaaattgtctgcagctgagaaccactggtttaaacagatggtatatggccctgtattgataagcctgttctgactgggtccccacaaacatgttaggggtgggccggcaagcacatgacttggctgaatttagacagggagttttataccacagctctcccacttgatacagacctccaggatggaaccttcttcagtttcaggtcaacctaagcttcacaggcccccttcatatagcagggttcagagcacctgtcaggtaggactgctgtga

SEQ ID NO: 41054 - DNA, 1268 bp, Homo sapiens
ctccctaagaaatgggggaacccatgagggctccccatccccaacagaatccattcccaagtccttaatgtggctcacacgtcccttcctgaccttctagctcctcccgcctcttgagcttcatctcctaaaactcccacttctacttccctcccattcctcacacaaagacagaacaccagcactagtcaggctaaattgacggcaatcccttgagaacaacatgccccaagttttggaatttgcaaatgattttccttgtccttgaacttttttctcactttctgtctgcttggtaatgtattcatcctctaagactcagtctactctgaaaaggtttttgtgaccccgcatatattggaaagaagaaagggaaaaaggaagaatatttctcttgaatgtactccatgaaaaggtaacacataaaaatataaattaccaagtggtgttgctggagaacacgcaagctccagcgtcaggcagacagattgatgaaatctgtggtcctccgcagattcctctttctctcaatctcttcaatagtaaaataaagaaaacaacccctgtctcttgggattgttgtgacataggccaagcacaggccagtcgcacagatgatgcttattataagttttttccttctcccttcctcgcccaaagcagcagcattattaaggattaacacttgtataaatwttagaatttacaggtactttgtaaacaattgtcatatttcatctttcaatcaaccctacaaaataggttgcatttattatctgcagaaagagaaattgaggtcagagggaagttgattgtgaagtctgaaacctggctaggtccactgaggccaaattctataatgccattttaaactcattccattgacctgaaagaccctgatatttccacacacacacaacatttttaacgttgtttttaagtacttaaatgttgtcaaaaacttattattaatcatgctctgttttcacatttcaacagaacaataagctaactgggatcaaaatctcagaaacgaattacattagatattaacaattattttaggcctgtatggtgctgtccttgttagttttcaattttaaaactttggtgagacatttgaagttctgaactgtgggtaaaatttaatgagaccctcttgtttgataaggaagtatgtgtcatgctaagaataagcaataagtcattgaaaggggaaaaaactatgcacatatatttatgtagattttatcagatggtttcatgca

SEQ ID NO: 41055 - DNA, 535 bp, Homo sapiens
aattgcttgctctggaaataatttttcattggaagtaaacatggtaatgttagatatcaattctgactatgtatagccttgaacatgtttataacctcttttctccaagtgggaaacagtaatgtgtgtgcatggtcatgcgggcaaagtcaatgagctcaaatattcacacacagaaacaagtcaagcaattattgtaggttcagaaacagaattccaatgcgtccaattgtaatgcccagaataaaatttctgccagtcactcaattattttatacaatgtactcaaatatctggctgatatttgttctgtttttgtattgttttaacagaattttttttttagagcagttttaggttcacagaaaaattgagctgaaagtatagcgttcccatagtcttctactcccctagccacacacacaattttccccattatgataattcaccactagcgtgagacatygttatgattgatgaacctactacattgacacatcattatcacccgaagtacatagtttacattaaggtt

SEQ ID NO: 41056 - DNA, 1881 bp, Homo sapiens
tcagcctgaagaacctggtagggatcatggagggaacttgtatgaaagtacaaggtctctctgtgattgtcctcattttcacagtagtccacactcagcctccagcaactctccagataactagcaaggcaaggatgagtagctcctgcccaagggaagcaggtttcagctgtatctcactgaatgtccctgtccctctagatttcaaggtgatagtttggcccgaaacctcagttctttgatgggtccaagaaaagtcattgattatcgggttgttccattttctcttgttgtaaggacaggggtgatgaactccaagctctttaacatgttggagctgaaactggaagtggaacaactggtttcataatgtttggcacattttatgactttgtttcacttttcctagaattgcaggtttcccagcatcagttaactgtcctagcatttcttttcaaatgaactacaatctggaaatagcgatgcttcacatatcaacttagaaacatatttttttccaaraagtatcaaagttgtcaaaaaaaattaagctgtctcaaccatcctaagaactgacaagaaaaagagaattttaattttatttcttatggatcaaatattctagagtaaatgcttgaaagaatggtgttcagttaagaaaatcaattccattgtagcattgtgaattctaggaggcattgtcattctttcaacattctacaggaacatgaggcttctacttgactgaaataagggtttgaactctggtttggggttttagttctcgtttctttattttatccacctcatctccaactttttcatcctagttcattctcttctgcagctttgtgttccatttttatatcttctttcaagttatgaaagataccagtcctttgaaatgttcccttaagccttgcttatagcctttttaggagtatgttcttattaagttttccagatgctctttccatttccttttgttacaccgtttttgtttttcatattctcttcattgctttcttcatttttgctgctagtttctttactgatcttcaaagaaggcaggatttgttcagacagagaagccacttatcgccacagaggattttggatccttttggccctgccttctgtctgcctatagaatggaagaactgtttcttcagatctcaactctgaaaacatgtctgaggtcagactgcctagatctgaatgctagctgcgatagcatgttctaggtaagctccttactgtgtttgtgcctcactttcctcaattgtgaaatgaagataatcgttaactctacatctaagattgcttacaggattaaatggggtaaggcatgttatacatgtagaatcatgcctggcacatagtaagtactcaaaacacgttagctctccttataatccagaaacaagatccagggttgttaaagcagacaccctgggcactgcaggtgataagttgtgttgtttgtaccttggggaccacgccacacttggtatgactcactcaccttgctatggatggaactaagggtccagttctcttgttctaacaaagtttcacctactgctcctctgttgtactgggacagcagagtttccttccatactacctggctgatttatagtcttcaaatagagagtaacttataaaatcaatatttcacatttcatctaccagtgctcttcctacctcggtctcacatatgaagattttatcacacaggatataactgtctcccactgcctcttttcaactacgtttacgattttaagagtggacacttatctttcttttttaaacgtgttctcagactcactaaaataatgactgggctaggtgccatgttgcgtacctctagtccca

SEQ ID NO: 41057 - DNA, 1306 bp, Homo sapiens
gcatattttttccttcaaagtctgttttctactcaagctgattaactaactttgcccataaaaattaactgattttgcccataaaaaccaagataggttgtattgtctttactcacggtgccaagaagtgtaaattatgttgccagaaataaatcacaacacaaaaatgaatgaactcaatagcaatcagcatcatatataataggacccaaatgaactgtttgttcatttcctaccactttgattccatggatcttagttggggggactgagttcttgagaagaatactctttaaagaaggatttccacaggttattggctaaaaaagcaggggctcatgtaaacgatgcttttttctttttctttttctttttttggagggaggagagaatgaatttcccaaaagttccatccaggatttatcatgcactttctttttaataatagaggaacttaatgtcattaacagctatgacctgtaaattttgtttgagactactgcatttgctgaaattaaatttttacttccaaatgtgtaaacacatctcagctagggcttttatataatcgtactcttgctctgcttgcttactggtatttatgactgcttgcttctgttaattggctaatgtttgtaaagtgcctttgagatgaaaagctaatgatctctgtagggaggagggtgtgggtggcttcccaacagctccctaagggtgtctcttggggctttgactgccaaggcttgcttgtgggctcagggataatgaggaatcccttaagacttcaatgtccctggttctcgaagtcttttccatttggttctcctggcttttacaaagtcactccttggaggaagtaaaaatcatcattcctgcaaagctctaagactttttttacccacttaccactagagtttgctctaacgcagtaggacagcatctctttgctattacaaaagaactaatagtaatagaaacacataaacaagtccaaaaratgttgctcttcttattagagacatatgttttattattttatcttttttttctgtcgaatcaggttaaagggagctatgtttttatttatttatttttgtgttttgaaaggtaggacatacttttgttaaaagaggttgactaagaaaactgtaattgcaaaccaataaaattttcacccatttatacaacaaacatatattagaagggaaaataatttttttttaaaaaaagtaatgtattatcatttagataaagctactgattttttttgtcactgtatagaaatgatatttagaattttcatgca

SEQ ID NO: 41058 - DNA, 1306 bp, Homo sapiens
gcatattttttccttcaaagtctgttttctactcaagctgattaactaactttgcccataaaaattaactgattttgcccataaaaaccaagataggttgtattgtctttactcacggtgccaagaagtgtaaattatgttgccagaaataaatcacaacacaaaaatgaatgaactcaatagcaatcagcatcatatataataggacccaaatgaactgtttgttcatttcctaccactttgattccatggatcttagttggggggactgagttcttgagaagaatactctttaaagaaggatttccacaggttattggctaaaaaagcaggggctcatgtaaacgatgcttttttctttttctttttctttttttggagggaggagagaatgaatttcccaaaagttccatccaggatttatcatgcactttctttttaataatagaggaacttaatgtcattaacagctatgacctgtaaattttgtttgagactactgcatttgctgaaattaaatttttacttccaaatgtgtaaacacatctcagctagggcttttatataatcgtactcttgctctgcttgcttactggtatttatgactgcttgcttctgttaattggctaatgtttgtaaagtgcctttgagatgaaaagctaatgatctctgtagggaggagggtgtgggtggcttcccaacagctccctaagggtgtctcttggggctttgactgccaaggcttgcttgtgggctcagggataatgaggaatcccttaagacttcaatgtccctggttctcgaagtcttttccatttggttctcctggcttttacaaagtcactccttggaggaagtaaaaatcatcattcctgcaaagctctaagactttttttacccacttaccactagagtttgctctaacgcagtaggacagcatctctttgctattacaaaagaactaatagtaatagaaacacataaacaagtccaaaagatgttgctcttcttattagagacatatgttttattattttatcttttttttctgtcgaatcaggttaaagggagctatgtttttatttatttatttttgtgttttgaaaggtaggacatacttttgttaaaagaggttgactaagaaaactgtaattgcaaaccaataaaattttcacccatttatacaacaaacatatattagaagggaaaataatttttttttwaaaaaagtaatgtattatcatttagataaagctactgattttttttgtcactgtatagaaatgatatttagaattttcatgca

SEQ ID NO: 41059 - DNA, 1240 bp, Homo sapiens
tgtgggaccaggttcagggtcacatttgcagttctcaactgaagagaacattacagcagaacatgtcccaaaaaggaacctgagttgggtggtaggggatggcacatgatgtggctcagttcactcatggcaggagccgtgactgcccggcagtaggaatggcctttttatattaaactttgaaccccagcatgtcctaagaatgggtaagtgggaagcattgacacagttcaccctgagttactcctggggagaattttatagccaagtcagccttcagttcaaaccaaggagggggagaggggataaactggggatgagaggagaaagcagggaagtgattgcygaagagaagtagggacgactggaactctgatctggacgaggttgtgtcagagccagagaattccttgtagctttttcttccatgtttttagatgagtcgtgactgctgctgggagaaaccaccagaattatattctctcgaaggtgaaaattaattggattgaagcttatctgttagttttgcctggaaattctgcctggattatctggggcaaaagataagatgaagtgccctctagtgacccaactaagtggtggtcactggagctcatttgattgactgatagtggctctgtctaatgctttggttcttttgtgggaaatctgaagtagttgccatcatggcattcacagggtaatggcagtgcattcattgagcttgtgtgttatgtggccgttaacccacagagatgattgatagtcgtctggatgtgaggggcagcatgttgctgtagcttgctccattgccgtgcctgccttgctctttcagacacagcagaagctcttgtggatgcagctcagtaaagaagcagaagtgggaaatgataacaaagagagttgatagaaggttactgttgtggccatatatcacgggcaccttcccctggagctctggaagggcctgtttattgaaaccttttggtataaagagacagagttgttttgaagagcagaacatgcacagttaacaattcctggacatatatggtatactcccactgcaccatgccacagtggcagcagcaagtgtagtggctcagtcatcactggccttaaaggtcctaagggatttgcaaaccattgatactgggcacggcccctcactactttttattttacaataatttttagttttatggaaaagttgcaaaaatacaaggaagtttctgagagt

SEQ ID NO: 41060 - DNA, 525 bp, Homo sapiens
tgagattacgtcttaaaaaataaaaataaagaaataaaaataaaataacagtcttaaaaaagcagaaaaccaaaacaaacaggtaataggagaaaagccatgaaagttattttcccccaactaacatctagactactttgccmaaaaaaaatacatatatatatatatatatatatatataaatactttttttttgagatagagtctcggtctgtcgccgggctggagtgcattggtacgatctcggcccactgcaacctctgccaccctggttcaagcgattcttcggcctctgcctcccaagtagctgggactacaggcgcacaccaccacacctgggtaatttttgtatttttagtagagacggggttttaacatgttggctaggatgctctcgatctcctgacctcgtgatccgcccaccttagcctcccaaagtgctgggattacaggtgtgagccatcctgcccggcctatttaaatactttttttaaaaaatgtacttcttagtttttttaagctgtt

SEQ ID NO: 41061 - DNA, 525 bp, Homo sapiens
tgagattacgtcttaaaaaataaaaataaagaaataaaaataaaataacagtcttaaaaaagcagaaaaccaaaacaaacaggtaataggagaaaagccatgaaagttattttcccccaactaacatctagactactttgcccaaaaaaaatacatatatatatatatatatatatatataaatactttttttttgagatagagtctcggtctgtcgccgggctggagtgcattggtacgatctcggcccactgcaacctctgccaccctggttcaagcgattcttcggcctctgcctcccaagtagctgggactacaggcgcacaccaccacacctgggtaatttttgtatttttagtagagacggggttttaacatgttggctaggatgstctcgatctcctgacctcgtgatccgcccaccttagcctcccaaagtgctgggattacaggtgtgagccatcctgcccggcctatttaaatactttttttaaaaaatgtacttcttagtttttttaagctgtt

SEQ ID NO: 41062 - DNA, 587 bp, Homo sapiens
tcccacctcagcctcctgagcagctggaactacaggtgcacaccaccatgccaggctaattcttaactttttttagaggtggggtcttgctacattgcccaggctkgtctcaaactcctggactcaagcgatcctcctgcctcagcctcccaaagtgctggaattacagatgtgggccaccggcccaggctgggttttcaacatgaagtctcctaattcagtcttaatgttggcaatttacttctaatttttaaacactgaggacttcatttttaaaacagtgaggtgtacacaccaagttaaacatgcgtctggaccagatgtgacccctgaacgtgactttgccacctctcacccacaaagcagagccccttccataaggaagccacaggcacttaaggcatccatgtgccaacatacggagttttaaatctgttacagatttacagacccttcagtctggtccccccggattaatccaaactatatctcagattcccctgacaaacaccccattctaatgaggctgacctcccgttcccctgacaaacaccctgttccaatgaggccgatctcctgggcacctg

SEQ ID NO: 41063 - DNA, 1175 bp, Homo sapiens
ggaactgttagcagaggaaacaggcaaatgagagaggagagagaaaatacaaaaggtatgctgagctggttcccactacgggccaaggggttcarccacactcgagaaaccatgcaggctgtgcctctgaaggacaggaggctgggacatctcatctgcccactgctgaggagtgcccttacaggttcatcttcccagccaccctggctgtggactgagcaagctcagaaggcttcagcaaaatacctgagacagaaaaacaaaggcttggaagtgcttggaaactgctggtgcacaaaggaaccgcccgctctggctggagctgaagcgtgggagccaagaagcactcggctcagatgcctcggagacagtgcaaaccaagcgacagacagaacgggcggggttggaggggatgatggcagggagagagggcaagcgctatgtccaatgcccacaccactgccttctgtctgaaccccctccttgacgatggtctcgacaccaccctgccctgggcctccttaatgctccaaagctcgtgaatttgggttctccattgtacttcagtgccacctgactgttcccaaacccctccaacttctgaagctaagcaattcctggctttctttcacccacttattttagtcatttgttttgcaaacagaagtgtcaacagctgagcagaatccacctggccacacactcacctggttgccctctccccacggccagggggactgccagaaaggcatgcttgaaataatcccttggaaccttccagagacccacccagagtgggccatggaataaagcccctattctgctctcccatgatgacatgtgcacagcatatgagtctgttgctgagaacattctaattagatttccttcactacactgccttgatgttttgtttgaatggattctaattcaaacacacattttaaaacagcttcccaaaagtcttaatgtcatgtttctgtcaagactctagcttttgccttaataatgcaaacctcattcacccaactttaccctttcatgctaaaaaaatcagaagtgcaaaagctcagtttttgaacatagcagagtggtgactaaaaatactttctaaaggacttactagtaagcacatacatttttttttattattctaaaaaaaaaactgcagctgt

SEQ ID NO: 41064 - DNA, 1204 bp, Homo sapiens
tatatgcgtgtgtgtgtgtatgtacgtatataaaagagccgtctcctagaagaaactgggatggtagaacaaatgagaagattttgtaagaaatgtactacctggattcattttgaaaaaataaattattataatcatatttatttgagtaaaaaatatttttcatgtcagtgactaaaaataactacaggaaacttttattcagattccagataactggaaaagtctaggagccacaaagaaaaaacagtcattttggggggaatttgttaaaaagtaattggcaatgatcttctctaagtaattaataaatcgacccaatgctttgtatctgctccacgtaccactgtgtgaagttataacttctgcttactcagagttctggccggcgcagtagctcatgactgtaatcctagcactttaggaagctgaggtgggtgggtcacttaagctcaggagttcaagacaagcctatgcaacatgacaaaaccccatctcaaaaaaaaaaaaaaaaaaaagctaggcatggtggtgtgcaccygtagtttcagctactcaggaggttgaggtgggagaatcacttgagcccagaaggttaaggttgcaataagccaagatggcgccactgcactccagcctaggtgacagagccagaccctgtctcaaaaaaaaaaaaaattaagataaaaaattaaataaaaataaaaactcggagcccctccttacttttctgaaccataggttctaagttctagagctggcagggacctgagaaagcaggcagccctgtcctgtcctcgtaagttatagagaagccgaggactggacgatgtcactggtgaccagatccaagtgcaggccgcagtgctcttcgccctgtgactcttggagttcctagtgtgttctgtttccaaggggaaaatgcacacgtagcacgcacagaaactcccaggagcccaagctttccattacccacagctctccattgctcagccctcctggatgcgctgggatttggcaaggtgagtggtctgtcataaggaatcagaaaagtacacttttttttctggaattggattttcctgttttctttttttttttcctgggagatggtgttcaaactggtaggaacacacaccaagcgtaactttccttgattctgacacatttatggtcatcattgcgctcaaactgtcttcaagcc

SEQ ID NO: 41065 - DNA, 1204 bp, Homo sapiens
tatatgcgtgtgtgtgtgtatgtacgtatataaaagagccgtctcctagaagaaactgggatggtagaacaaatgagaagattttgtaagaaatgtactacctggattcattttgaaaaaataaattattataatcatatttatttgagtaaaaaatatttttcatgtcagtgactaaaaataactacaggaaacttttattcagattccagataactggaaaagtctaggagccacaaagaaaaaacagtcattttggggggaatttgttaaaaagtaattggcaatgatcttctctaagtaattaataaatcgacccaatgctttgtatctgctccacgtaccactgtgtgaagttataacttctgcttactcagagttctggccggcgcagtagctcatgactgtaatcctagcactttaggaagctgaggtgggtgggtcacttaagctcaggagttcaagacaagcctatgcaacatgacaaaaccccatctcaaaaaaaaaaaaaaaaaaaagctaggcatggtggtgtgcacccgtagtytcagctactcaggaggttgaggtgggagaatcacttgagcccagaaggttaaggttgcaataagccaagatggcgccactgcactccagcctaggtgacagagccagaccctgtctcaaaaaaaaaaaaaattaagataaaaaattaaataaaaataaaaactcggagcccctccttacttttctgaaccataggttctaagttctagagctggcagggacctgagaaagcaggcagccctgtcctgtcctcgtaagttatagagaagccgaggactggacgatgtcactggtgaccagatccaagtgcaggccgcagtgctcttcgccctgtgactcttggagttcctagtgtgttctgtttccaaggggaaaatgcacacgtagcacgcacagaaactcccaggagcccaagctttccattacccacagctctccattgctcagccctcctggatgcgctgggatttggcaaggtgagtggtctgtcataaggaatcagaaaagtacacttttttttctggaattggattttcctgttttctttttttttttcctgggagatggtgttcaaactggtaggaacacacaccaagcgtaactttccttgattctgacacatttatggtcatcattgcgctcaaactgtcttcaagcc

SEQ ID NO: 41066 - DNA, 822 bp, Homo sapiens
tcccgggctgtgccctcctgtgtgatctgaagtagggaagtggtatactaacttttggaaacattcagctgccaagtttyctctgctgcaggctttaaatagatccaactgagaaaggaaggtagagcttgaaccaactgccaccctctatatagagacggttgtcgcctggtctagtgtaacaaatagagttctttgttagaagaggaaagaaacttaacccctcatttcccatttctgatgatttagggacagacctgatggtctaccaaagatacacctgaagctttactatttcttgtcactctatattttttagtaaaacttatttttatctttggagatgacaggcatctttgttttagggataactaatgatgcctgtagagaacatgagcatgttcacaacccccaattaatctttaacccagaatccatagagcgttttttaggctgacagttagacccagtttaattgtggatggatggtaggattccagacacttcagatgaaaatccatccagccatgcctgtggatgccccttggaaggaggttggagcttgggccactgagaaggtggatattgcatgtcctgactccccagatctgtttacacaacagcgattttccggatagagtagcacaaggaaggaagtgaaagggggatagtcttcatttgcggagggtgagtctagggagcagaatggacatgttctgcagctttgccatgtgactcctttcagcacaacagaaaacatacagggcacagagcttccttactgaatgcctcaatggtcacgacattagtgcgtcagcagga

SEQ ID NO: 41067 - DNA, 822 bp, Homo sapiens
tcccgggctgtgccctcctgtgtgatctgaagtagggaagtggtatactaacttttggaaacattcagctgccaagttttctctgctgcaggctttaaatagatccaactgagaaaggaaggtagagcttgaaccaactgccaccctctatatagagacggttgtcgcctggtctagtgtaacaaatagagttctttgttagaagaggaaagaaacttaacccctcatttcccatttctgatgatttagggacagacctgatggtytaccaaagatacacctgaagctttactatttcttgtcactctatattttttagtaaaacttatttttatctttggagatgacaggcatctttgttttagggataactaatgatgcctgtagagaacatgagcatgttcacaacccccaattaatctttaacccagaatccatagagcgttttttaggctgacagttagacccagtttaattgtggatggatggtaggattccagacacttcagatgaaaatccatccagccatgcctgtggatgccccttggaaggaggttggagcttgggccactgagaaggtggatattgcatgtcctgactccccagatctgtttacacaacagcgattttccggatagagtagcacaaggaaggaagtgaaagggggatagtcttcatttgcggagggtgagtctagggagcagaatggacatgttctgcagctttgccatgtgactcctttcagcacaacagaaaacatacagggcacagagcttccttactgaatgcctcaatggtcacgacattagtgcgtcagcagga

SEQ ID NO: 41068 - DNA, 770 bp, Homo sapiens
atatacacatacacattgaataaatgacacagtgggaattaaggaagtttgggtgcccctagcgcctcccaggatgaaggctttatcaatgaattactaaatgattgttcacgaagtcttcaacaatggtcatttgtaattcaccctctcttcctatatgtgtggtccttcaaggccgctttttcctgttgttacactagtgagagggaaccgaacgggctcatattcagcttaaggcacaagcgaaccccgtttgccttcaaccctgagacccgcctcccagcwtggcagttagggtggcccttaaggtctcatttggcatcaaggagagatttccagtctgccaagttttcacagtgagtgaatcattgtctgagaaaatgacctctgaatatacatatatgggactattcagaagggctatgcagcaggattcagaggaaagactattaaaattccagtgtacaccagtaaatctacagtttcatcataaattacaatcaggaatcattttgtctcatggcctcgctccctgcgtggggaggtggtttcagttccaggccagcgaggcgaatacggtgcggggagggctctgagaaaggaacagaacccaaatcactttccttctttagttgacgaatctcagggcttaaaatgctacaaacaattgagatgtaaatgtatctcgtctgtttctctgagcctgccttcagtcaacaaatgttttctattcaccagcctaagaagcagctttggtgctgtcccttgcg

SEQ ID NO: 41069 - DNA, 533 bp, Homo sapiens
attgcaaattcattttatttaatgtttaatagtttatgttatgaattcaaggcattttctatacttgtcaataatgaaaaggcatttctccttttaaaaattctatgaagtcagccttcttattccttaggaacatgaactagtgtggtttggttttgaatctgattgttcaaacactttacaaagtgaataggaaaataatttgggaacatttatatttaaacttgtcaatctatgattctgtttttcatgtgacagccaatcacaatgtgttctctactcaggaagtttagctcagtatatggattaacacgtgttctacttgtgtgatatttcttatgacaaccacagaaaacatatggggctgggcacagtggcttatgcctgtaatcccagaactttgggaggccaaggcgggtggatcacttgagcgcagtaatttgacaccagcctgggcagcatgtcgaaactgcgtctctacaaaaaataccaaaattaaccaggtgtggcggcacatgcctgtaatccyagct

SEQ ID NO: 41070 - DNA, 574 bp, Homo sapiens
tttttttttrtagatcagtaaacaacagaacatggtatatgatagagaaagatttcagttttactttgtacaattaaacatgcatggctgcatgtatacatatgcatatttaaaatattttgaagtctttacaccaaatgttaactgaaattatctttggatgtagaatagtggttagtttttatttaatcctttcaactttcctgtatttaaattttttaaagaatacataccattataagcaaaaatacacataaaataaatgttttatttattaaactttaaaaatacatttcaaaacttgcacagaatgattcctggctccagatgaacaagatctggggctctgatgtatggcatgggtggtaatggaaagagtgaatttgactttggtaatcatcacgcattgtatatgtatatcaaatcatcacattatacactttgaatgtattcaatcttgttttgacaattaaatatttttaaattaaaaagatattacagcatgaaagtaatagcttccccgagactcacaggatggcagtggccaccgtgtaggctgctttccccagcttct

SEQ ID NO: 41071 - DNA, 574 bp, Homo sapiens
tttttttttatagatcagtaaacaacagaacatggtatatgatagagaaagatttcagttttactttgtacaattaaacatgcatggctgcatgtatacatatgcatatttaaaatattttgaagtctttacaccaaatgttaactgaaattatctttggatrtagaatagtggttagtttttatttaatcctttcaactttcctgtatttaaattttttaaagaatacataccattataagcaaaaatacacataaaataaatgttttatttattaaactttaaaaatacatttcaaaacttgcacagaatgattcctggctccagatgaacaagatctggggctctgatgtatggcatgggtggtaatggaaagagtgaatttgactttggtaatcatcacgcattgtatatgtatatcaaatcatcacattatacactttgaatgtattcaatcttgttttgacaattaaatatttttaaattaaaaagatattacagcatgaaagtaatagcttccccgagactcacaggatggcagtggccaccgtgtaggctgctttccccagcttct

SEQ ID NO: 41072 - DNA, 967 bp, Homo sapiens
tacacatacaaagaagaggtcacaggagcacacagacagatggtagtagtctacaagccaagagaagaggccccagaatcaaacctaccctccccaaactgtgatcttgaccttctagcctccacaactgtgaaaagtaaatttctgttgataaagccacccagactgtggtattctgtcttggcagcctgagctgactaatacagttgctatctaggattgcctgtgattaaaacactgaaggaaaaataagaaaattttctctgcttttaaaaagaaaatacgctgctccacccacattttaatgctagagtcggctctttatcttcccacatattctctaaggactattcaccccaatccctttctgaatgtctgtgctaaagaaaagagccttcactttttgagtttcccccaatttaaaccaatgcaaatgaaagggtaaggaaagagtgccctagatcctttcttttggatatttctcttatttggagttgtgcagattctcttagttgactgatattttaaaaattaagtatgccagtggatttatgcacacacatacacgcataccctcttccatcctgtttcctgggccctaagcctctcacagtgacacttgaccagcgtggttatctcaaagtcccttcatgctgggtaagcttccgcctttctagaaaagggtcaagtgtctttgaaactaaactccagtgcctggctaaccaatgactttgtaccaatatctagaactagaattaatagttgattatgatactgctgattgaaataaataagtaaaagtatctgaaaaattagacgatgaaacaaaacttacaataataaaaataacacaatgttcattagcttaagtaatatgattatcgagaatgtcaggatagcaggaaaaattatgtattttcaaaaactcgttttcaaatattaaacttttttcrttctctccctttca

SEQ ID NO: 41073 - DNA, 571 bp, Homo sapiens
ttcaacctgcaaaaagccactccctcttaccctacgtggacagacttgaggacaaagcaagccttgatcatcgctacctgcagagtagactgtatgtgtgaacgtggccaactatgcccaagccatgctgagctcaggcagagccaggcgaaccccacaggtagcagctacccagactgaggctatctgaccttgatgctgagttcctctactgtgctcggaggggtccagaacccaaaactcagcacttccttaactcatgcatgctctgaacctgagagagggagaggtatgtgctgcctttcagtttctatgaggatggttttcttggaaagttctagagcagcgatggaggctctgagctctcagatggatatgagctggaatycgacttttcttgcccttttcttgctctgcctcaccttcctgggcctgagcttcttcatcggtaagctgccattgtagtgttgtcacaaggatcaaaggataatggttgtaaaatgcttagcaccatgcctggcacatggcaagcccctgatacacaagcactgggattagtatgtgcatcatt

SEQ ID NO: 41074 - DNA, 719 bp, Homo sapiens
atccttttactcaagycttttgctcagccattcaacatatattttatggagcaagtaccctgtgtgcaaaactgaatttcagacagtcaaccaaactgtagtgaggtcaaaggaaagaaatacagaagtgcatgattttttaggggaaaagctttggaaaatcctggtcatgagaagtgagatttaaaaagtcattttcctataatttaactcaaaaacatagatctgtatttgcattgtggttaagagcacaagtattggagctcattcattcatttatttaataaacatttatagataatctactacttagtaagtactgtgttaggcattggggtacattgcttacccaaaccaggtatcgaacctgtcttcactgaatcttacattgtagtggggcagatagattaatcgattgaccgtattgaaagacatcaacctgcacctgtggcagtgctataatgaagattgcataggaggctcttaagagcctatttattccaaagatatttaatataattgaggaattgagatgaaattgctggaggaagtgatatctgatctaatatataagggatgagcagcaggtgatgaggcctggggagggaagaaagagcctagcacggagagcagcatgcatggcctgtcaaggtgaacagtagaatcccaggcctggaatactgcctgtggggagagagtgagtggctctgaggaaagca

SEQ ID NO: 41075 - DNA, 1223 bp, Homo sapiens
gcaagagttggaagtgagcatggagccccaggctgctgctggcagtggkcagagtgggagaaggcgggactgtttgagtgtaagaacaggccggggcagcaggactccctggggcaggaggggacggcaagaatggcaggacaagcaagggtggaaaaggggacttgtgaagggcgccagggggagccagggattgttgtaagctgggcagagacatgcccagaattctgccttctccaccacgttcctcacgatctggactctgttgctctgcacacacaggtgggaatggaactggggccatgatgccagggggccatgagcccagtgacaaagagggcagaggagacacactcagtgtctccaatttctgggtgggctttggcctgcctgttccttggcccaaggctgggaaggcggacttaaaccaagattaagctgactgaagtaagtgctccaggaacattgtgtgactaatttaactgcagctgtagctctaatcttgccctcagagtgacccagggttttccttcacttaaacaacagtttctctaaggcctgactagtaaaaacagtatctttatccaaaggaattacaggtaagtggtatattccttaaataatacattttaaatatgaagcatttctacagcattattgtaaagcaatggggcttaactgttccttattaataaccaatattgaagctaggcaaggtggctcctgcaagtaatcccagtgctttgggaggctgaggtgggagaaccgcttgaggccaggagttcgagactagcatgggcaacataatgagaccccgtatccacaaaacaaaaaaaattagctaggtgtggtggcacatgcctatagtcctagctactcaggaggttgaagtgggaggatcgctagagtccaggagttcaaggctgcagtgagctatgatcatgccactaccctctagcctgggtaacagagcaagaccttgtctctaaataaaataaaataaaataaaataaaataaaataaaataaaataaaatgtaaaataaccaatattgtaaggcatgtttataatgaaatctgatccaacttgccccctctgtgcagcttctcatacaatgttgtgaccaaatatactttataaatgaagcgaaggtgggcctgctcatcttgtagctttagatgagcaaacctgcagcaggggcctgctctgccatgagtgtgcct

SEQ ID NO: 41076 - DNA, 1223 bp, Homo sapiens
gcaagagttggaagtgagcatggagccccaggctgctgctggcagtgggcagagtgggagaaggcgggactgtttgagtgtaagaacaggccggggcagcaggactccctggggcaggaggggacggcaagaatggcaggacaagcaagggtggaaaaggggacttgtgaagggcgccagggggagccagggattgttgyaagctgggcagagacatgcccagaattctgccttctccaccacgttcctcacgatctggactctgttgctctgcacacacaggtgggaatggaactggggccatgatgccagggggccatgagcccagtgacaaagagggcagaggagacacactcagtgtctccaatttctgggtgggctttggcctgcctgttccttggcccaaggctgggaaggcggacttaaaccaagattaagctgactgaagtaagtgctccaggaacattgtgtgactaatttaactgcagctgtagctctaatcttgccctcagagtgacccagggttttccttcacttaaacaacagtttctctaaggcctgactagtaaaaacagtatctttatccaaaggaattacaggtaagtggtatattccttaaataatacattttaaatatgaagcatttctacagcattattgtaaagcaatggggcttaactgttccttattaataaccaatattgaagctaggcaaggtggctcctgcaagtaatcccagtgctttgggaggctgaggtgggagaaccgcttgaggccaggagttcgagactagcatgggcaacataatgagaccccgtatccacaaaacaaaaaaaattagctaggtgtggtggcacatgcctatagtcctagctactcaggaggttgaagtgggaggatcgctagagtccaggagttcaaggctgcagtgagctatgatcatgccactaccctctagcctgggtaacagagcaagaccttgtctctaaataaaataaaataaaataaaataaaataaaataaaataaaataaaatgtaaaataaccaatattgtaaggcatgtttataatgaaatctgatccaacttgccccctctgtgcagcttctcatacaatgttgtgaccaaatatactttataaatgaagcgaaggtgggcctgctcatcttgtagctttagatgagcaaacctgcagcaggggcctgctctgccatgagtgtgcct

SEQ ID NO: 41077 - DNA, 1223 bp, Homo sapiens
gcaagagttggaagtgagcatggagccccaggctgctgctggcagtgggcagagtgggagaaggcgggactgtttgagtgtaagaacaggccggggcagcaggactccctggggcaggaggggacggcaagaatggcaggacaagcaagggtggaaaaggggacttgtgaagggcgccagggggagccagggattgttgtaagctgggcagagacatgcccagaattctgccttctccaccacgttcctcacgatctggactctgttgctctgcacacacaggtgggaatggaactggggccatgatgccagggggccatgagcccagtgacaaagagggcagaggagacacactcagtgtctccaatttctgggtgggctttggcctgcctgttccttggcccaaggctgggaaggcggacttaaaccaagattaagctgactgaagtaagtgctccaggaacattgtgtgactaatttaactgcagctgtagctctaatcttgccctcagagtgacccagggttttccttcacttaaacaacagtttctctaaggcctgactagtaaaaacagtatctttatccaaaggaattacaggtaagtggtayattccttaaataatacattttaaatatgaagcatttctacagcattattgtaaagcaatggggcttaactgttccttattaataaccaatattgaagctaggcaaggtggctcctgcaagtaatcccagtgctttgggaggctgaggtgggagaaccgcttgaggccaggagttcgagactagcatgggcaacataatgagaccccgtatccacaaaacaaaaaaaattagctaggtgtggtggcacatgcctatagtcctagctactcaggaggttgaagtgggaggatcgctagagtccaggagttcaaggctgcagtgagctatgatcatgccactaccctctagcctgggtaacagagcaagaccttgtctctaaataaaataaaataaaataaaataaaataaaataaaataaaataaaatgtaaaataaccaatattgtaaggcatgtttataatgaaatctgatccaacttgccccctctgtgcagcttctcatacaatgttgtgaccaaatatactttataaatgaagcgaaggtgggcctgctcatcttgtagctttagatgagcaaacctgcagcaggggcctgctctgccatgagtgtgcct

SEQ ID NO: 41078 - DNA, 560 bp, Homo sapiens
ggcattcctctccaacctccaggggacagccagatccttggggctcyggctgtcaggctttacaacagctctcaatgggtaaccttcccacctcagtcctgctccctcatccagggagaagtggtccctctgcactcaggccagcctcagccccactgcctgctccacacagtggcatctctgaggactgagaggcccctcctcccaggcgggcatgtgccctgtggtgcccagctcctccctgcaagctgcggctgttcctccaggcaggcctccgtctcctcatggtttcctcagtggctacccaaactaggccccagagtcttccactcacctctgcacatctctgtctccttccttggttccatccaggaactgagtcagctccctccctccccaaggggctgccatggcctcccctgtcctctgcgcttctcccacccaggctgactggcctggagcatcaggctccctgtgccttgctgccccaatgcaggctcttgcaaggggctgattggcaaacacagtagcatcctgagggaataagtcacttaatatgc

SEQ ID NO: 41079 - DNA, 560 bp, Homo sapiens
ggcattcctctccaacctccaggggacagccagatccttggggctccggctgtcaggctttacaacagctctcaatgggtaaccttcccacctcagtcctgctccctcatccagggagaagtggtccctctgcactcaggccagcctcagccccactgcctgctccacacagtggcatctctgaggactgagaggcccctcctcccaggcgggcatgtgccctgtggtgcccagctcctccctgcaagctgcggctgttcctccaggcaggcctccgtctcytcatggtttcctcagtggctacccaaactaggccccagagtcttccactcacctctgcacatctctgtctccttccttggttccatccaggaactgagtcagctccctccctccccaaggggctgccatggcctcccctgtcctctgcgcttctcccacccaggctgactggcctggagcatcaggctccctgtgccttgctgccccaatgcaggctcttgcaaggggctgattggcaaacacagtagcatcctgagggaataagtcacttaatatgc

SEQ ID NO: 41080 - DNA, 598 bp, Homo sapiens
gaacaccagcatcaacctgaccaggagactggagtggctcttattttgaagtttcttctttttaggcatcctcctgcccggtcacttcctaccctgctctccacgtgcagatactgagcaacaagtcctgctgggttgggcatgcacaaaactgaaaggccctactcccttatacatctgtgagtaggacacaaaataagccattacagtgcctgaggacgtggtttaattgtactttaattccaacagtagatgtagcactggttgtgaggagctaatggatgtggaagttagccctggcttcagctatatgggcacccaggcctacggtggagggcagtgcaaccagtccaaaagcctgagcaggtctgcgtgctgctctctcaactcccacaacgggaggggcaggggaacgaatataagytatcagccttaaaatctgagcacgacctacctctgggagggcagacaccatattctatttgtttttgtaacctccaccccccggcacagcacctggtacacagaggtgctcaatagctgtttgctgacaaccaacggggcaggaataactcttgggaaggggcaaaagagtgga

SEQ ID NO: 41081 - DNA, 612 bp, Homo sapiens
tgcgtgggacccttggagacctagtcaaaggagcaccttagggtacaggaatgacagccacctgggctctgcctggcaggcagtaaaggcacacgtcgcctccaggggccacactcacctctctgggaaaacagggctgctgctcaccctgcttgtccctggcacagaaagctgccttgtccctggcacagagctcagcacagatgctggctcctaggcaccgccgagggctcccctcatggagtggctgacgtgctgacagacatagaaaagtcagtctgcgttgtggggtgctctcagggccaagtggcttgttctgggaaccacctgttttcacaggcttatgtgctccctgcaccctgcagacagctcttcctgcttctcagcagaaactctcctaggcctaaggccacgtgtcatcccacccactctgggagggtgagaggccaggwttccccccaggaagtgaaacaaagcatccccgtctcaggtgtacaccatattgtatacttttgattcttttgttgaaaacgtataaataaattagtttgcgcttttttttttttttttttgagatggagttttacttttgtcgcccaggctggattgcaa

SEQ ID NO: 41082 - DNA, 803 bp, Homo sapiens
gggctattttcttcttgtaggagttgtgcatatttccagcattttcctggctttgcagagaagccagaagcagcggtgcacacaggatgagttgctcctcaagccgcccttgcctgggctgatttgtgttccctctcgcatacaccaaggctagtgaggcggaggatggcaattgctggctgtgctgcttggggaagcatgcccaggtgtctgtgcccacaccaaatttccctctgcttagctttctgaggaggccctcctgcctgtttttcaggtttctctctgttcacacaaatcaaatgtgtgtactcaaatatgctctcccaccactgacctcttggtgttctctgggctccttggcctggtctcaccttatgctaattacaggcagcaagcacagtgggctgtgatgattagaaaatatatgggtcaaatagaaaataaaattaaggctagtcttctttgttatgcaagtaaaagaagaaatgagtattcttactatttcacagacttcagtctttaaaaattattagaactatgaaaagttctttgttatacaagtaaaagaaatgagtattcttggtattccatagayttcagtcttttctttaaaaattattagaattatgaaaaaagaaacaatgaatgacactaacttttaagaagactgaagtgagatcaaacatgcaaaaggctctgtgctcttcgttatgggattcaggtcctgtcggaaactaagttccaagggctaggtgcagtggctcatacctgtaaccccagtgctttgggaggccaaagtagga

SEQ ID NO: 41083 - DNA, 406 bp, Homo sapiens
tgcgtgtgtaaaagtcgaggtattgctggcattcagggtgacatgatggtactaaatgttttccattaaagtcttctattttaaaatttagagaaaaataaaatggctttccatcagactttctgtgttgagttgctatcgtaagacggtgatgtcttttggtaattagctgtcagaaatcacctcaattgggaaggcagggtacttttataagcagcctgtgatctttgaagaaatacagtctaggccgggcatggtggttcacgcctgtaatcccagcactttgggaggctgaggcagacggatcacctgaggtcaggagttcaagcgattctcgtgcctcagcctcccaagtasctgggattacaagtgcccgccaccatgcccagctaatttttgtattttt

SEQ ID NO: 41084 - DNA, 571 bp, Homo sapiens
aaaataaaacacggtggataaaaattacatcaaatacatacatatatatatatcttacctaacctacagtggcaaagacatctgtgctttggtttcttcctgagcaccaggtacccccgctgtgcgcaccgccctcctctcagccctagcccactgcagcctggcttccaccctcagaacacagggggttgaagatgaaagggaagcagaggtgaaagaatcagtgcacaagcttggaaaactggtactcctcctccaagctcctcatggcgaactcaccaacatcagcgtggctaaatgcaaaggcagcattgcagctctcgtgtcatttaaatgttcaagaaccacagtgaacactacctctttccaaatcacattgccccagctycatagaccttttcctcttctacttctcccttgcagattctctttactctgccctctctctagtgacctcagcttctatggctttcattaccttcctatctggaggattctgagtcttgatctttgagctggacctctctggcttgctggctgatgcatgaaggctactagacatgggttctga

SEQ ID NO: 41085 - DNA, 643 bp, Homo sapiens
actatattcagttatatgtaaatatcactgctgaatgccactcttcttgaaggacaaaggcatctattactcaaggagatagcctgatacattactcgtagactatgggatacagccatgtgcatatgctcaggtactaaccccagctccacttagtctcccctccaaggcaggtcctactgtcagctcctgaatagtgcaaagcaggtgacagtagctcactcatacaggagataagccagttatggattaagaactgactataacatgtcctttaaatccaaagatgaaactactacagagaaggcagggagagggtcttgcagtcctctctgcactgtgggcagctctgggcttcttgcatattcagccaccgctgtgttttcagcatctytcaccgtctgtagccctgccacccattaggaggcctaaagcctctgataaagaagagcctttccttttttgttctttttttatgcaaaagtaactgttctctttgataacttggttccactaaacactgcaactatgctacctatttcaagtgatcttttttcttgtttatatctcttgttgtaaactctcttaaattcaacatattcctcctgttgaataaaggagcatgctcacccagaataagcct

SEQ ID NO: 41086 - DNA, 599 bp, Homo sapiens
tccccatcagtaagtgtttgatacatactacatacttgatttttaaaaaaaggcaactgtagtaaatttactgaccgattctccatttcagaattcctggacatgtgcttattttccttaactgtccaccaaaaaatttctaaatcggtgcttcttaagcaggtccatggggatcatggaatactattgggggtaatctgtaatcctccaaaaattgtatattaatttaatgtatattccagtaggtggctcccatcttccactccatccccacattctctggggaatctttataacygtttttaagtctttaaggtaactgtaatccaaaaagcaatttaaaattcactgctctaaatttatttgtgtttaaacaatgaggtataagagcttcctgagatgcttaaacaatggaatgagccacctcacacagtgtccatcctctgaatatttctctgttcggattggtccagaaaaccacttacctgaaggccagaatgagccatatgacttctgagaatcttagatcattgaagctagaagtgttcctagcgatcacatcagagggcatggcagaacactgatttctgggtcccacc

SEQ ID NO: 41087 - DNA, 599 bp, Homo sapiens
tccccatcagtaagtgtttgatacatactacatacttgatttttaaaaaaaggcaactgtagtaaatttactgaccgattctccatttcagaattcctggacatgtgcttattttccttaactgtccaccaaaaaatttctaaatcggtgcttcttaagcaggtccatggggatcatggaatactattgggggtaatctgtaatcctccaaaaattgtatattaatttaatgtatattccagtaggtggctcccatcttccactccatccccacattctctggggaatctttataactgtttttaagtctttaaggtaactgtaatccaaaaagcaatttaaaattcactgctctaaatttatttgtgtttaaacaatgaggtataagagcttcctgagatgcttaaacaatggaatgagccacctcacayagtgtccatcctctgaatatttctctgttcggattggtccagaaaaccacttacctgaaggccagaatgagccatatgacttctgagaatcttagatcattgaagctagaagtgttcctagcgatcacatcagagggcatggcagaacactgatttctgggtcccacc

SEQ ID NO: 41088 - DNA, 320 bp, Homo sapiens
ccgggcgaggtggcgggcgcctgtagtcccagctactcgggaggctgaggcaggagaatggcgtgaaccccagggggcggagcctgcagtgagccgagattgcgccactgcactccagcctgggcgacagcgagactccgtctcaaaaaaaaaawaaaaaataaaaaataaaataaaataaaattgcctgcgaattaaaaaaatacattttttcccttggcaaagtcagcacctagctatctcagttaactctctggaggagaaaaaggggaacagtggttgtgaaatttgagacttgcaagagtgcccaggactgccta

SEQ ID NO: 41089 - DNA, 729 bp, Homo sapiens
ctttgtggtaaaacaacccttccgtaactgctgttaatgggaaaaaacagactctagaacattttacagaggtttattctgagcctgtacatgtgactgtggcctggagagaagcaaacccaggaagccttgagtgagtcgccccgaggcggccgggttacagcttgastgagtggccccgaggcggccgggttacagcctgagtgagtggccccgaggcggccgggttacagcttgactgagtggccccgaggcggccgggttacagcttgactgagtggccccgaggcggccgggttacagtttggttttactcatttcaggaagacacaagttacaggccaagacataaatcagaatgtggaaggtgcacactgatttggcctgaaaggcaggagatcttggagcagggtttacaggtcataggtaggttccacgattcttttttttttttttttttgagactgtgtctcactctgtcgcccaggctggagtgcagtggtgcgatctcagctcactgcaacctctgcctcctgggttcaagtgattctcgtgcttcagcctcccaagtagctgggattacaggcgcccaccaccatgcctggtgaatttttgtatttttagtagagacggggtttcaccatgttggccaggctggtcttgacctcctgacctcaagtgatccgcccacctcggcctcccaaagtgttaggattacaggcatcagcc

SEQ ID NO: 41090 - DNA, 729 bp, Homo sapiens
ctttgtggtaaaacaacccttccgtaactgctgttaatgggaaaaaacagactctagaacattttacagaggtttattctgagcctgtacatgtgactgtggcctggagagaagcaaacccaggaagccttgagtgagtcgccccgaggcggccgggttacagcttgactgagtggccccgaggcggccgggttacagcytgagtgagtggccccgaggcggccgggttacagcttgactgagtggccccgaggcggccgggttacagcttgactgagtggccccgaggcggccgggttacagtttggttttactcatttcaggaagacacaagttacaggccaagacataaatcagaatgtggaaggtgcacactgatttggcctgaaaggcaggagatcttggagcagggtttacaggtcataggtaggttccacgattcttttttttttttttttttgagactgtgtctcactctgtcgcccaggctggagtgcagtggtgcgatctcagctcactgcaacctctgcctcctgggttcaagtgattctcgtgcttcagcctcccaagtagctgggattacaggcgcccaccaccatgcctggtgaatttttgtatttttagtagagacggggtttcaccatgttggccaggctggtcttgacctcctgacctcaagtgatccgcccacctcggcctcccaaagtgttaggattacaggcatcagcc

SEQ ID NO: 41091 - DNA, 729 bp, Homo sapiens
ctttgtggtaaaacaacccttccgtaactgctgttaatgggaaaaaacagactctagaacattttacagaggtttattctgagcctgtacatgtgactgtggcctggagagaagcaaacccaggaagccttgagtgagtcgccccgaggcggccgggttacagcttgactgagtggccccgaggcggccgggttacagcctgastgagtggccccgaggcggccgggttacagcttgactgagtggccccgaggcggccgggttacagcttgactgagtggccccgaggcggccgggttacagtttggttttactcatttcaggaagacacaagttacaggccaagacataaatcagaatgtggaaggtgcacactgatttggcctgaaaggcaggagatcttggagcagggtttacaggtcataggtaggttccacgattcttttttttttttttttttgagactgtgtctcactctgtcgcccaggctggagtgcagtggtgcgatctcagctcactgcaacctctgcctcctgggttcaagtgattctcgtgcttcagcctcccaagtagctgggattacaggcgcccaccaccatgcctggtgaatttttgtatttttagtagagacggggtttcaccatgttggccaggctggtcttgacctcctgacctcaagtgatccgcccacctcggcctcccaaagtgttaggattacaggcatcagcc

SEQ ID NO: 41092 - DNA, 729 bp, Homo sapiens
ctttgtggtaaaacaacccttccgtaactgctgttaatgggaaaaaacagactctagaacattttacagaggtttattctgagcctgtacatgtgactgtggcctggagagaagcaaacccaggaagccttgagtgagtcgccccgaggcggccgggttacagcttgactgagtggccccgaggcggccgggttacagcctgagtgagtggccccgaggcggccgggttacagcytgactgagtggccccgaggcggccgggttacagcttgactgagtggccccgaggcggccgggttacagtttggttttactcatttcaggaagacacaagttacaggccaagacataaatcagaatgtggaaggtgcacactgatttggcctgaaaggcaggagatcttggagcagggtttacaggtcataggtaggttccacgattcttttttttttttttttttgagactgtgtctcactctgtcgcccaggctggagtgcagtggtgcgatctcagctcactgcaacctctgcctcctgggttcaagtgattctcgtgcttcagcctcccaagtagctgggattacaggcgcccaccaccatgcctggtgaatttttgtatttttagtagagacggggtttcaccatgttggccaggctggtcttgacctcctgacctcaagtgatccgcccacctcggcctcccaaagtgttaggattacaggcatcagcc

SEQ ID NO: 41093 - DNA, 729 bp, Homo sapiens
ctttgtggtaaaacaacccttccgtaactgctgttaatgggaaaaaacagactctagaacattttacagaggtttattctgagcctgtacatgtgactgtggcctggagagaagcaaacccaggaagccttgagtgagtcgccccgaggcggccgggttacagcttgactgagtggccccgaggcggccgggttacagcctgagtgagtggccccgaggcggccgggttacagcttgastgagtggccccgaggcggccgggttacagcttgactgagtggccccgaggcggccgggttacagtttggttttactcatttcaggaagacacaagttacaggccaagacataaatcagaatgtggaaggtgcacactgatttggcctgaaaggcaggagatcttggagcagggtttacaggtcataggtaggttccacgattcttttttttttttttttttgagactgtgtctcactctgtcgcccaggctggagtgcagtggtgcgatctcagctcactgcaacctctgcctcctgggttcaagtgattctcgtgcttcagcctcccaagtagctgggattacaggcgcccaccaccatgcctggtgaatttttgtatttttagtagagacggggtttcaccatgttggccaggctggtcttgacctcctgacctcaagtgatccgcccacctcggcctcccaaagtgttaggattacaggcatcagcc

SEQ ID NO: 41094 - DNA, 910 bp, Homo sapiens
gtagtacagctcctgcaagtcaaaaagaaaaaaaacagcccatggaaaaaactggcaaaggacataaactcctagttcaaagaatcaaaggtggacactttgcacatgaagaaatgctccattcagtaaccagggaatgggcctttcacctgtcagaaaaggagagatttcaaagtgtataatactcagtgttcaaatactctgaccgaccaagaaagtctacttagagaaatacagtcagacataaagatatatgtgatcggccaggcgcggaggctcacacctgtaatcccagcactttgggaggctgaggcagatggatcacctgagatcaggagtttgagaccagcctggccaacacggtgaaaccccatctctactaaaaatacaaaaattagctgggcatggtggcgggtacctataatcccagctacccaggagtctgaggcaggagaatcgcttgaacccgggaggtggaggtggcagtgaggcaagatagtgccactgcactccagcctgagygaaagagcaaaactgtccaaaaaaaaaaaaagacatatgtgatcatgttcattgcagtcttattttaacgcatcagactcaagcaatctgtaagggactggttaaataagttaatcatacatataccattagtaataatttgtggagcttgggaatagagactttaattttccattttattcctttctgtaatattggaagttttttttatgtgcatttgtattttaaactactatttagagttaaaaattttattttctgtttgaaatacctatagttgacccttgaaccatccagggttgaactgtactagtccacttacaggcaaatttttttcaaccaaaaacgggtcggaaatacggtattcatgggatgtgaaatccatgca

SEQ ID NO: 41095 - DNA, 523 bp, Homo sapiens
gtagggacctacaagtactaaaatgtcagaaatcaagttgcagaatgaattaggaacagcaccaggaccagaccatggctttctggtactactgatstgttgcaatttgctcagataatacatctttaaaaaagagaaaataaggctgggcgtggtggctcatgcctgtaatcccagcactttgggaggcagaggtgggtggatcacctgaggtcaggagttcaagaccagtctgaccaacgtggagaaactccgtctccactaaaagtacaaaattagcgtggtgtggtggcacgtgcctgtaatcttagctactgaggaggctgaggcaggagaattgcttgaacctgggaggcggaggttgtggtgagctgagatcgcgccattgcactccagcctgggcaacgagcgaaactccataaaaaaaaaagagaaaatggcagtacaaaattaatatagaaaaaatattaaaatagaaaaaaatcttgaattgcatgctatttagtttgtttagtttgtattt

SEQ ID NO: 41096 - DNA, 1133 bp, Homo sapiens
ttatcaaataggacttaaagttcacaatttacacataggtcatatttttataaaaatctttttctgattggaacttttacctattcgctattttaggtaaaatgactaggtaggttgataatctctaaaaattctccttttagtcacgggatcagtagcagggcagatcttacaaggcaatctcaatatacggtaccagaaaatatgagtattacagccatgtctgagcctgtgttcctaggaaccaggagacccaggaaatgacctgctggaaggtccctggcaccagtcagatcccctctgagagttgctttgtatactctgctggggacagcccaggtctcctggtgacttccttgatccaagtgcgggcagaacaccagggctgcctgacacygaggccacctggggcaacaggtcacgctgtaccctctccttgcactcctgcatcctgaactaggggaaacaactccctacacaaaagcagtcttctgaccagaatagtccaactgccctgtcccctggggacaggagagcccggatcaggctttttcctgtctggaagcagggttccatctacaagaccagcggctgcagccactgtatagacatagtaaccacttgcccacacacatattggcaatggttttcaggctggttaatcatctatagaaaaagcaaaaagccaatttatgaagattttatcagagccctctggaggtcactgtacagtctctctacttttgtttaagtctccaagaagtactagaagaaaatggtttctgcaaacttttttgagctgggaagttttagagatctgctggctaactcagagagtgtgaaataacacttcactgtttgaatcatagtatgttcaaaggcacaggcggcagctcaccaagtagcagctactttccacatgagggttcattaaaggagagagcgtctgtctgtgtgtccctctttttgcccagagcctttgaactaacatttcatattagttcttgtgcctttgagacaactgttttcctcagaacacattttggaggttcgtcagattttccaaaactcagggtggaaattatagtactttatcatgttcccatggatttgtagttcctttttattttact

SEQ ID NO: 41097 - DNA, 541 bp, Homo sapiens
attttaatttctgcagttgtgaatgatcaaaaggacaaatgggatccatgaccaaatcccataaaagtaaaaagtaaaacaggattagtgacaatagtcactaatatttcctaacagagcatgtgctatgtcctaatagtaacagaattaaactcagaaagtgagaagaggtgataaacataaacaatgtcaacaaaaccctaaggtggacggctagacctacagacaaggatccaggcctgtctctggcccttctcttctgtagaaagggtgcttacttacgaatcagagtctcccaagggaatggaaatggaagactagacagattcatgccctgggttgacatttattcccttaatatttcaaagcagtatgtctagagttctttttactcttttctctacacmcaaattttaacatggaccccctcaagttggagttctttccctaagaacttcaattttgccctgtcaaccctacactttgaataaatatatattgggtgattctgaacctctataatacagtttatctttgttgt

SEQ ID NO: 41098 - DNA, 524 bp, Homo sapiens
gatttcttcatatagacaagataaagtatttccttggtgctatactttatccatgaagagaacattctcctaagtgaaagaaacaagtcacaagagaccagatattgtatggtttcatttataggagagacccagaatcggcaaaatccatagagacataggtagattagtggttgccaaaggccgggggaaggaaaaaagggaagcaactgctaataactgtgggatttctttttgagagaactttttttttcttttcttttyttttttgagacagagtctcactctgttaccgaggctgcagtgcagtggcaccatcttggatcattgcaatctccacctcggctcactgcaatctccacctcctgggttcgagctactctcctgcctcatcctcctgagtagctgggacaacaggtgcctgctaccactcctggataatttttgtatttttagtagagacagagtttcaccatgttggccaggttggccttgagctcctgacctcaggtgatccacatgcc

SEQ ID NO: 41099 - DNA, 645 bp, Homo sapiens
ttttgaatagcttctaatctcttgttgttgaagggttttgacctggactcgtgaccccatgtttcaaaaaaactttttttcgcctcctgaccttgtagtttccgcaatcctaacctcagtatctgatccctgatgcctgtctccctggattctggacctcttacttgctaatctctccctcagctgacctctctggaattaatcagtgatccacctgccagtaccttttrtgcctaaccaacaaacccccagtcctggcctctttggctttatctctggtccattgtctcccaaaccctgttagaatatgctttgaagaaatggtctgattttcaaagatacaaaatcagtttgaaactttgtaatacatgaccctcgaaaataagcctagatacaaactcccaaactgaagacatttagtatgctgactacttgtcaacagaccataacatcagtcatgagtcaaaagaggaaggtgagcaggaagggggacagatatcaaggagccacttgaatgataaagtattttcaaaaacacaattatctatgtctggcttatctattctactaaattataattccttaaaagcaaagacttgaattttttccattttagattccacgcaatgtccgtatggtgcctgg

SEQ ID NO: 41100 - DNA, 1198 bp, Homo sapiens
tgcatccctcaccagataatggaacctacaggtgtcttaatcttggacttcccagcctccaggctgtgaggaaataaatttatattgtttataaattacccaggctcaggtattttgttatagcagcacacacatactaaaacagtgcctctgagacttagttttcttgcatgtaaaatatggatgttaaccgtggcccacttgagataaagcatataaaaaccttttcaaactagagctctacatgaagatgatatgtgaaaaggaatggcacaaaatttttagctaagaatttgtatttagttgattagttatatgtagttgatagttgagaggggagcagaatactgactcagaaagtgtgtgtttttgtgcaaacacactaagagtcagagtcaagtttatctcaaaagactttgagggttgccctccccagtttctcccccttttttcaaggacctcacttccagctaccagctctctcccttgctcattctgctccagtggcctccttgctgattcttgaaaatgtcatgtatgctatggcctcagggcctttgcatttgctctttccttctactgggaatacscttttcttagccattcacaaggcttgacacctgacctccctcaggtcattatctatgtgccattgctcatgaccatctaaaatcacaaactctccatccctttccactttattttcctttatatcactcattatgtcacttctgttacttatttttgtttgataattgtctgcattccttccactagaatgtgtgctccaaagggcaggcagtttttttgttgcatttactgttgtgtccctagatcagcgtctgtcacatagtaggcactctatatacatatttgttgaatgaatgctagtgaatgttcccttttcttaccacagaagaagcagcaaagtatccagccaaagtttctgtttgccatctattcaatttaatactaagagatttgtgcttgactgtctttgaagaaattaaagagaaggctaaagaatgttgtatgggtctgttgtaaaagctaccacaaaagggttgcaattaaaaataaaatttgacaagtaattagtctacatttctttttttagtctacattagttatcttttttaattttgagaaagacattacagattggttaagatatttcatctctgatttagcaaatgca

SEQ ID NO: 41101 - DNA, 813 bp, Homo sapiens
ttccctgaaaaaaaaaatgtgtgctacttttccactttaagccacaatatcttccactgtgccgggarcaatgcctcagaaataacagaggcaaataaatgtttgttgcatgaatatatgaaagagaaaggtgacttacaatgtccatacaaggtttgaaaagtaactacgagatctcattttaactaaattctttttctgcacatcactacaattttcccaaatatatctggttgaatcttaatatgttgtgttacctgataaaagatcaagtggacaataaatttcagaagtgctgagttttaaaatgttaagcgggatttgttttttgaaatttcagaatatctgtaatcataccatagtgctttgtatctcttgaaaaagtggaatagaatattcagtgtttacaacatgttttgccacaaaatatttgctctttctcaagaaaacacaatggggctactctctgctgattgtattctgagaatcaaaacacaagtaggattaaactcctgctaattaatttagtaataagtctagaaatagaaaaaatgaagtattaatagtatacaattttatttataagaataatttaaggaaaggttgccactcatgttgaattctaggaaaaaaaagaagcactagtttcctaaaagaaaaaaaataggacctattattatccacagatttaattgtttccccccaaaactgagcaagatcacggagcatgatcatttgttcaacagggaattcgtgtgaaattttctttattaactggctggaataggatacttgaaatatttttctccctta

SEQ ID NO: 41102 - DNA, 813 bp, Homo sapiens
ttccctgaaaaaaaaaatgtgtgctacttttccactttaagccacaatatcttccactgtgccgggaacaatgcctcagaaataacagaggcaaataaatgtttgttgcatgaatatatgaaagagaaaggtgacttacaatgtccatacaaggtttgaaaagtaactacgagatctcattttaactaaattctttttctgcacatcactacaattttcccaaatatatctggttgaatcttaatatgttgtgttacctgataaaagatcaagtggacaataaatttcagaagtgctgagttttaaaatgttaagcgggatttgttttttgaaatttcagaatatctgtaatcataccatagtgctttgtatctcttgaaaaagtggaayagaatattcagtgtttacaacatgttttgccacaaaatatttgctctttctcaagaaaacacaatggggctactctctgctgattgtattctgagaatcaaaacacaagtaggattaaactcctgctaattaatttagtaataagtctagaaatagaaaaaatgaagtattaatagtatacaattttatttataagaataatttaaggaaaggttgccactcatgttgaattctaggaaaaaaaagaagcactagtttcctaaaagaaaaaaaataggacctattattatccacagatttaattgtttccccccaaaactgagcaagatcacggagcatgatcatttgttcaacagggaattcgtgtgaaattttctttattaactggctggaataggatacttgaaatatttttctccctta

SEQ ID NO: 41103 - DNA, 541 bp, Homo sapiens
taggtttcataaaaccctttagaatcccttgggaatgaaagcattacattctgctgccccctggcagacattttatttactgaatgttgtgagctgccctaagaaatatgaaaacaggatagaggcagccctgtttttctctacagaagataaaatactctttcagtgtttgttgtttgatgaacaaatattagcactggatgaaatttgtttgaattagaaggttgctgaagcagaacaagcttgtctgagttcctggcctcaatttctctgtaagtggaaayagttaacattaaatgaaatgttaaaagcagataaatgttataaataagcaatcagagacaaatgctacagtcactcttctaggtgcattgtcaggaactcaacctatcaatcacaaagctaaatacagtgaagttgacatctatgtacattctcaaaggtccaggataatgagcaccttgcaactacaagcatcaattgtgcacacctgctagagtggaagaggaaaaacattgagctggtggagaggagtataaac

SEQ ID NO: 41104 - DNA, 642 bp, Homo sapiens
agcattttttgtaccatttatgttattcatgtgacaaatggattgccgtaaatgttctaacatacactttgcttcttttaaatagtgactgatattagtagatgtaatggccaaccttcaggtcttctgtctagagagattaatggcaagtgctttggtttgtaaactgagaaaacaaagaatcagaaacaatgctcaaacagaaatgcgattataaatgacaagaatattgagctttctcaactaatgtaggaagattgaaaacaggcataaaaatagaagtggtgttagttgcaaccatgtagattttttttttctgggcattagtaggaaataatatatttattgccaaatattaaacatttaatactatagatgccttttaaatgcctaagccctgcacaaaataatttactgtgccatcttcagagaatgtgtgtttcttaaagtcctttagaggaaaattcaagcaacctgggaaattgtgtcagggtaatctgatattktccttttagtatgggtcaaatatgcatttaacggacaattcaagtaaaaccgtttgagatctcacttcctttagttttctcgaagtgtcaccttcatggttgtctgttctgatgcttgaggtttctgtgtttaagg

SEQ ID NO: 41105 - DNA, 1174 bp, Homo sapiens
aaaacccagatcaaatgttacattcaatggttacatagtgctttatacatagtagaatgtataataagtgtttcaaaagatgaaagagatgttttattgaagccttcttcaacttctttctaaggagtcatgtcaaatattctgaggccagcttaagttaaatatatggtatttttgtaggaaaaatctgaattaaagccaggaagatattttgaaaagtctttaaaaatgtgaagcattatttgtatatttaatttaacacagtctttttaaatatagttaattcaaagaagagatattgtccctgttccctaccagatagctttgaaacccaggggctaatctcattaggtctgccaaatttaaccttcccttgcttttggtcatctgctttttattttatttttaaaatatttttttacccatgtagctgaaagcaccaccaatgactgctgtaacttaaccttccctggatttcttatagataacattcatttgtataaatattatactatggtgaaggtaatatattaataatatatggtattattaccatcaccatggagattgtcacttatgttgtttctgaggaacttggggccgctcctgttcagcttaatccagttgagaccactgacctttcaattgggcctgcagaaatgcccaggagttgacctttcaatatcggagggccaaaaacttcatcctcagatcatgataaggccgccattttctgaacatatgtcttgttaagagctaaaatcccgattaggcttgcatagaccactgattgctttttcctactgccaaacacctttctccacaccttagaccaccccacttctctaacccataaatatccttaagccctatcttcagggaggcaggtttgagagctgttcttcctcctccttgcttgtgactaacccttttcttttttgcaaaaccaagcatcacagtgatcgctttcttcgtatgggcacagtgaacctggttagtatcagcttttattaattaaaaaattaatacaagttaaagttcaaaatattgaaccaatatatgcaagtataacatgaaagtgatgccttctctactccacctagtcctamttcccaaaggtaaacaccattagaaatttattattcagtttccacttagaaaatcaatgtgtgtg

SEQ ID NO: 41106 - DNA, 584 bp, Homo sapiens
atataaccagagtttaattattaaaccaggaaatttatactgatacagtgccattctctgtagacgttattcttccaaatgccttaatagtgctttttatgccaacactcccccaacccccaccaaaatattgttccagagtacaattcaggatcaaatattgcatttagttgcctctacttttgggtttgtttagtatttttgcatgattaggttgatcagttttggcaggaataccrcaaaatggtacttgtccttttctgtcacatggtgtgccacctgatatgattctttgtcacttattggtggtggtaattttgatcacttgcctaaggttgtatctaccatgtttctcctgtttttcctgaaacttggctgtttgcttggcatatcttgtcggacagactgagttaagattcatgttttcaacccagctccttgccatgatcttcaaggtcccgctgagcccaccactctcccgcattgttcactgtgctccagccccactggccctcttttcacgctgggagcacataaggcttgtctccgggccatgcactcactattccttgtacttggaatac

SEQ ID NO: 41107 - DNA, 664 bp, Homo sapiens
agaaacaatattactttctttctacccatatattccatttaaagcctaaggcaaaaatccttttaaatttaaaatgaagtgactagatttaggtaaaatatttagagaaatactcacattacagagcacatgattcagtgattgtcctgtaatggcacaaaaattttccacaaaattccgaggtgcagaaaaaacccgaagaactttttcatctgctccagatacaaactgaaaccgattaatcattgccaaacatttcaggtcatacccatgtatctgaggccttgcaatttcatgccaagtcacctgggtaaaacgggataaacaaaaatgatcattcaaaagctgaattttcaataagcaaattattagatgaaaattatttactatacaatggaaatataaccatggggcaaatattcatccatgaataaaccacaactgggcagtattggtaaaaattaccaagagccrcagaaaaatcactcaaaatcatttgacttgtttttcagttgactatagatgctgttcccaatgttctcaactctatttatttgaatctaccacgtgttactcaagcagtagtgttagtggcaaacttcactagctcttacggactgacccacagtcagttccgtgaatttctatcagaaactgaagcaga

SEQ ID NO: 41108 - DNA, 664 bp, Homo sapiens
agaaacaatattactttctttctacccatatattccatttaaagcctaaggcaaaaatccttttaaatttaaaatgaagtgactagatttaggtaaaatatttagagaaatactcacattacagagcacatgattcagtgattgtcctgtaatggcacaaaaattttccacaaaattccgaggtgcagaaaaaacccgaagaactttttcatctgctccagatacaaactgaaaccgattaatcattgccaaacatttcaggtcatacccatgtatctgaggccttgcaatttcatgccaagtcacctgggtaaaacgggataaacaaaaatgatcattcaaaagctgaattttcaataagcaaattattagatgaaaattatttactatacaatggaaatataaccatggggcaaatattcatccatgaataaaccacaactgggcagtattggtaaaaattaccaagagccgcagaaaaatcactcaaaatcatttgacttgtttttcagttgactatagatgctgttcccaatgttctcaactctatttatytgaatctaccacgtgttactcaagcagtagtgttagtggcaaacttcactagctcttacggactgacccacagtcagttccgtgaatttctatcagaaactgaagcaga

SEQ ID NO: 41109 - DNA, 533 bp, Homo sapiens
aaaatgaagattttttaagaaaattgtttcttttgtattggtgtttggggctgggtgcggtggctsatgcctataatcccagcactttgggagactgaggtgctcggatcacctgaggtcaggagtttgacaccagcctgaccaacatgcagaacccgtctctactaaaaatatgaaaattaggtgggcgtggtggctggtgcctgtaatcccagttactcaggaggctgaggtaggagaatcgcttgaacacaggaggtggagtttgcagagagctgcctgggtgacaagagtgaaactccagtctgggtgataagagtgaaacttcacctcacaaagaaaaaaaaaggtaaaagaaaatagtgtccagaaaatgcccctttcttctgctagtttgagaaactgttctaagagggcctttcattgaagtgacaggatttttacagaagttgttgcctgtcgggtggctgctagaggctggggctggtgcaagctgcagggccctggcatcctttctgcaggagctggcccca

SEQ ID NO: 41110 - DNA, 540 bp, Homo sapiens
ttttttcattaggaaagctttcatagccatggtatagtaaaatattcataaaatacaattagagctctaaatgtgtttttaatctcatatatgcatattcacgtgtgtatttgtgtgcacttataatgcaacaacagctatgacagaagcaaacatttatatataagatcattttgctgtccaagatattatggtgatcattccaaaattgtgttttcccaaggataagtttggataaataaaaaygctccatgaatattcagctgtgcttttggattgagatttctactgttctgaataaattccaaaagcatttctacatttaaggttctattacttcttgaaaggctagtagctcactgtagaaaagagagtttgatttgctgatgcttttaaggcaggtttgtgaactcagtcaaagatatcagctagagaaatagttgtgttgtaggtatgttttctgcctttgagcatttctacacagttaaaacttttcacttataaaatataagataatcattcttaccaattttgtaatca

SEQ ID NO: 41111 - DNA, 1355 bp, Homo sapiens
tgcatctgttgagcttaggatcatcatcatttctattctaaggtgccaagcagcragttggattgatacatgctaatgtgtttaaggagaaacttggtgatgtctagttcctttgtcccagacacttctctgctctttatatttcaacaatggcctcttagagaggtcatttatattagattcagaattggtaagagtacctttatgtaatttcctcatttgaatcctcctaataatcagctggtgagatgagtaccattaccccttcgtaccagcaatctggcctaaatatcagaaagcttacattatctgctgggccacagagctggtctgtgctatagtccagaatcagaccacattgaatatatgtatatatatatgggctttttccacactatcatatagactcttctccatagccttcaagaatgtgcagtccagaaaatatcctaataaaaaccttttacaagacaagaataataattaaatgtgaagcaaatgttatagaggaaatttaactgctttcaccttgcagagctccaaatattcatcctcaaaattaggaacagtctcaagtttgaccatgggtttttttactgtttttttaataaaggaattttggtgcaataatgaattgaagtataaattatttcaatgattgactgaatcaaattataaagtaatgttgtgataatgagtttctaggactgagaaaaaaatgtttaccaagaacatcaaaagcaaaatgtgtaggcctggctactaaaatataagcaaccttcctcagctgaaaagacaagcaaacattgaattatagaactttcttctatgacatacctctaacagaacaaagaagattttcaactaagaacataatcttgatcctaaagaaagtgagataagactttttcaattcttcattatttgagtaacttatgaaatatgtatttttgtctgtttagcaattttgagaaatagaggtcataataaattctaccacctttgccaacccctctaccacacatcactgtgttttggttctggaaatcaagaaattaaacttatccctatgatgtcaaaattggtaaacttaacaaaacttgagatatgaaagatatgttacatttcatgctcaaattgaactaaagcaaatatgagattcaattaattctccatttgcttttgaaggtatgtgtgtatatctgtatggctacaaaaataacaatgtaattcaatttgtggtttagcattttcaagtgatcttatttgattgatagaaacacacacatatgtatatgaaagatattttgtataaataagggcaaaggaaaatcatattaactgaggcaggcaaa

SEQ ID NO: 41112 - DNA, 884 bp, Homo sapiens
gcacacacattttaataacagacctcttatttttgtctctgacatgtgtgtaactatttcactatttttgtattttctttatttgtatttttggcctactttttcattcttgcagtctttcaaaacttccaagttctttctatcttgctaacattttcataaaagtagcattttattttgtttttccacactttttgttttttattttgttgatttatgcctttacattttttattatttttattattttcattgtgggagttaatataattattatttttccagtattggagttgaatgtctaactattttgattcatgtcccttttttttttttaatcttaatataaaggttctggccaggtgcagtggcttacacctgtaatcccagcactttgagaggtcaaggtgggcagatcrcgcagtcaggagatcgagagcagcctggccaacatggtgaaaccccatctctactaaaaacacaaaaaatacctgggcatggtggtgcatacctgtaatcccagctactctagagactgaagcaggaggatcatttgaacccaggaggcaaaggttgccgtgagacgagatcacgccattgcattgcagcctgggtgacagggcgagactccatctcgaaaacaaaaataaaaataaataaataaatattctgctgcattttacaaattttgacaggttgtattacattaatatttatttctatgtgtttctgaatttttctattattttatttttaaccatgcaatatttaattatatgctacttaatttcttcagcatatgaaatttgtttagctatttttagctactagcttttcactctgtaggattatgtttaaaatatgaggagtcttcaaaaagtttt

SEQ ID NO: 41113 - DNA, 884 bp, Homo sapiens
gcacacacattttaataacagacctcttatttttgtctctgacatgtgtgtaactatttcactatttttgtattttctttatttgtatttttggcctactttttcattcttgcagtctttcaaaacttccaagttctttctatcttgctaacattttcataaaagtagcattttattttgtttttccacactttttgttttttattttgttgatttatgcctttacattttttattatttttattattttcattgtgggagttaatataattattatttttccagtattggagttgaatgtctaactattttgattcatgtcccttttttttttttaatcttaatataaaggttctggccaggtgcagtggcttacacctgtaatcccagcactttgagaggtcaaggtgggcagatcgcgcagtcaggagatcgagagcagcctggccaacatggtgaaaccccatctctactaaaaayacaaaaaatacctgggcatggtggtgcatacctgtaatcccagctactctagagactgaagcaggaggatcatttgaacccaggaggcaaaggttgccgtgagacgagatcacgccattgcattgcagcctgggtgacagggcgagactccatctcgaaaacaaaaataaaaataaataaataaatattctgctgcattttacaaattttgacaggttgtattacattaatatttatttctatgtgtttctgaatttttctattattttatttttaaccatgcaatatttaattatatgctacttaatttcttcagcatatgaaatttgtttagctatttttagctactagcttttcactctgtaggattatgtttaaaatatgaggagtcttcaaaaagtttt

SEQ ID NO: 41114 - DNA, 573 bp, Homo sapiens
atatgggaatacttttgtattctaaaattcatgagacttaaaattatcaagttagttctaaaaatgtccatggtccccattgataatgataggttaccaacgaytacttttgacagaattcttagttctcatatactaaaatatgaagaaataaggctgtagaaaatccaacagttttgggggaagataaatataaaaattaagctccaacgatatgatgagagacgtagaatctattgatatgaatagaaagtctggggggtgggggaggaaaactttaacaatatcaaatcctgtaactttatttggtggatatggtaaccaacatctcaagaatgcaattgacttgcctagtgttagtgctagtacagagttagagcctttgctgtctagttttgatccattgtctcataatcatttctttatgtaagatttttgcatcacccacttttactcagtcctcagtatttgcgctagtgatagtaataactattgcaataaatcaaaaagtgttgctgatttggcagatgtgaaaaggaaaaaaagtggaattttactccttggcgtaattga

SEQ ID NO: 41115 - DNA, 598 bp, Homo sapiens
agaatcccattagactacagagaaaaaaaataaaagaaaaaatgaaacaggaaaaaaaggaaacaaaagccagaagagaaaataatgttaaggcacactgttaagaaacacaccggaagaccctcatgatctcccagctactgttccatctgaatgctgtgtaagggtttgcaagctgaaaatcaagtgagcagaggggagatccctctcaactgactgtgaacaaaccctgcgaactccagagccatttgtctaaaccaagtgctgaaagaaaggaagcccgagatggggtagccacgaagattcatttccttgtggagtttggctattcctcctcacttttaatcaatgcaatcctgtctaaatagcctactttccttagcaaagaagtctggatttaagctctgagcttgcttttttttattaaaggcgtgttggcaatatcatgstacatgacttccctgatttctagcaaacagagtcatagataacctgaataccagagtgctagctgcttcaccccagttgaaatcagcctagaataaacatgtaagtcatatagtattccagtatgaataaacacgatctgtgtatttat

SEQ ID NO: 41116 - DNA, 756 bp, Homo sapiens
cttaggcccaggagtttgaggttgcagggagctatgatcacatcactgcatccagcctgggcaacaaagtgagaccccgtctcttaaaaaaagtttgctcagcccagttactcaggaggctgaggcaggagaatcgcttggacccaggaggtggaggttgcagtgagccaagatcgtgccactgcactccagcctggacaacagagcgagactctgtctcaaaaaaaaaaaaaaagttkgctcaggagactgacgcaggagaatcgcttgaacccgagaggtggagattgcagtgaaccaagatcgtgccactgcactccagcctgggtgacaagagtgaaactccatctcaaaaaaaaaaaattgtgagcccccaaattgtcagcttcaggtaagtatggcagagctacaaaacccaacaccatccatgattttggaattctcttggctcttgaaaataacatgaatagtaatagcaacaataatgaaattctgctacttttagtagcttataagtaagttaaatagtttgctaggaatcttatgtaataattataacttaaaggagttattatttttgagcagttatgtgccattgtaatgtgtattatctaagaacaagcatataaataataatagctaatattcacttaagctcttaaaatctgcctggcactccctccccccttgtataggaagttaggctccaagaaggaagcgacttgcttaaggctacgcagctcataactggcaaag

SEQ ID NO: 41117 - DNA, 695 bp, Homo sapiens
cccagcactttgggaggccgaggcgggcatatcacaaggtcaggagatcgagaccatcctggataatgcagtgaaaccccatctctactaaaaatacaaaaaattagcagggtgtggtggcaggtacctgttgtcccagctactcgggaggctgaggaaggagaatggcatgaacctggaaggcggagcttgcagtgagccaagattgtgccactgcactccagcctgggcgacagagcgagactccatcaaaaacaaaaaacaaaaacaaaaaaacaaaaaacaaaaaacaaaaaaaaaaaamaaaaaaaaggattaactttagcaatggcagaggtgcagtcacttataattgtaaattccaggacctggagtaggtgcagtcacttataattgtaacttccaggatcttgatagtagcattctcatgctgctatagagaactgcctgatactgggtagtttataaaggaaagagaattaattgactcacagttcctcattgctgggcaggcctcaggaaacctacaatcatggcagaaggcacctcttcacagggtggcaggacggagtgagaatgagtgccagcagggggaatgccagatgcttataaaaccaccagatctcatgagaactcattcactatcaggagaacagcgtggggaaaccacccccatgattcaattacctcccatt

SEQ ID NO: 41118 - DNA, 695 bp, Homo sapiens
cccagcactttgggaggccgaggcgggcatatcacaaggtcaggagatcgagaccatcctggataatgcagtgaaaccccatctctactaaaaatacaaaaaattagcagggtgtggtggcaggtacctgttgtcccagctactcgggaggctgaggaaggagaatggcatgaacctggaaggcggagcttgcagtgagccaagattgtgccactgcactccagcctgggcgacagagcgagactccatcaaaaacaaaaaacaaaaacaaaaaaacaaaaaacaaaaaacaaaaaaaaaaaaaaaaaaaaaggattaactttagcaatggcagaggtgcagtcacttataattgtaaattccaggacctggagtaggtgcagtcacttataattgtaacttccaggatcttgatagtagcattctcatgctgctatagagaactgcctgatactgggtagtttataaaggaaagagawttaattgactcacagttcctcattgctgggcaggcctcaggaaacctacaatcatggcagaaggcacctcttcacagggtggcaggacggagtgagaatgagtgccagcagggggaatgccagatgcttataaaaccaccagatctcatgagaactcattcactatcaggagaacagcgtggggaaaccacccccatgattcaattacctcccatt

SEQ ID NO: 41119 - DNA, 2231 bp, Homo sapiens
acacacttcatccaaggacaaaatggactcctgagaaaggtgtgagacccaggcagagatgggcagcctgtgaaacaggcaacagatgctcaccttgtcatctctatctctgtctccccaccagrgctcaggacaatggcccccaggagccactggatgttccattttagtcctggcttgtacggagtgcgccctctttctgagaggaggtgagagggaagggatggaaagggccaggctccctgcatgctcccagggactgcaattctctcccagtaggcaggaggatgggcaattacacatacagaggggtgtctggtcaaaagaaccaacaaaatcccatggcttaacaaaagccttcaaaatcttctctgggaaagaattccaggctctcccaaattgtaactcattgtatcacgaacacttactttggaaatcatgtcagattctaaatttgaagaacacttctaatatctgagcacctacctactgggtgcccagggtagtgcttggcggttttacatctttggcacagagataggcatacatgtcttattgtctaacagtagtaattttttttgcagactttgattctattataacagctccagtattgtgcaataactgccgtcactccagtggaagcattgttcctggtctgtgacttttatttcacgagtagataaagatttaagagggaaatgactgagaaacttgtgtttggattaatgtaaataagacacaaggttttcatgcccttctgctttcactggggactcatttccctaatacagtctcgttgtaaaacaatccactcctgaggaggtcaacagtgaaaagtttgtcttctgaaattagtaatcaaagagtgaaaataattaatagagaaaacagtgcagttccacactgcgttcccatgtagatgtctatagaacaataaatcagtaggggaaagaaacaatataggcatttacaattaggcctcatgcataatgccctggaaggagaatttgtgttaaaaaagacaacatctgctgcaagttggtttataaataatacagctagatattcaggtaatgacatgacagacggtctcttgtgtccttgtcctttcgtgtccagtgctgagtgtgtttacatcccgcagcttatgacatacatgcctggcctgcttgtgctcgggccaggagcctctctcttctcagttaaatgcttctttacccaaaccatagcattccacattgacgacccagatatccagagaaatctgctccatttggttttaattgatcccttactgtgagaaggtaagcgcctgaaagaagtgtgatcagatgctcattcagtactttcatccatgaaccaatttcttttgtgttgacacccaggcttgacaaaaagagtgatggttaaggtcaagtgcatgaaagctaattctaaacaatgatggatgagccaaggcttgggctctatcttatctaggatgttctgctaaaaggttggatattttctccccatttttaaaagtcctcttattctcaaattaatggagttatcacagatccagtatttgtggggatcttttcttttattattcagctctttgccactctgctgacagcagtgtgagtgatggccttcaagcagatgattcttctttgccatgaaggaactgataaatactgcctgtctctgcaataaattgtgcatgaaatagtccactctggtaatctacagagttatggtaaggaaaatggctttgtgaggaaatacagcaaaactgaaattaactgaaatccagttaaacagaatctctaaagaagctgaattatatgtttgtttatttgctattgtttgtttctatttatattcatctttgggggaaaatagtagtgttgtctggggcttaatcaaaaaattcattttcaggacatttaatgtaattagagatttattcccagctctggtaccttctatgtcctcagtccttacctatgagatttcccatttataatgatgacccagaggccaagcagcacccagaattcacaaataaaaataaaaataagcttatgaatttccatttcctaaaatgaagcaaatttatgtatgacacacatttgtcaatagtaaagaccgaataaaaagatgcaaaaattaaagattttaaattagaaatctcaagctccattttagtatataaggatttttaccatacttagtaacacata

SEQ ID NO: 41120 - DNA, 647 bp, Homo sapiens
atgcacaggacaggctcccataacaaaggattgtccaacccaaaatgtcagtagtgccaaggttgagaggcattaacctagagacaagattaaaaggagaagagctctgaggactgagccctggagtaccccagcatttaggggtctagaagagaagactggataggatagcagtgaggtagaaggacagccaggagcatatggtgtcccagaagccaagattcaagaaggaatgagcaactgtgtcaaatgctacttagtaattgaattagatgaggactgagaactaaccatgaaatttagcaaaatgtgaaggtcatgagtggccttgataggaagcaaataataatcagctctgagactggaaagtgagttaaccaggacagtacagtagggtggtcctagagtttagtcaaggtaagtttcaagtgagattactcagcactaccctttcttccagccattttcggctccctcgatgcaggtatagagtagaccaagagagctgagtttaatgagagttgaggttctcccaatgagtatagcagagatcagcaaaggtgttgatggaatgtgccctagagtgagtgamaggtcacactgagccatggaattctcactgggggctgggtgcagtggctcatgca

SEQ ID NO: 41121 - DNA, 1531 bp, Homo sapiens
tatttattggtatattcatttttcagtatttatctaattatttagatctcttactgattactttttgtgtaaatgaaaatgtcatttgtgctatgtattcttccatttgttgtttgaattgcaattttatagcttaactattaaagttgtttttttaaaatgtagtcaatattttcaaaattttcctttgtgatttcattcttgggtgctatgcttctagctgagatgatatagattcatgattctgaaccaggggtgactatacccactagggggcaatgtttggagacagctttgattgccatgactggggaagctgctgtttgcatctagtgggtagaggccagggaagctgctcaatatgctataatgcccaggacagctccccacagcaaagaattagccagtgcaaaaatatcagtggtgctgaggttgagaaacgctggtataattaccagtgttttcttttaatactttgctatgtatctctattttttgaatcctaaccactagcccaacagggaatgtaactgtatttactctggtggcttatttaaggtaggtttttttttgtgtgtgtgtgtaagttaactgagtgttgagtgcacttcctaaagagtcatccctttcatcactaatttgcagtgtcacttttactgtatactaatattatatacttttatatcataaattaaaaatatataaagtattatatactaagttcataaaatacattcaaatatatacctatatttgcatttattttcaggccatttatcttagcgacctttctattttcccactgtaactatattgtttttgtgtcttcatcttatattttcagatctgataacaaaagccctgacttgtgtttattctgactcaaaaagtatgtggatggcagaaaacaagagaaataaagtcaaaagtcaaatgacagactgaagatatctgcaaaacatatcacagataaagagctaatatctctaatatacaagcagctttttaaaagtaaggacctgagaccatcctggctgacatggtgaaacctgtctctattaaaaacacaaaaaaattagctgggcatggtggcacgtgactgtagtcccaggtactttggaggctgaggcaggagaatcgcttgaacccgggaggcagaggttgcartgagccaagattgtgccactgcattgcagcctgggtgacagagacagactgtctgaaaaaaaaaaaaaaaaaagaaaaataggcaaaatacatgaaaaatcaattaactaacaagatgtacaatggctttcaaacctatgaaaagatgttcaacttctttcctctaagagaaatgccaattaaaattatactaagataccacttcttacctaacatattgattaaaaattcagaagcttgacatcacactcagttggtaaggctatggggtaaaaagcatccttgtccatagctggtgagaatacagcatgatacaacccgtgtggcagggaatttggcaatatcaagtcaaataacatatgca

SEQ ID NO: 41122 - DNA, 551 bp, Homo sapiens
ggccacagggaatttgaagaccacaatttgtgaaagttgcaggctccagaacacttattgatcactgggtagtctgctggcttcaggactcacatttcccagaagggaacccacacaaggattatgcatgaagtgtgcacacacagagatgcagacacactcacatagagaagcaaacacaaaaggcagaccaggcagacaagaagcactgctcaaacactgagttcaaaaccaaagagttcttcatgatctcaaggaattagagaggaatgattctgaaawacagctctgctaggtgtagtggctcattcctgtaatcccagctactcaaaagtctgaggtgggaggattgtttgaggccaggagatccagactagcctggaaaacagcaagatcctgtatccaaaataaataaataaataaataaataaataaataataaatacataaataataaaattaacattggcataatggcgcatgcctgtagtcccagttacttgggaagatgaggcagaagggtttcctgagctcacgagtttgaggctgca

SEQ ID NO: 41123 - DNA, 1050 bp, Homo sapiens
ataatatgcctgattatcacagtcttacctttgtaacttcaacttctagaagttctgtgaaaactgaacagcaaacttcgtgttggacacataaggaagagtaggaaaaactttcttctttttgcttcacagtcttctcagcaaactctcgatgtgccccattgcccagagttacagacgcttgtgcttttagtaccacaacactgtcagtatgtcactgcttactcaatgctattttgggttctctgagtagagtcataaacactgagccttttgtgcaaaatatcataagggcactctgacgctcgttcatagtctggaattaaaatgcagacagctacgcaagtagtatgagctgattatctttgttttttttttttttyccctaacaacaagcaaaaacaaaataaagtacttattggcctgagttgataaagggagaattcaacttacatacaagaattttgcaagtagagcggacgtgccctctgtttggggattagctgatgaaacaaatgatcaatttaaagcagacccaaaacttactgaaaagagaaatgattttccactgtgtgtctatgcctcatggctgtttcttaattcggtcatttctcctcagaaatcaagtaaagacataatgagagagaaatgtctaaactttaataagtccttttcttttccttggtttattattatgtaaaatcttttattttattcatggttataattagattttgatataagctattattatttaacataaaatacatatgtattttctatgctgtttactcaagctgttatttacttaaaaaccatttttgaaccaaactagagaaacattaaaatattaaaagtttcttaaattatacctatataataagaaagtctatgtggggcaggattattcaagcatcctgttaattctgatagatattttggtcactatcctcttagcttttgaggaaagaaatggcaaaagctatatgggcagtaaagtaggacactcaagcacacacatatacacacatgcacatgtgcacacatgca

SEQ ID NO: 41124 - DNA, 1348 bp, Homo sapiens
gcttcttataaaggaaacattttaactaaaatctccagggtatgcaggaagtagacattaaaaatatgtgtacttaagcrtggtggcccacccctgtaatcccagcacttcagtaggcctaggtgggtggatcacctgaggtcaagagtttgagaccagcctgaccaacatggtgaaaccccatctctactaaaaatacaaaaattagccgggcatggtggtgcccacctgtagtcagagctgctcaggaggctgaggcaggagaatcgcttgaaccaaggaggcagagatttcagtgagccaaaattgcagcactgcactccagcctgggaaacagagcaaaactctgtctcgaaaataaataaataaataaataaataaataaataaataaataaataaaataaaataaaagttttttaaaatcatatgtgttcttgaagggtggtaagggacgagaaagatgtaggtataagaaacaaacattctaggctaatgtaaattgacataaaattactctgacttgggaaaaagttggacattttaaagaagctgataaagggcaggataagaatataatgaactcactagggagtggcattcaatgaagtgaacatggccagaaaggtagggggggagaccagatgctatttttgcttttaattcaaaacagaaagacagtaaagcttataagatagatcatggcagtgtgagaaagaaacaaaagagaaagcatggagatatgtttggaggctattaataattgggaaatgagagttgtgaatgatgtgaaatgagagtgtcttggattagaaagaggcagcagaattacggggtaataggcgagctaataaaaccatgttcttcaaaaacaaagccacagaatatttgttcaacattaatgattgtggttaaatgaaacaacattttctattaatcaaattgtgttaacctttacattcaaaataagatgttttctgtgtactgattctagcacgacattttcccctacttggaacttatcttttatttccatttcctgtcacatataagagtattagttattcaactcatcaaaaccagactgacttagatgaatataattacacatcttgcttaaatatgttttaaattattttatctggatatcaagtccacaaagtatgtcttataattgtgcagttctttttcacttcagtttcatttagaatgttctaaatcagatacactcttgagaagtttacagtatttaacattcaggtaatgaaataaattatttttgtaagtatttattacttcacatggcattattctgttttagaatggcaaatatttttatttacatgtgc

SEQ ID NO: 41125 - DNA, 1228 bp, Homo sapiens
cattctgatcatccattccttaacccatgatgtttaaattacaagtggaatggtggtaaaatacatgacttacttttacaaaaatgaactaacaataatgcttggtgttcaacattcaatttaagtcaccatatatatttgataaggcaaaacacacacacacagacacacacacacacacatcagccttttacaaacgttttgggggtatggttattgcggtggccatgagaatcccccgtatgacagacctgctatggggagtatagttgacagcccagtgagcatccctatggtctctggatctaccaccatagatttccaagttcataatttccccaggctgctcccagccaatgattgaccatgacagggctactagtgctagcccatctcaatgggacatgagactacccttacagagtgtttggactcaaagaattcccacaagctcaaccaaaatttacaagaatagtgtgacaattttagatctatcttatccttcttttttcccactcccttttcaaaagcatctggttagagtttttaatctgaccgttctcccttgtctacttctgattccatgtatttatgctttccaagcacattcctcaataaactttttgtacttataatctcatcttggggtctgtctgcctcttgggagatgccaaccaacacaattatgtatattctcagcaagaacatgataggatccactttcttgttcattgctgataggtgattccatataatgttagtatagataaaagcaaattgtctggcatgtaatcaattcttttgccattaaatactgcataatacaccatgtgatccatgtgtatgttactttctttaatcaatactcaaattctgtctggtggttaacttttgaaataccggtttgaaatatttactttagacaccctccatcagtatttgaaacattctaaataggagctcgcaattttgtggtggtcatgaactgtgcatcaaagattgctatctaaaccttcatgggagggttcatttattagcatgacaaaattagttatgtttcaatagttcattaagttggaaatgaattacatttaagaactgtagtttgctggaaggaatatattgatgtgttgaccctgatatagacaagaatatgattgttgttagcccagaaacgcaatgccttttcagagctatgccacrtttataatacctgttagtcccatgc

SEQ ID NO: 41126 - DNA, 1070 bp, Homo sapiens
ggtaatctgttgtttggcattaatatttgagaaacattgatatggaaagcctttcctaacctcctaaccatggtctccacccatctcaatggggtgagttaggtggcccatatttggtttgcttttcatcccccctgcatggcaatccattgaagattgcaataaacttgcattcatttccacatccccagattctagcacagtgcttgacacaagattttaactttgggaattgtttcattttccaatacaatgatttgtagatgaagaattgcaatgagaatcttcttgtgcactcagaaaggttgctctccaccatgggactacagtttgttagagggtcccctttcgttgcagtctttcttataaaaaacatgcttggtggggaatgyttctctgtgaataacttctggaagtccactgccaaaaacttcatttcttctgctttgttaaatactaatacctctgggagggatggcatttgaggcttggtgtgagggttgaccagttggcaggttttggtaagggtttagaaggaacagaatgcttatctgacaggagagggtaaggaacactaggaaagatatatggtggactcttggagaattgatttctaactctgacaggtgttgggatatttttgtctggaatcttaatgtaggtcattttttttcatttagaaaaacccacacttcttatctaaaaatctcagatgtgacttttttctccaatcctgactctcatctatgataaatttcatctagcgctacgttcagtgtaaaccactgatgccctagggaatttttttagatgtttgttttaaaattttagacagtcaaaagcacagtacttctacactgatgtttctaagttatattaagatttatcaggctgggcatggtgactcatgcctataatcccaacactttggcaggacaaggcagaaggatcgcttgaggccaggaaatcaaggccagcctggacaatatactgagactccatctctataaaaagaaacacacaaaaaattaagcaataactgaactatagggagctttcgctgtattcat

SEQ ID NO: 41127 - DNA, 1231 bp, Homo sapiens
aagacaaggcatgtagaacagaagcagctttaatgaagctcagtctgggttgtatgaaagccattgtcacattctgacacaatgatatgctggaagcactctttccttagtcaggaagtaggttccattgtacctgatcccaaatcccacaaagaattagaaacttaatttctccatgcaaacttccaagctacaaaatcaaagtttagaatctaaattagtccataaaatattgtgataatatagcaccttgaagggatcataataagccacacatcattactgttttagtccctttatgttgctgtaaaggaatgccagaggctgggtaactgataaagaaaagaggttgaggctgggcacggtggctcacgcttgtaattccagcactttgggaggcgacggcaggtagatcgcctgaggtcaggagtttgagaccagcctggccaacatggtgaaaccctgtctctattaaaaatacaaaaaaaaaaaattagctgggtgtggtggtgggtgcctgtaatcccagctactcaggaggctgagacagaagaatcgcttgaacccaggaggcggaggttgcagtgagccaagatcgcaccattgcactccagcctgggcaacaagagtgaaactccgtttcmaaaaaaaaaaagaggtttatttggctcatggttctgcaggctgtacgtgaagcatggcatcagcatctgcttctggtgagacttcaggctgcttccacttatgacagaaggcaaagggaagctggtttgtgccaagatcacatgaggagagaggaagcaagccacagacaagaggtgccaggctacttttaacaaccagccctcaagggaactaatagagtgagacctcactcattgctgtgagaatggcaccaagccattcatgagggatctacccccataacccaaacacctcccattaggacctatttccaacattgaggatcaaatttcaacatgaagtttggaggggtcaaatattcaaaccatagcaatcactattttcacagcaactcaagagaaaaaatttcactttgctgcctctcttcaagcttggaagctggagaagaggttctggtggaaagtacttcaagtgaaaagactttaaagacacaagttttaagtgaaacctgtctcccagtcaactctcgaggttcttgattcatttcattttgaaagagtggctatttttgtcttgttttcatcat

SEQ ID NO: 41128 - DNA, 548 bp, Homo sapiens
agaggttaaagagaaggatgtatgatcacttaggaaggaaaaaaagaaagcatctgaattattagaaaggtcatcgaaggccattcctaaataacttgactgttgagatcagtcatttctttttgtggtcacagattatggccacttctgcttctttaaaaagtgttctgtttctagcattattcygaaagcattttttttaaccacctagttttttggcctactctgccagtcataccccatgtgtacagaattttaaacaccttttctgtccttaaagctggaaacatctttgtcagtctgctaaaaatatgggtactctgagcccttctgtaatgatcactgtgtagatgacagaggttgctgagtgagagtggtcaccaaaatgttggcttagcttttaatatattcaaatttaatttaaattctaaaacaattatagtacaggctacacttagactgttaaccatttcaaacattttgtccaacccattaaatcccgaagtcctttgcttcccggagaactgattgtctactatggacgtctg

SEQ ID NO: 41129 - DNA, 548 bp, Homo sapiens
agaggttaaagagaaggatgtatgatcacttaggaaggaaaaaaagaaagcatctgaattattagaaaggtcatcgaaggccattcctaaataacttgactgttgagatcagtcatttctttttgtggtcacagattatggccacttctgcttctttaaaaagtgttctgtttctagcattattccgaaagcattttttttaaccacctagttttttggcctactctgccagtcataccccatgtgtacagaattttaaacaccttttctgtccttraagctggaaacatctttgtcagtctgctaaaaatatgggtactctgagcccttctgtaatgatcactgtgtagatgacagaggttgctgagtgagagtggtcaccaaaatgttggcttagcttttaatatattcaaatttaatttaaattctaaaacaattatagtacaggctacacttagactgttaaccatttcaaacattttgtccaacccattaaatcccgaagtcctttgcttcccggagaactgattgtctactatggacgtctg

SEQ ID NO: 41130 - DNA, 613 bp, Homo sapiens
attctacttagatgagttaccaagaataggcaaatccacagagaaaaaaaagtagttccaagggttggaaggggaggaggaaatagagagttattgtttaatgggtacagagtttctgtttggtacggtaaagttctggaaatagatagtggtgatggtggcacgacattgtgaatgtatttactacgactgagttgtacacttaaaaatagttaaaatggtaagttttatgttatgtatagtttaccacaatttttattttttaaaaaaggaacaatgacataggaaaaaaatcagggtttgccatattgtggactggtacagtcaacctttgcattccgagctacctggacctgttagacactgtcacctgcagtttgggggccctgttaatatctttccttggaaagtactcactactcactgcctgtatttattaactactccgtttgtcccagatcatgcccactcacctccctgcattgccatcagggcgamcctctcttcccgtgaatcctgtctgcccctatgttgggctaaggctaaggttaaggcactgaagggtcccattactgtgacaaaagagcaatggccaggaaagaaatcatgcctc

SEQ ID NO: 41131 - DNA, 528 bp, Homo sapiens
cacgctcagcctgctctccatttctttgtgaccattcacacatccttgaggcatgagcttccagggaagcctcatttcatgaggggtatcatctaggtcaggttttcctcatagctgagtagattccctgagcaatggacagtgtagaggaagagctagaaagctgataagttctttttttttttttttgagacggagtttcactcttgttgctcaggctggagtgcagtggcacgatctcggctcactgcaacctctgcctgctaggttcaagcgattctcctgccttagcctccctagcagctgggattacaggcacccgccaccacgcccagcttattttttgtatttttagtagagayggggtttcactatgttggccaggctggtcttgaactcctgacctcaggtgatccacccacctcggcctcccagaatgctgggattacaggcatgagccaccgcgcccagcccaaaagctgattagttcttaatcattttgtggtagcttcttggggaagtgcatga

SEQ ID NO: 41132 - DNA, 568 bp, Homo sapiens
catctgcctcgtcctcccaaagtgctgggattacaggcgtatgccaccgtgcctggcctgagttactgtcttttgcaaaatgcttatgtttctcataataatttttaaattgatagaacctaatgattcagaatgtaaaatacaggttaggaatggggctcaaagattcttacttcaccaaatctaggactataatactttctctgtaacaagcatcttcagtggaacaagggtccctacagccagctggggaaacactggctcgtgggccttgccagcagaggacacagataaatctgtgtgcagcccctgtaaagaggaggctccttgaggacacaggagagcagtgcagcatgtcctgggctgatgcctgcagagtcttttgtaaggcagggacagttgggacactgtgaagaactactttagagcaatgacgaagataacaatttcatgctaarttaatcactgttgtccccctcccttaaaaacagatacgtggttgcagtaggattggagtgtggaaagatttgcttatatacctggaaaaagactgatcaagttccagaaa

SEQ ID NO: 41133 - DNA, 645 bp, Homo sapiens
gagggtgccaggtgagacagacatttgcccaaaccctcaatttccttggtgtcttgtcttccaaggtttttccacatggagttttctcccacatagtgctgaacttcttccagtccrtgggtggcgagaggttttagtaatattcgtgcagcagattcaaaagctctgagtctttcactcactactgaaaatatagaaaggggctgaatttcctgttaacttgcccataatggggaagatactcatgtaatcccttgactatagctttaagagttgggagagatagatcaggagttgactagtgaccaacataatcctatggcattcctaataattacatttgcgagaagctcgctgtatctcaggggagccaattattttgctggacagtattacttgttaaaccaatccaaatccatttccctttcatttctctaaaggtactagctcttcccactgaagtagcagagaggaagtcagtcttatagccataggattacatttcaaatatttaaacattgctataatttagtgatctcttttccaagatggaactccccaacttcctcaggtcttcctctagctgatgctttaggtctttatccttgtcagcctcctctggatgcactggactttgtgaatatt

SEQ ID NO: 41134 - DNA, 2485 bp, Homo sapiens
agaggagaaatatctaaaccttatttctctaagtcctcttacataaagaacgttgctgattttaaccttccagtttggaaatatttcttcccattcatcaaattctgaaaataataataactggcctttgatgagtggttcatttgtgccgggcacacttctaagccccttactttgttatctcattcagtgttctaaacaaccctgctttgcatgctttgatgcaattattaccccattttacagatggggcaagtgaggcacaaaaaggttaagtaacttatctgcaattcagttcttaagagttccaagagtcaagatgtagaattaacactcttgaattcacttgtaaactgagacctgcagaagaattcatttgggaacatagagttgctatacatagaatgaccttcctattcctaagtgaaactgtcaccaccaccacggccaagtccatcgtcctccccttgctgcatctgcaggcagttggcccacctcctggccattctcggtgggtctcattctgaggcagtatctctgccttgaggcttttgctccaaatgagttgatccttaatctgattatctatgcatgcagttggcctattcaccacttcccagaagcctaagcctggagtgtatagtccaaaattctttactatatattaatagaaagtaccttactcagccttgcagctgtttatatcactgtgcaatggtttccaggatccagctgtcatcagtcttccccatatgccatctaaagagagatgagttgcaaggttctattaccaggcctcccgtctagcaacttgatatcaattacagcatttagataatgctggtaaaawtgatgaagaagcttgatgtgtcatctatggctgaactaccattctccaattttttaacagcttgctccgaaattgagatcatataagggccacatcctcttagccattccagaaaaatgttgagcttcttaatactattttattttcctcttttttctgtcaatgaatcaactatcaaactaaaatcaaggcagaaaatgtttagctgtatattcatactaacatcaagacagaaaacttgtagctgcacattcatttgctctggatctagaagaaaaataaacgaatccctgccttctctcaattaacactgctctagagaactatgctgctttttacagaataatctaaaacctcctgtgtatgctgttattgtctatgtaactgtaaacctgatatgatgcttatagtatctttggctgctaatttagtccataatcacaaatcacaattattcgtgatataaagacacaaaagatagagagatgatcaaaataaagggactgccttgaaaatatctcacccatataagagagacagcacaaaatcaaaatcaaaatgtgatcatataataattaaatgctattagaggataatgcacaaaattatgtcttaccattttctacatgaacatatggtgtttttatagtagaagaaaaaaatacatttttcttactttaaagctcttcaaagttaaacgtgtatctcttgcaccagcactaattggttgcaactccaggaacttggatctgtagtccatgagggtagagctcatttatccctggctacttctgaagtaggacagaaatgctacttccctttaaagtttgcagttacgagtccttgcatcttctccccctcaaagcaaagcaaaaacaaatgaacacaaaggaaaggaaggtttacattatggctactaaaagatatgtttctggtaagtcctctcatcacctaaccacacaaatgcatggaactttaaagatgctgtggtttcttcctagcctctacaggctctttttttttactgaaggctttatatgctgccatgtcccgggctaagaatttagagatgagaagtccacttagcattgagggataaacagttcaccggaagagacttctaccacagaactccaacagaaaatgcttcttttattgaagacacttgggcattcaaaaattcaagtccaacatgacaaatgtgggggtaacgaataaatccaagatggcgccatcaactgtaacataattggatatctcatcatctaatgcttgctccaggagtatgataactgcttcagacatatttcatttttcacgtattcttagcaaaaactaaaattcagcatatcccctgcaagaccgaagatatcatgatttttctcatctctcagaatactttggtacaaatgtttagaaaactgtgagctgtagagagtgatttcacaattggtatatggaaagtcctcagagaatgaagtattgtaatgtaacttaagtcacatgagactggatatacttctggagtccagcccattaaaatagaactacatgggatcctattcaacaagtttttccattaagatgaataagactaaaacgtccatcagcagcaatgtcctccaaatgtagcta

SEQ ID NO: 41135 - DNA, 1138 bp, Homo sapiens
tctccttccctagactgctcttcctgtcatggtakaaacagtaatgttaagcctttgtgcacctgacacaattttagcacagtgctttgtatgtatgtattacatacatacattaagcagtaggtgcttaatggatacatttattgataatggtcagatcaatgaattctatcttctttccagaccaatccaaacttaatgatcttcatgcttggagaactcttgctcaactttagacactattcttgtgtccttaacacaccttgagaagcatggcttctgctgttattttattttacttttgccttttccacatgttctaacggctgttttatttttgaggcagcatgtgaacaaaaacacagaaagccagctgcctcaacattcaaatgagagtgcaaattcctactataagaggtgtggttatatacttactcaaatgctcacattgtaagaaggaatatagaagaattcctaaagatgcccagataaatggcagtgaactcaaaattcatatatgtttgttgaaagatgccatggaaaaggagttttgattctgcaaccacagtaggaagcaactcggttgacttgggagagtttttaaaggtctattacttcaacgtagagatctgactgacataaagcctgtgcattttatttatgtattcattcatttatttattgagacaaggcttgctctgctgcccaggctggaggtcagtggcacaatcttagctcaccgtaaccttgaattcctgggctcaagtgatcttcccatttcagtctcctgagtagctagaaatacaggcatgcaccaccatgcctggctaatttttatttttttcgttgaaatggggtctttctatatcctaggctggtcttgaactcctggtgcctagtgatcctcctgcttcagcctctcaaaacactgggattacagacatgagccactgtggctggccaatgctgtgcatttaaagcaggcccagtgcagctctgtgcaaagctattttaattgagctggctgagtacagggaatgaagtgtccagaggtgagctccagggcctcggccctctgtgaggcttgcttctttgaggcaggcttggctctttgtcagtatttctgctgagctcaagg

SEQ ID NO: 41136 - DNA, 1138 bp, Homo sapiens
tctccttccctagactgctcttcctgtcatggtataaacagtaatgttaagcctttgtgcacctgacacaattttagcacagtgctttgtatgtatgtattacatacatacattaagcagtaggtgcttaatggatacatttattgataatggtcagatcaatgaattctatcttctttccagaccaatccaaacttaatgatcttcatgcttggagaactcttgctcaactttagacactattcttgtgtccttaacacaccttgagaagcatggcttctgctgttattttattttacttttgccttttccacatgttctaacggctgttttatttttgaggcagsatgtgaacaaaaacacagaaagccagctgcctcaacattcaaatgagagtgcaaattcctactataagaggtgtggttatatacttactcaaatgctcacattgtaagaaggaatatagaagaattcctaaagatgcccagataaatggcagtgaactcaaaattcatatatgtttgttgaaagatgccatggaaaaggagttttgattctgcaaccacagtaggaagcaactcggttgacttgggagagtttttaaaggtctattacttcaacgtagagatctgactgacataaagcctgtgcattttatttatgtattcattcatttatttattgagacaaggcttgctctgctgcccaggctggaggtcagtggcacaatcttagctcaccgtaaccttgaattcctgggctcaagtgatcttcccatttcagtctcctgagtagctagaaatacaggcatgcaccaccatgcctggctaatttttatttttttcgttgaaatggggtctttctatatcctaggctggtcttgaactcctggtgcctagtgatcctcctgcttcagcctctcaaaacactgggattacagacatgagccactgtggctggccaatgctgtgcatttaaagcaggcccagtgcagctctgtgcaaagctattttaattgagctggctgagtacagggaatgaagtgtccagaggtgagctccagggcctcggccctctgtgaggcttgcttctttgaggcaggcttggctctttgtcagtatttctgctgagctcaagg

SEQ ID NO: 41137 - DNA, 1138 bp, Homo sapiens
tctccttccctagactgctcttcctgtcatggtataaacagtaatgttaagcctttgtgcacctgacacaattttagcacagtgctttgtatgtatgtattacatacatacattaagcagtaggtgcttaatggatacatttattgataatggtcagatcaatgaattctatcttctttccagaccaatccaaacttaatgatcttcatgcttggagaactcttgctcaactttagacactattcttgtgtccttaacacaccttgagaagcatggcttctgctgttattttattttacttttgccttttccacatgttctaacggctgttttatttttgaggcagcatgtgaacaaaaacacagaaagccagctgcctcaacattcaaatgagagtgcaaattcctactataagaggtgtggttatatacttactcaaatgctcacattgtaagaaggaatatagaagaattcctaaagatgcccagataaatggcagtgaactcaaaattcatatatgtttgttgaaagatgccatggaaaaggagttttgattctgcaaccacagtaggaagcaactcggttgacttgggagagtttttaaaggtctattacttcaacgtagagatctgactgacataaagcctgtgcattttatttatgtattcattcatttatttattgagacraggcttgctctgctgcccaggctggaggtcagtggcacaatcttagctcaccgtaaccttgaattcctgggctcaagtgatcttcccatttcagtctcctgagtagctagaaatacaggcatgcaccaccatgcctggctaatttttatttttttcgttgaaatggggtctttctatatcctaggctggtcttgaactcctggtgcctagtgatcctcctgcttcagcctctcaaaacactgggattacagacatgagccactgtggctggccaatgctgtgcatttaaagcaggcccagtgcagctctgtgcaaagctattttaattgagctggctgagtacagggaatgaagtgtccagaggtgagctccagggcctcggccctctgtgaggcttgcttctttgaggcaggcttggctctttgtcagtatttctgctgagctcaagg

SEQ ID NO: 41138 - DNA, 1138 bp, Homo sapiens
tctccttccctagactgctcttcctgtcatggtataaacagtaatgttaagcctttgtgcacctgacacaattttagcacagtgctttgtatgtatgtattacatacatacattaagcagtaggtgcttaatggatacatttattgataatggtcagatcaatgaattctatcttctttccagaccaatccaaacttaatgatcttcatgcttggagaactcttgctcaactttagacactattcttgtgtccttaacacaccttgagaagcatggcttctgctgttattttattttacttttgccttttccacatgttctaacggctgttttatttttgaggcagcatgtgaacaaaaacacagaaagccagctgcctcaacattcaaatgagagtgcaaattcctactataagaggtgtggttatatacttactcaaatgctcacattgtaagaaggaatatagaagaattcctaaagatgcccagataaatggcagtgaactcaaaattcatatatgtttgttgaaagatgccatggaaaaggagttttgattctgcaaccacagtaggaagcaactcggttgacttgggagagtttttaaaggtctattacttcaacgtagagatctgactgacataaagcctgtgcattttatttatgtattcattcatttatttattgagacaaggcttgctctgctgcccaggctggaggtcagtggcacaatcwtagctcaccgtaaccttgaattcctgggctcaagtgatcttcccatttcagtctcctgagtagctagaaatacaggcatgcaccaccatgcctggctaatttttatttttttcgttgaaatggggtctttctatatcctaggctggtcttgaactcctggtgcctagtgatcctcctgcttcagcctctcaaaacactgggattacagacatgagccactgtggctggccaatgctgtgcatttaaagcaggcccagtgcagctctgtgcaaagctattttaattgagctggctgagtacagggaatgaagtgtccagaggtgagctccagggcctcggccctctgtgaggcttgcttctttgaggcaggcttggctctttgtcagtatttctgctgagctcaagg

SEQ ID NO: 41139 - DNA, 1138 bp, Homo sapiens
tctccttccctagactgctcttcctgtcatggtataaacagtaatgttaagcctttgtgcacctgacacaattttagcacagtgctttgtatgtatgtattacatacatacattaagcagtaggtgcttaatggatacatttattgataatggtcagatcaatgaattctatcttctttccagaccaatccaaacttaatgatcttcatgcttggagaactcttgctcaactttagacactattcttgtgtccttaacacaccttgagaagcatggcttctgctgttattttattttacttttgccttttccacatgttctaacggctgttttatttttgaggcagcatgtgaacaaaaacacagaaagccagctgcctcaacattcaaatgagagtgcaaattcctactataagaggtgtggttatatacttactcaaatgctcacattgtaagaaggaatatagaagaattcctaaagatgcccagataaatggcagtgaactcaaaattcatatatgtttgttgaaagatgccatggaaaaggagttttgattctgcaaccacagtaggaagcaactcggttgacttgggagagtttttaaaggtctattacttcaacgtagagatctgactgacataaagcctgtgcattttatttatgtattcattcatttatttattgagacaaggcttgctctgctgcccaggctggaggtcagtggcacaatcttagctcaccgtaaccttgaattcctgggctcaagtgatcttcccatttcagtctcctgagtagctagaaatacaggcatgcaccaccatgcctggctaatttttatttttttcgttgaaatggkgtctttctatatcctaggctggtcttgaactcctggtgcctagtgatcctcctgcttcagcctctcaaaacactgggattacagacatgagccactgtggctggccaatgctgtgcatttaaagcaggcccagtgcagctctgtgcaaagctattttaattgagctggctgagtacagggaatgaagtgtccagaggtgagctccagggcctcggccctctgtgaggcttgcttctttgaggcaggcttggctctttgtcagtatttctgctgagctcaagg

SEQ ID NO: 41140 - DNA, 984 bp, Homo sapiens
tgcatgcgtgaagcctagaacagaggatgctgggagtcctccttccccatgcccccactccacctccaggcaggtgctcacccacactgacactgccagccctcactttgtcattaatgaatgagataaaggaaactgttcctcctgcctcaaattgtcctgcaccatctcacagaacttagcccagctctgtccctcccatgctcccacctaaatccctcrtgctgtagcttcattccctccagcccttgccagggccactgctgctgccctttcttggagcatctttcccaggatgccaaggttgcattccacgcagcagggagagcgggaactgctgtccaggggtgagtcagccagattcacagtggtgatgtaggtcgcagagctccctcctccctgccccactgctgcgtctggagccttcccacccagcttgccccacgatctgtgtccttgtggcccacatatcccgacccagccacccccaccagcctgaccgtgctggctcgtttctctgaacccctagaagggaagagctccttgggaacttctctttggccccccagagccatgaccaaatgcctgaggcagaccgctggcccgttttccctgttttaaagtaaaaaaacaataaaagcaacacacaaagagagacgctgctgttttacttacaaatgagagatgtaatcattcacccaggtacctgggaggctctgggctggggccagggagccagtggacgggaggaccctagggccacaggcaacctctccacatcctcctgggtgccagcaagtgagacaggcacttgggtccccaccccaaatttctctcacaggcactccagagccaagccctccttccttgtcaccttgagagatactctggggtctgagcccacagtcaggagggtggtattcaactgccctggtaaagaataatggggtgtctggctgcaaggctaggtggagacagggagag

SEQ ID NO: 41141 - DNA, 984 bp, Homo sapiens
tgcatgcgtgaagcctagaacagaggatgctgggagtcctccttccccatgcccccactccacctccaggcaggtgctcacccacactgacactgccagccctcactttgtcattaatgaatgagataaaggaaactgttcctcctgcctcaaattgtcctgcaccatctcacagaacttagcccagctctgtccctcccatgctcccacctaaatccctcatgctgtagcttcattccctccagcccttgccagggccactgctgctgccctttcttggagcatctttcccaggatgccaaggttgcattccacgcagcagggagagcgggaactgctgtccaggggtgagtcagccagattcacagtggtgatgtaggtcgcagagctccctcctccctgccccactgctgcgtctggagccttcccacccagcttgccccacgatctgtgtccttgtggcccacatatcccgacccagccacccccaccagcctgaccgtgctggctcgtttctctgaacccctagaagggaagagctccttgggaacttctctttggccccccagagccatgaccaaatgcctgaggcagaccgctggcccgttttccctgttttaaagtaaaaaaacaataaaagcaacacacaaagagagacgctgctgttttacttacaaatgagagatgtaatcattcacccaggtacctgggaggctctgggctggggccagggagccagtggacgggaggaccctagggccacaggcaacctctccacatcctcctgggtgccagcaagtgagacaggcacttgggtccccaccccaaayttctctcacaggcactccagagccaagccctccttccttgtcaccttgagagatactctggggtctgagcccacagtcaggagggtggtattcaactgccctggtaaagaataatggggtgtctggctgcaaggctaggtggagacagggagag

SEQ ID NO: 41142 - DNA, 622 bp, Homo sapiens
gcacgtgtttgtcagggacacacgtgtgagagcacgtcttcttcattgggtttattttctttgtgctgctaatgcttttggcctctgggggtgctatatatatacagatacggaatttgagaaacacaggattttcaacctgaaaggaaccgtaggtattttctaatctacttttctcattttacgcctttggcaatgtccagagagttgaggtgacttgttcagggttagatagagaatgtagatctgtctctgtctttctcacgtgcacacatgcacatccacactcactgtctggtaatggtaatggatggctgtttcctctctttttctccccctctccatgtgcctcctttcctccatcagtctgtctctctttcctcctctccttctgttctgtggtcctggctggcagctgaggatggcacagggcgtgcagaggctagctcccagggaggctgccccagcagctggctgtgccccaactcccccctcctccctgagttgggaaatggaggcacagtgtgttccctggcttccctattagtcaggaacctaagggagcactacctcagtcctggggaagagcaaagaggaaggacagatgmctctgtttgcaacc

SEQ ID NO: 41143 - DNA, 612 bp, Homo sapiens
catgtgtgtgtgtgcatgtgtgcgtctgaaatactgaggagctcatgagggttgtgccacacccctggacatccacagccctgctatcagtgtccaaatgaccttatttcctctgacactgtgtgccttcttctcctaagaagtcttgtcttcctgaccactccaaggaccttgggggctaggaccatgttggagcccttggkgacctccacaacttggcctagtcactcttctctgggaagctctcccccaccagctctcctgtccccccatatccctggagctcccaggtaggaaccaattgagtcccctcaggccggtgtgggaggcagggctcagtttgtgtggctggacagcatcatatcatctctggcttagggtgggcaggggctagtgtatgcctgtcttgcatttctttggggaaacatttgtccccaagacatttatatgtgtattaaatgatgactgatgtgtagtacagccctgccttaggctcctaggaggtagacatgaacactacagggtcctgtcctcagaggtcacacaatgacttctggtcctggggatggcccacctctgccactcaaggccacagcaaggtgctgatggctc

SEQ ID NO: 41144 - DNA, 1072 bp, Homo sapiens
atctttaattctttggggcatatacctaggagtagaattgctagatcatacggcttatgccttcttattgtttgtcaatgtccaaactgacttgtctgtctcaaggtccccaccttgattcagatgaactcaatactcattgagtgtctgctgtgtcatgcaatgcctgctctctctaatcctaggggcaaccctatctgatcagttttattctcattaccgatgacaaagctgaggttcagatagatcaagtcttgggtcaaccaaatgaaagatgccagaaactcagatgccaattcctggattttttcaccacacacacatggctttcccacatgggtagggcacccagtgcctggatgtcctagcttcgtggtgcttttctgcagaactcaaaatacctacatattataaatttagatcaattccatgtgaaaatggtattctctagagtctactatagataagtggttgcaggtgctaatctttgttttcttttcattagaggagggggggatataaagttgataacattcttccattaaattaatttttgtacaagtgatttggggaaagaaaagctgaagtccattttgatggctgaacccttgagccctgtctgtgggagggagactgatgacatcccagaacaatcgagatggggctttgagctgggaagaccacattagggcaggagtggtgtatgcagacgtcccaggaggcagaagaacaggttgaggcagaagagaggtgacgctagtgacagctgagctgccacagcagagatcacccttctctctccaagcatacagatgctagatctcagggtttgtgtcagcacgtgcacagttaaactggcttggctcagagggaagaggcctccmtcctgcttccaccacccctcctgcttccccagctagaaaggaatggttagctaaggagaccaaccaatggccgcaaggggggcttcaggcccccagtccaccagaccacttgagctcacagcatgaccttgagcagcacacacagagatgtgatgggagcagctgtctcatgtcccctgcagctgcac

SEQ ID NO: 41145 - DNA, 585 bp, Homo sapiens
ccttatggatcatgccaggccccaggtcaagccaactcagggcttgaaatgcaatatccctttcttgagcygagtaaccttgcagcccctagggaagtgagaggccagccctgtgtaagtatgctttggtgggaagaacgctggatggtgtccttgtctatctccccattcaactattagctaaaggctgaaggatttctggctcatggctggtgtcagggaagtctcagatccatgtcatggagtggtagaacattgcctgagctgggctctgtggctcacaggctgggaagtcttaggcaagctcctggatgtttctgtgtcttggttgcactctcaagagaactggctcataaggctgttctgaggaccaaatgatttaatgcatggacagcccttgacctgtgctcagtgaccttcagttagtattggtctgtaagatggccggatcacactctgaaaggcactttcctgagtccttgccccacaaatgcagagctcactgcctcttccatgaagcagtgttgctcatcaggagcccaggacagggcctccacacagtaggtgcttgctgagctgccagac

SEQ ID NO: 41146 - DNA, 585 bp, Homo sapiens
ccttatggatcatgccaggccccaggtcaagccaactcagggcttgaaatgcaatatccctttcttgagccgagtaaccttgcagcccctagggaagtgagaggccagccctgtgtaagtatgctttggtgggaagaacgctggatggtgtccttgtctatctccccattcaactattagctaaaggctgaaggatttctggctcatggctggtgtcagggaagtctcagatccatgtcatggagtggtagaacrttgcctgagctgggctctgtggctcacaggctgggaagtcttaggcaagctcctggatgtttctgtgtcttggttgcactctcaagagaactggctcataaggctgttctgaggaccaaatgatttaatgcatggacagcccttgacctgtgctcagtgaccttcagttagtattggtctgtaagatggccggatcacactctgaaaggcactttcctgagtccttgccccacaaatgcagagctcactgcctcttccatgaagcagtgttgctcatcaggagcccaggacagggcctccacacagtaggtgcttgctgagctgccagac

SEQ ID NO: 41147 - DNA, 626 bp, Homo sapiens
ggatctcccatcttgcagcaacacattgttcaagctctgtagcatgtgctgtgtggtcacaggctgcacaagagcactgaggccaggggccacagtggcgtgtggctgttggcaaggcaggcagaggtacttgcaacctcacatccactagcacatccaaatgcatctttgctgagtcctgagagaaatgtgasaagtcagagtcttcttgcagtcttgtacttatggacagagagaaagaacccacagactagacagaatccttaatctggtcggggaccatgggttggatttacctagacaggcaagaatggggagagtatcagaaggggggacctatgaagaccaaagatgccaaggaggagtgagtgagacaaaattgccagggtccatgaagggagccgagcaagaagagagcaggtgtggcttagagcacgggagttagatggatcagtctagctggatggggctgggagggccttggatcccaggctggggagttcacaccatggggagctgagtgccccaaagccagcctcctttctcctctggctgccatgtgggggcctcaggactgggtctggtaattgtgtgtgctatttggagttctcagcacctggcaagcc

SEQ ID NO: 41148 - DNA, 758 bp, Homo sapiens
cttctttcaggctccgtactgccctccagagtctcctctctttaaatcagaaactccagagaagaacatggcccattctagagtgcgaatgagttttgttgagttaaactcctctgtgtggtatgggaaaataaatggctcactgtgactctttctgccctttgtacccacaagacagagatgtgcacagagctggggtggtccagattttcctcaagctagatttgaatctcccaggaaagggaccmaccttctctttctcttcttgctgagctcagggcagcgtgttcagaccgagggacctaagtggctctggacaaggaggtgcagacctcagagggttaaagaaccagccagtgggtcctttgccaagtgtccatcctttccagttgcccttgtttatgccctaaaagcttgagaattacatgtctggtgtcggctgctccatctttatagcactgtgaaaaaagacaaagtggacgtgacatattgatggcctgtcccccttttcagcaaagagctcctccatctatggtcagggctgatgggcccatgaggttcaggaaagtagggactggcccagggtgggtgtcagcctttccaacctgggcttgcagaagtgaagcctgctcagctgaccacatttgttgggctttgttcctgcagccaggggcttgcttctgtacctcttctctggccagcagctcctactggtccccaggagagcgtgagggtgctcccttatgtgtgtttttttg

SEQ ID NO: 41149 - DNA, 1450 bp, Homo sapiens
ctctttcttctttatgtcctttccattgcctgactcctccctcttcccttcccttctccctccctcccttcctgtcattctgttttgtctcatgactagcacctatattatctcttgtccacctatttaattttcccccgaccatcccaggctgcagcatttttcccatccctacacagtggtaacatgggaccttgaggttcctgtcaccagccagctggtgactctgagaaagccatccaacccctgtggcctgattgctgccatccgcagggtgtctggagttccgggagagggttgcacctggcctgggagggaggtgggtctggctatgacagtagcctctgctttcttctgggagccctggggtagtttacagagtctcttccagaatctgtgaaatggggataatgacactcaccygctggggtcctgagtgcccagcagagcacctgggatataattaatggggagtgttactcttgttgttgttgtccgtagtaatagttgtgatgtgatgcttaaattccctacagtgtgaaaaatggctttggcctttgtactgtctattgtctgcttccttttgtaggacctgtgtgtgttctttggttataaccacactcatacacactcataggggacagggacctcattgcacttcctgtacagcacaggccagcatgtgtcggggctcagaacgacagatggtttgcttagagagtctaggatgctggtgtgttttgtttcccttgtgtgtgtgtgtctaagatgctaatgacaggaggcggtaatgagctggcaggggcctaggtgacaaagagctggcttcatgcatccccaaagaggcacctcagtgccaattgtttcttttgtgagaggaattgtcaagacctgggaatgtgggctggggagggctggagagaggaaagttggggcgttgcagacaaggtttacaggaggcagatctccacacaggagcagaacagggtcctggcagcactgagaggggacagcctgggagggaaggggagccccaagagggtggcaggtccctcatgggaagggaaggagtgtggattgagcactctcaaccgtgttacctgttgacttctcaagcggaccctgtgagctctgcaatggcagggctggcccctctgcatgcctcttgtctgccctactcctggcacagggcctggcatggggactggaagcatggggtgagggatggtcaatggtttgcatgacagtgctgactggagggctccagcaggtcaataggtctctctgggcttcagtttccttttttgtaaagtgggtttgatgatccctacccatgagtctgtgtcctcagcatccagcacagtcctggcaccaagtgggtccttggcacagactcatcaatgaatgaatgagtggaggagtggggcatgggaagtacacgtccctcttt

SEQ ID NO: 41150 - DNA, 1450 bp, Homo sapiens
ctctttcttctttatgtcctttccattgcctgactcctccctcttcccttcccttctccctccctcccttcctgtcattctgttttgtctcatgactagcacctatattatctcttgtccacctatttaattttcccccgaccatcccaggctgcagcatttttcccatccctacacagtggtaacatgggaccttgaggttcctgtcaccagccagctggtgactctgagaaagccatccaacccctgtggcctgattgctgccatccgcagggtgtctggagttccgggagagggttgcacctggcctgggagggaggtgggtctggctatgacagtagcctctgctttcttctgggagccctggggtagtttacagagtctcttccagaatctgtgaaatggggataatgacactcacccgctggggtcctgagtgcccagcagagcacctgggatataattaatggggagtgttactcttgttgttgttgtccgtagtaatagttgtgatgtgatgcttaaattccctacagtgtgaaaaatggctttggcctttgtactgtctattgtctgcttccttttgtaggacctgtgtgtgttctttggttataaccacactcatacacactcataggggacagggacctcattgcacttcctgtacagcacaggccagcatgtgtcggggctcagaacgacagatggtttgcttagagagtctaggatgctggtgtgttttgtttcccttgtgtgtgtgtgtctaagatgctaatgacaggaggcggtaatgagctggcaggggcctaggtgacaaagagctggcttcatgcatccccaaagaggcacctcagtgccaattgtttcttttgtgagaggaattgtcaagacctgggaatgtgggctggggagggctggagagaggaaagttggggcgttgcagacaaggtttacaggaggcagatctccacacaggagcagaacagggtcctggcagcactgagaggggacagcctgggagggamggggagccccaagagggtggcaggtccctcatgggaagggaaggagtgtggattgagcactctcaaccgtgttacctgttgacttctcaagcggaccctgtgagctctgcaatggcagggctggcccctctgcatgcctcttgtctgccctactcctggcacagggcctggcatggggactggaagcatggggtgagggatggtcaatggtttgcatgacagtgctgactggagggctccagcaggtcaataggtctctctgggcttcagtttccttttttgtaaagtgggtttgatgatccctacccatgagtctgtgtcctcagcatccagcacagtcctggcaccaagtgggtccttggcacagactcatcaatgaatgaatgagtggaggagtggggcatgggaagtacacgtccctcttt

SEQ ID NO: 41151 - DNA, 1450 bp, Homo sapiens
ctctttcttctttatgtcctttccattgcctgactcctccctcttcccttcccttctccctccctcccttcctgtcattctgttttgtctcatgactagcacctatattatctcttgtccacctatttaattttcccccgaccatcccaggctgcagcatttttcccatccctacacagtggtaacatgggaccttgaggttcctgtcaccagccagctggtgactctgagaaagccatccaacccctgtggcctgattgctgccatccgcagggtgtctggagttccgggagagggttgcacctggcctgggagggaggtgggtctggctatgacagtagcctctgctttcttctgggagccctggggtagtttacagagtctcttccagaatctgtgaaatggggataatgacactcacccgctggggtcctgagtgcccagcagagcacctgggatataattaatggggagtgttactcttgttgttgttgtccgtagtaatagttgtgatgtgatgcttaaattccctacagtgtgaaaaatggctttggcctttgtactgtctattgtctgcttccttttgtaggacctgtgtgtgttctttggttataaccacactcatacacactcataggggacagggacctcattgcacttcctgtacagcacaggccagcatgtgtcggggctcagaacgacagatggtttgcttagagagtctaggatgctggtgtgttttgtttcccttgtgtgtgtgtgtctaagatgctaatgacaggaggcggtaatgagctggcaggggcctaggtgacaaagagctggcttcatgcatccccaaagaggcacctcagtgccaattgtttcttttgtgagaggaattgtcaagacctgggaatgtgggctggggagggctggagagaggaaagttggggcgttgcagacaaggtttacaggaggcagatctccacacaggagcagaacagggtcctggcagcactgagaggggacagcctgggagggaaggggagccccaagagggtggcaggtccctcatgggaagggaaggagtgtggattgagcactctcaaccgtgttacctgttgasttctcaagcggaccctgtgagctctgcaatggcagggctggcccctctgcatgcctcttgtctgccctactcctggcacagggcctggcatggggactggaagcatggggtgagggatggtcaatggtttgcatgacagtgctgactggagggctccagcaggtcaataggtctctctgggcttcagtttccttttttgtaaagtgggtttgatgatccctacccatgagtctgtgtcctcagcatccagcacagtcctggcaccaagtgggtccttggcacagactcatcaatgaatgaatgagtggaggagtggggcatgggaagtacacgtccctcttt

SEQ ID NO: 41152 - DNA, 627 bp, Homo sapiens
ggaagaccaacactagtgacgtccatatccctgcagggaactgagtttttcagtcactccagctctatgactgagcccagttctgttctcccctgagaaatccctggggtcaggaggatgccaggattgtggtctgtggaaggtccataagaggggaatctccctcccctaaagagccagccccaaaggccacctcagccatgactgcccccctgggctgagtttctcttccagagatgggagaagtacgcccattccactgctctcctgcagtaaaaaatgtctgctcaggacgttgcccaggtgtgctgttgacaatgggggcagttcttcctgggacctggcaatatttttccagctgcaagrccagtgtcaccccaggaaactgtcctcagcttcatccccatggcctggctgccatccagccactcctgtgctgggggcaggagcagagtaagggtgagggtgcaggaagattccagcccctggaatcctatagtgtattgctcgggatgttcagctgagtgagtctgtggggacaatctgaatgcctgccttggtgacagcaaacatggccacgggtttaaatattccatgagtaatttctcagcccaagtgggctgcaat

SEQ ID NO: 41153 - DNA, 984 bp, Homo sapiens
atgccgatcttcagcagctctgtcttgcagcttttgccttgggttggctgtgctcacactcagtggggagcgggtggaggtcttggcatttgttgtgcaaggttgtcgttggccattactggaacaccccaatctatcctcatagactttggacactcagcccctaacaacacaccaacttgttttttgtgtgtgtgtgaagatgctttcttctaaatacatacgtccttggaaggcagagtttgaatggcatgatgtgcagtttatcatattgaaagacttttcagaaaaccaaaaggaaaatcaaatagcaattcccaggtacttgttacaaaaacctagcagttcaaattctgaatggatgggcagtattggccaagggggaggaagtcgaaggaatagacccaatatcactggtgcttctttgggaagtttcctaagaatcaccatggccccagggctcgccatgtctgaacatgagtgggtctstgtagagatcttaaccctaaaagtttctgtacttaggaagtctgtgatatgaaaactcaagtccagagatgatcacccactttatataaggagttattcaaataactccctggacacatttaaaatggaacacggtcctctctgtagtccaaccaggaacacagctcttatgctgagcgaggggttcctgaattacccttgtttcttttccaggaggttgcagctgaggacatcgtgcagcccaactactaacagtgatgaggtctggattttcctgactttctctgcttctgtgctatggaatggccagaagttcagcttgtggaacacagaatggtctgcaagcaaactctttcctctccttgaaatcttgctattcctgtcctttgttcttagaagaaactgagctctagatatgtctcactgttggctttgtccacagggccccaaggtaagcactgctgctcaggagataattcagagtgctaatggcat

SEQ ID NO: 41154 - DNA, 694 bp, Homo sapiens
aagtttatgaccggcgtgtccacttcaaaggccacggacatctcccagacttaacacttttccattatgcgtccctttcactttcggtagcgaggtctcaggaatgcctttccaggctccagtcatatcgttaagatcgttacgtacacttttctcactttatgctcacgccaaacctaagaagttaggtatttccgtcagtgttttacagatgaagatacagcgtctttcaaagttaaaaacgttgtgaagttccaacacacagtaacagagctaagatttgacctcgggagggacagatgccataatctcttaatctgacacctgaacgttcagttactgattcctgtaaacctgtaggaagaygtattattgtggtagtgtggtcacccacggtggaatatttcgcacctttactctccctcctgtctgagtagtcctttggttggttttcagtgtaccaaggacaggtacttccagctcaccagaggtgacagctaagtcctcctgccccagttccgccctgggtgttcctccgacttgctctgatcccaccgcatgtgcccctcagccttggcctctgcaggccaaggatctgcattcccagcgggttcccttaaggacactgcaatgtggcctggcttggcccaatactataataatttctccttaaagaaagcagcctgccagggca

SEQ ID NO: 41155 - DNA, 584 bp, Homo sapiens
cactgatcctgcctccccgggagctttaggaaactaggcttattacaggttccattcaaggcagggatgggcggggttcccagctgaggccctggagcagtcctgcagccttacatttcttcagagccaactacgtgtgggacattccaatccaggtgtggtcaaatgaggccctgtcatgcaggggttcctgggtgacttaggggaagaatgatttttttttttttgagacagggtcttgcttggtggcccaggctggggtgcagtggctcaatcatggctcactgcagcctcaacctcccgggatcaaactcccacttcagcctccagagtagctggaactacaggcacgtgccaccagacccagctaatytttgtgtttttttgtagagaggggatttcaccgtgttgtccaggctggtctcggactcctgggctcaagctgtctgcccgcttcggcctcccaaagtgctgggattacaggcgtgagccactgcacccggccctggaagaatgatttaagaatcatttgtgatggcggtcaaatgtttattttgaaatgccagagaatagttttctaggca

SEQ ID NO: 41156 - DNA, 649 bp, Homo sapiens
attgatcacatattgaactgatatgtttatatgttgcattaaatgaaatgcattattaacattaactttacctatttatttttaatttttatttttttwaaatttttaatatatttttgagacagggtctgtctctgtcacccaggctggcgtacagtggcgtgatctaactcactgccacctctgcctgccagcctcaagcaatcctcccacctcagcctcctgagtagctgggactacaggcacccaccaccacacccagctaatttttaatttttttaatgtgactactagagatttaaaattacctctgcagtgcactcttagagactcagctaaaaccatgagtgaagttattacctttagaaaaactccttccccaccccccaaacttggtcttggagccagtgaaggtttgagctggatgagtgtctagttggaccccttcacattacagatgatagaactgaggactagagacgaatgacctgctcagcttgcagtcaaccatgtgcacttaagctatgtcaagctgttgctgaaaaacggtggaaaaggtgggtgacaaacttgcagaaaatgcttagtacatttatatttcaaaatgaaatctttcagtgtctctcacagaatgacagctgaggggcgg

SEQ ID NO: 41157 - DNA, 1210 bp, Homo sapiens
tgcataatttactgcatatattaatatggagcatgaggatgggacaaatcagtcacaccatcttcagggctgcacaaaacttaaggatacaaacatgacctgtaccataaagtaagtcagatggtggttcttctaaattagaatcttcttggataagtcagcaatagtttgcctgtattcaaaatggaaaatctgagggtttctgatttaatcctgaaactgagtgtaattacttaaaatttggaaataaaatgtagatattcccctatattaaagcattaaggcttttatatctgtttcatgacrttttcaagatcagaaacactgagtggaacttttgacatgatctgtttctgcaatttcagggaaattaccaaagtatcacaagggacatgaatgggtagtggtttcaagtctacttgagtcagatgtgaagtgctaggcattataccttaacgataaaactagggctaggtgcagtggctgattgatgcctataatcccagcacttcggaaggccgaggctggaggatcacttcagcccaggagttcaagagcagcctgggtaacagggagaccctgtctctagaaagctaaaatttcaaaaaggattgagggaatacttgataatttgtggatttggctaatgcccaacatgtgtaaattagccaggtttattaggtgacaggagaatgtgatcatagagttaataaatagcaatacctattgaaaaattattagtattgttgaagtaaaattttctgaaagaccatttaaaacaacagagaaatactggacagatagactgtgttgcccaggctggcctcaagcgatcctccagcttcggcctcccagagtgctaggattacaaacatgagccactgtgcccagcctacttaggatgttttttaaaaaatcctggaagctctagttatctagaggctaggcagatctttctaagtttgtgtcatcagtggatgggtgaaggttctcagaattcatattctgagagctgccatctcatttgaatttgagaaagcaaactccaaaatctgcttctcttggactgttcccagtggcttttcttgaaccacacataatccaatgaaaagatcttattctcatgactagaaacttgtgagaactcttgagtcagtcgtcttttatgttttcctaagcaggtgattccaagtgctttttcaaaaatgca

SEQ ID NO: 41158 - DNA, 1210 bp, Homo sapiens
tgcataatttactgcatatattaatatggagcatgaggatgggacaaatcagtcacaccatcttcagggctgcacaaaacttaaggatacaaacatgacctgtaccataaagtaagtcagatggtggttcttctaaattagaatcttcttggataagtcagcaatagtttgcctgtattcaaaatggaaaatctgagggtttctgatttaatcctgaaactgagtgtaattacttaaaatttggaaataaaatgtagatattcccctatattaaagcattaaggcttttatatctgtttcatgacattttcaagatcagaaacactgagtggaacttttgacatgatctgtttctgcaatttcagggaaattaccaaagtatcacaagggacatgaatgggtagtggtttcaagtctacttgagtcagatgtgaagtgctaggcattataccttaacgataaaactagggctaggtgcagtggctgattgatgcctataatcccagcacttcggaaggccgaggctggaggatcacttcagcccaggagttcaagagcagcctgggtaacagggagaccctgtctctagaaagctaaaatttcaaaaaggattgagggaatacttgataatttgtggatttggctaatgcccaacatgtgtaaattagccaggtttattaggtgacargagaatgtgatcatagagttaataaatagcaatacctattgaaaaattattagtattgttgaagtaaaattttctgaaagaccatttaaaacaacagagaaatactggacagatagactgtgttgcccaggctggcctcaagcgatcctccagcttcggcctcccagagtgctaggattacaaacatgagccactgtgcccagcctacttaggatgttttttaaaaaatcctggaagctctagttatctagaggctaggcagatctttctaagtttgtgtcatcagtggatgggtgaaggttctcagaattcatattctgagagctgccatctcatttgaatttgagaaagcaaactccaaaatctgcttctcttggactgttcccagtggcttttcttgaaccacacataatccaatgaaaagatcttattctcatgactagaaacttgtgagaactcttgagtcagtcgtcttttatgttttcctaagcaggtgattccaagtgctttttcaaaaatgca

SEQ ID NO: 41159 - DNA, 627 bp, Homo sapiens
agccttccttaggcaaactgtgcagctgttggctgagcctctggattgatgaaatctcttgagggactccacagggctttcaagggaagtggaggggtgatgtgttcagtctggagcaggggtctccaaagtggagtacatacatcccagagggcttaaggaaagaaaaataatagtgcatctactcagattaacattttgcttccaacatgaaagaaaaagctgtgcaatgttagtaattttgaacgttgagggactcacgtgccttagacggctgtgtaggaggagtactttgtgggaggaagagcggggatttcatcaaattgcaacttacatagtgcccaccaaagggaatttagatattctattatctatttttaagtcaactaaggctcccaaaaaggataagtggctttaaaacaatgttgaaaagaaatcttggactgaagataacactaatatgaaatcataccacgcagcccccacatggcagagctgaccctccctcctctgcccccagccacgttatgaaatgaaaacagcagcactttcctcagaccttgaagagttggctgaaattgcaatcatccagaagactatttgaaatayggctttacatccataatc

SEQ ID NO: 41160 - DNA, 473 bp, Homo sapiens
tgtggcaccagggcttgcctctgcatagtgtgtggtggtgatggagacaggcgactggcagcgagagctgttccttgcctggatacaggaagggaaagaggaggcacctaccacaggctggaggctagagtctgtgggactgcggctggcctcgctggctcgcctcgctgctgtgggtggcagcagcggacactgcagccggccagagcgtagaaaggtgatggggtagatgcgctatcccgggctacattgcccgcggccgggggctgctaggggtgttattccgggcgtcactactttaggtgtgctatcccgggctgcgctgcccgcagcagcgggggggggggyaggttgggggcactatcctgggctgtattgccagcagcagtagggctggttgggggccctattgggtgctacactgcccgcgacagggggcgggttagggccgctactgtggttacactgccggc

SEQ ID NO: 41161 - DNA, 1268 bp, Homo sapiens
tatctaggcacaactgtatgttgttatgattgttttttttttgttttgttttgttttttgttttttgttttttttttgagacggagtctcgctctgtcgcccaggccggactgcggactgcagtggcgcaatctcagctcactgcaagctccgcttcccgggttcacgccattctcctgcctcagcctcccgagtagctgggactacaggcgcccgccaccgcgcccggctaattttttgtatttttagtagagacggggtttcaccttgttagccaggatggtctcgatctcctgacctcatgatccacccgcttcggcctcccaaagtgctgggattacaggcgtgagccaccgcgcccggccctgttatgattgttaatactaccttacatctaaacttgttaattaattataaaataacacacagcaattcaacatattctttctcattaacattcattatgaaaatatattccatatcttagcctacatatcaagtgtcttgttcatttcaaaaatgggaaaaataatgggaaccatggcagaatatccaggttatggcaaaccactagatttgaacaaagcacaaaaccactgatgtggacaaagtagggcytacactcctaatagtttgccatgcacactgctggatggagaacagtcagttaccaaggctgacctcttgccaaagcctaaacataaatgggtctgacgctcggttatacaagtgcactaggtaggagccaacgttaagtagaaatctggtttgggatttgtcttcaatttgaaggcagatttttttcttaaacataaaggactaattgactaaatatataatacataaacacaattatctaaaattaactgtttagttcagttattgtattgtttctatctttgcttctatcttctctatttgtgttgtttctatctgtattgtttctaatctttcttcagcacctccaaaagggatgtaatctctccttcctttggcttgccaaggcactttcaccgcctaacatgactgcgatgggggtactggacgaactacattactgtatactccttgggaaaggcatatgttccacctcagtttcatctccgttagcaaataaatgtttaagagcatgtctataaaatcaagaaaaccatctacttcttaggattgttctgaaaataaatgaggaaatactcaaaaagagattaaaatgcctggtacagaattaagagctcaataaaagttggtgttgctctcgttattaaatg

SEQ ID NO: 41162 - DNA, 1268 bp, Homo sapiens
tatctaggcacaactgtatgttgttatgattgttttttttttgttttgttttgttttttgttttttgttttttttttgagacggagtctcgctctgtcgcccaggccggactgcggactgcagtggcgcaatctcagctcactgcaagctccgcttcccgggttcacgccattctcctgcctcagcctcccgagtagctgggactacaggcgcccgccaccgcgcccggctaattttttgtatttttagtagagacggggtttcaccttgttagccaggatggtctcgatctcctgacctcatgatccacccgcttcggcctcccaaagtgctgggattacaggcgtgagccaccgcgcccggccctgttatgattgttaatactaccttacatctaaacttgttaattaattataaaataacacacagcaattcaacatattctttctcattaacattcattatgaaaatatattccatatcttagcctacatatcaagtgtcttgttcatttcaaaaatgggaaaaataatgggaaccatggcagaatatccaggttatggcaaaccactagatttgaacaaagcacaaaaccactgatgtggacaaagtagggcctacactcctaatagtttgccatgcacactgctggatggagaacagtcagttaccaaggctgacctcttgccaaagcctaaacataaatgggtctgacgctcggttatacaagtgcactaggtaggagccaacgttaagtagaaatctggtttgggatttgtcttcaatttgaaggcagatttttttcttaaacataaaggactaattgactaaatatataatacataaacacaattatctaaaattaactgtttagttcagttattgtattgtttctatctttgcttctatcttctctatttgtgttgtttctatctgtattgtttctaatctttcttcagcacctccaaaagggatgtaatctctccttcctttggcttgccaaggcactttcaccgcctaacatgactgcgatgggggtactggacgaactacattactgtatactccttgggaaaggcwtatgttccacctcagtttcatctccgttagcaaataaatgtttaagagcatgtctataaaatcaagaaaaccatctacttcttaggattgttctgaaaataaatgaggaaatactcaaaaagagattaaaatgcctggtacagaattaagagctcaataaaagttggtgttgctctcgttattaaatg

SEQ ID NO: 41163 - DNA, 1268 bp, Homo sapiens
tatctaggcacaactgtatgttgttatgattgttttttttttgttttgttttgttttttgttttttgttttttttttgagacggagtctcgctctgtcgcccaggccggactgcggactgcagtggcgcaatctcagctcactgcaagctccgcttcccgggttcacgccattctcctgcctcagcctcccgagtagctgggactacaggcgcccgccaccgcgcccggctaattttttgtatttttagtagagacggggtttcaccttgttagccaggatggtctcgatctcctgacctcatgatccacccgcttcggcctcccaaagtgctgggattacaggcgtgagccaccgcgcccggccctgttatgattgttaatactaccttacatctaaacttgttaattaattataaaataacacacagcaattcaacatattctttctcattaacattcattatgaaaatatattccatatcttagcctacatatcaagtgtcttgttcatttcaaaaatgggaaaaataatgggaaccatggcagaatatccaggttatggcaaaccactagatttgaacaaagcacaaaaccactgatgtggacaaagtagggcctacactcctaatagtttgccatgcacactgctggatggagaacagtcagttaccaaggctgacctcttgccaaagcctaaacataaatgggtctgacgctcggttatacaagtgcactaggtaggagccaacgttaagtagaaatctggtttgggatttgtcttcaatttgaaggcagatttttttcttaaacataaaggactaattgactaaatatataatacataaacacaattatctaaaattaactgtttagttcagttattgtattgtttctatctttgcttctatcttctctatttgtgttgtttctatctgtattgtttctaatctttcttcagcacctccaaaagggatgtaatctctccttcctttggcttgccaaggcactttcaccgcctaacatgactgcgatgggggtactggacgaactacattactgtatactccttgggaaaggcatatgttccacctcagtttcatctccgttagcaaataaatgtttaagagcatgtctataaaatcaagaaaaccatctacttcttaggattgttctraaaataaatgaggaaatactcaaaaagagattaaaatgcctggtacagaattaagagctcaataaaagttggtgttgctctcgttattaaatg

SEQ ID NO: 41164 - DNA, 532 bp, Homo sapiens
tcatcgccatattttatcactgaagtatttaaacagttttatcaaaactcatcttatgaggaatgatgggatttcttatagggactcccttcaaggttattaaaaaaaaaaaacaaacaacaaccagaaaacattcgaataactctgctcatttaaatctccagtctattaccccaatgtgtctttaacagataaaatttaatttaactkggtattaaggatatactaatctcaaagtaaacacaggctgcacagatgtgtctacttttggaaataagagtatcaatattacaaagacctcttgaaaatttaatagacatgaaattattaataacattatcaatctatttgcttttcttttttttttgagacaggatcttactctgtcacccaggcttgagtgcagtggcacaatcatggctcactgcatactgaaactcctgggttcaagcagttctcccacctcagcctcccaagttgctgggactacaggcatgtgctgccacacctggctaatttattattttttgta

SEQ ID NO: 41165 - DNA, 532 bp, Homo sapiens
tcatcgccatattttatcactgaagtatttaaacagttttatcaaaactcatcttatgaggaatgatgggatttcttatagggactcccttcaaggttattaaaaaaaaaaaacaaacaacaaccagaaaacattcgaataactctgctcatttaaatctccagtctattaccccaatgtgtctttaacagataaaatttaatttaactgggtattaaggatayactaatctcaaagtaaacacaggctgcacagatgtgtctacttttggaaataagagtatcaatattacaaagacctcttgaaaatttaatagacatgaaattattaataacattatcaatctatttgcttttcttttttttttgagacaggatcttactctgtcacccaggcttgagtgcagtggcacaatcatggctcactgcatactgaaactcctgggttcaagcagttctcccacctcagcctcccaagttgctgggactacaggcatgtgctgccacacctggctaatttattattttttgta

SEQ ID NO: 41166 - DNA, 587 bp, Homo sapiens
actgatgttgacaagccacacattgttgaaaaaaaaatcctagtttttatttattgaacaagtgatattaatataacaatagaatagtaaaggagtattacccccaattatttcacctgaaaatgaaggttgttttcattacttatattggtaccttttatagttctaatgtctgtctcattcatccatgtgattaattttagtggaggtcattttascaagtgtttactttttctagagcttattatttcttgtttcctaaggggataaaaccccactatagtgtattgtttcctttaaaatagggaaacttgcttcctaatcattttctaacttttcctgactatgggaaaaacttgtcaatatctaagggtggtaaatgcttaggttaattgatagtttgtttccatgatatcatgaaggcaaaatggtcttttcttttggagtaattgtttacctagaaaatagttgaaaattctttcaaagatttctgaggttttgtagtctgaaacatctccttagtgataaaggattctttctttctctgtgctgaacttaagttctagtttgtggatgagagcgaggaa

SEQ ID NO: 41167 - DNA, 587 bp, Homo sapiens
actgatgttgacaagccacacattgttgaaaaaaaaatcctagtttttatttattgaacaagtgatattaatataacaatagaatagtaaaggagtattacccccaattatttcacctgaaaatgaaggttgttttcattacttatattggtaccttttatagttctaatgtctgtctcattcatccatgtgattaattttagtggaggtcattttaccaagtgtttaytttttctagagcttattatttcttgtttcctaaggggataaaaccccactatagtgtattgtttcctttaaaatagggaaacttgcttcctaatcattttctaacttttcctgactatgggaaaaacttgtcaatatctaagggtggtaaatgcttaggttaattgatagtttgtttccatgatatcatgaaggcaaaatggtcttttcttttggagtaattgtttacctagaaaatagttgaaaattctttcaaagatttctgaggttttgtagtctgaaacatctccttagtgataaaggattctttctttctctgtgctgaacttaagttctagtttgtggatgagagcgaggaa

SEQ ID NO: 41168 - DNA, 1449 bp, Homo sapiens
tttcaagggctaggtttgctagtcctgtctcttctctttgactgtagctacccttagggatttttcttcctgcaggtactcataaggcttcctgtggattgaggcaggaatgattttcctgcaagggaacccaagttggtaggaagctggctctctgccttgatctcactttttccagtgtagagactgtgattcctgggggattttctgtgctttgtgcctggtagatagggggaaggatgttgcagatacagaaatcgtttcttttattatctgcttggcgtttttcatgtctctggccccagggatcatttcagcttcagacttgagttctgggatattgctggtgataatcttggtgctgggtatttttttttttttttccgattttctgttggggagagtgaagccagattgtttctactctgagattttggcgttgccacagatatgtacacatatactaatccttatcagcggtataaaattgtatgcacttcctcacttacgtaccttttaacatactactccctttaagtaaaatgcctgctcctctttttctcccttgttacctggattaattcctctacatcctataaatactgagtttatatgatttgcgaacctcctctctccttttactctccatagtattatatatgcatatactcttcatctatttaggtttactcttacctattaaaattcatttgatttctagattgcaagtttcttggaggctagggatgtctttttaattttatttgggccaaaacatatctaatccactttagtatgtttatagtattttaaagaaaaatcaataaattgaataattgtcttactgacatgtacataaagaaactaattccctgaggttctttggggaagtgatattatatagaataagaaaagttaacattaagttgcttacctaggtatagcattaggcctgattgtattcaaatcttacgagcatacatgatcatatcagtagatgcagaaaaagtacttgacaaaatccaacaccctttcgtgataaaaacactaaacaaactgggaccagaagggaacttctttggcttgataaaggacatctatgaaaaaccacmgctaacatcatccttaatgatgaaagactgaatacttacccggtaacatcagaaacaagacaagaatgtccactttattacttctgttcaacattataccagaggttctagtcatagcaactaggtaagaaaaagaaataaaaggaagaagtaaaagaaaaagaagatgtgaaactaactttgcttacagatgacctgataccatgtatagaaaaacccaaagaatccacaaaagctattgtagctaataaatgagttcagcaagattgcaggaaccaagattgatataggaacatcagttgtctttctgtacactaacaatgaacaatatgaaaat

SEQ ID NO: 41169 - DNA, 575 bp, Homo sapiens
tagccaggatggtcttgatctcctgacctcatgatctgcccgccttgtcctcccaaagtgctgggattacaggcgtgagccaccgcacccggctaacatattcttcacaggagacaaattccattttgattagtttttttcttttaatttattttttaaatagagatgaggtctcactaaactgcccagtgtggtcttaaactcctgggctcaagcmatccacctgcctcggcctcccaaagtgctgggattacaggtatgagtcaccatactccgccattgactagtagttgttaatggaacctttggcttaccattttccatgtctgacagttggaagaatttttcacagaccaccttctggcttgattcatttcaaacctttttcctccacaatctatgtacttctcatgccagatgccataggacacagtgtatagggatagccctggttcttcccgtcataacactaggcagggagtgagatgagggtgctcctaagatagcttagtaataagtaataagtgaagaattcacagaagtaattgtaagccacataaatgtatccaacaaaa

SEQ ID NO: 41170 - DNA, 1820 bp, Homo sapiens
tttcatattttttccgtaaatatctatctatctattctatagataattctatctatctattctatagatatctatctattctatagatagaattaaaaataaattaaaataaataaaataaataaataaataaaataaataaataaaataaataaataaaaataaaataaattaaaaattcacatagtaataaaaacaaacacctgagtggaagtactgggctaagttcatgcctaattccatttaatcacaacttcatggggtagatattataatttccactttgcagatttccacatccccatgtcttaggatggttaaataacttctccaaggttataaagctacaagtcaagacagggaggacctgggttttttctctgcttctttctatcctagacagcaacaattcttcaatgtgtgtcacgcaaaggggaccatagatcgttaaattgtctaactcatttttcatgttgtgtttacatggactcccttttttgtttgtttgtttttgatcatggaagaactttagttgattgacagacattagcattcacagagtatgtgattacttagaattttttgtggaccatccaccaatacttgatgaaatgcattgaagaagtaggaatttacaatcttctttgcaaaacaaagatctggaatagcagaggctgctctgagggatgattctgagtgtgttgctgagacctggtcctctacatgtttaacaacagcattgaccagaattttagctcacatggtaggggcatttgacaatctatgaactgcagaaggtgaaactgtacctcatatagtaaggaacagtgctagccccaggccttttcttacacccaggaagaaagccagtgttttgttgctcggtctgaattggtagaataagtgcctcagttctctatgtcagtttgcccaagatttaagtgtttttgttatgaaaagttgtactcaccctgcagaaagtagtgtgagtttcttggttatcatggggttggggtttttccagtggtgtaaaattcttcccaagacctgagtgatgaactcactgtagaagtctccttctctgttgcaggttacagcatagcttgtctgtgggaatagatttctctttgaaagagagatttacagaaggtcttggagaatgggacacaaagttgtctttcacatgcctccagtgaaagagctggctcccaaatacttctccttcacaggatggggttttaatctgcagactcaggtccctccatccttatctttcccctttttctctttcaaaacacgtgtactttccagagctttcttgtggatctttttgattaatgtcctgttttcctttgttgggtttccctgctttccaaacaaagcaaaatagaatcaccccactctgacttccccgactccctgcttttgtttactgtactgttttttaaatctttttttttttttycccctgaaacaagagtctcactctgtcacccaggctggagtgcagtggagcgatcttgctttactgcaacctctgcctcctgggttcaagcaattctcgtgcctcagcctcctgagtagctgggattgcaggcacactccacatctggctaatttctctattttttagtagagatgggcttttgtcatgtcgaccaccctggtctggaactcttgacctcaggtggtctgcccacctccgtctcccaaagtgctgggattacaggcatgggccaccacacctggcctgttattttaaatcttgaaatgtgttcttattctggggcttttctttggtgtgaaaatgggcctagtag

SEQ ID NO: 41171 - DNA, 619 bp, Homo sapiens
tgaaaaagagatagatgggtcasaatgctatttatttttttcctaattggtccttggcttatgagtaaaagatccagactaattagaaaactggggagtggaagagaagtagaaggggctggggagaagtttcaagaataactacaggcaatggcaattggcaacttaatggacagaaatagtccatttacaagtaaaatgttgacatggatgggtgagtgggggagagaaaatgagaaatcttggaaccaaggcttcttataatgtgcagattttcatatacctaagagtatcagtgaactagcagcggagaaagtcaaagagccttgaatgacaacctgtctccaagaataacagagcaggagctaggcacatgcacttgaggctgaagtgtagatcccaaaagatttgccccctgctcaagttgataaagccatacctttggttgacaagtattttgggtggcaaagatttctttccagaaagcaaaacaacaaaacaaaaaaactgcacagaaacaataatagcaataatttgcacataaacagtaatagcaataattttagaataaaaagaacactataaatcagtagcaaaataaaatatttttttaaaaaat

SEQ ID NO: 41172 - DNA, 653 bp, Homo sapiens
tacatgtgtgtatacacacatatacagaaactgagacaaaccttcggaaaacacatatataggaaaaagcttgaatacatatattcatttttaaatagttataagtggaaatagttataaattgttatttttctatattttattgttctaaatagttatatagtaatcttattaaaaattttgaaaattccaaatattagtaggcaatatgtttaatatgggacaagcgagtgagatgtctaccaacaaagtttgtggggtttctattgctggagatatcaaaytaaataagtaacttctggttcagatgaaaagagttgctacagtacaacatccagggacagaatacatatagattggttaactaaaagaaccttgaaaagtaggaagggatcaatatgagtaggaattattagggtttgtcttatgctggaaattaaagtcgtccatgtccttgaagagcttgtgaaaaaacaacacacacacacacagagaagaaggttaaagacttgggattgtggaacatcattggtaaagtcaaaatcataaagcaatgcttgtgtgcagagagtttctttcatacaggtgcaggaaatgtatcctttctacaagctctccaccttccaaagagaaatccaagccatgcaggattg

SEQ ID NO: 41173 - DNA, 626 bp, Homo sapiens
ttgaaagctactttctccataagtagtatgtttatgtattattcacagtagcaaataattgcaaaatgtcaacatttcatcttcttcttaagagcttctttagtgacctaattaaccattaagaagaaaagattttttaagtgtaaatatgaaaagtgagagtgtttcttagcagcaatttgtgatcttaaaatgtcacaagcaggcacatcacggaggtgctaccaaccagcacttttcaaaatatgactctgtgtcaaaagcgtgtgctgtggatttgtattttttgtctttattctgaaacaagcaatgcaaatatagatatggttgcctgagagatttccttctctttttgaaaacccttcaacattttctctgacagcctmggaaaggttgtttttaatctatttaatttgaggctgtattctccacagataatgccatattttctctttcacttcctgagcatgtacaggaaaaaaggcagaaatgtctctcctcacacacactacatttacatatatatacacacacccctaaacataacgtatatatgttcaatgcacacatgcaacacacattcacagacacacagcatacgctaatatacaacccaaacatgcata

SEQ ID NO: 41174 - DNA, 496 bp, Homo sapiens
agcccaatgcaacctgcctctcagaaaccagttaagtgactagttaattgggggcttgaaaatgtaaggtttaccaagtagattaacgccctaagaagacaatttgcattgggagttatatttatttatttatttatttattttagagatgaggtctcactttgttgcccaggctggccttgaaatcctgggctcaagtgatcctcttgccttagcctcctgaagtgctgagattatagatgtgagccaccagaccaagcccacagggagttcagatgctaacttggggacttaaagtaattagtctccaaaaggagtacaagtaagcatttgagaatatactttaaaagaaaatcaacttcctatttaaaatagtgatgatatactaacttctcatcatgggaaatacagcttcctaaaacttactaccagacagttcaaataaactgaaagtgaagaaagaaacagaggagaaaggaayaggtgacaggaaggg

SEQ ID NO: 41175 - DNA, 1362 bp, Homo sapiens
attggactcccaaagcgctgggaatacaggcatgagccaccatgcccagcctacctcatttgttgatagcactgattcctarcagggttattttcattcctggcttaaaaaaaataacttaccctatttgcacactggaatggaagtaatgcattcagtaatttcagaacctgagtgttggctgacatcaagcaactgagatacactgcagctgctgttggagaaggaggctggaggctgactcatgttatgttggctggcaggagtttgagaccagcctgggtggcatagcgatatccctgtcctgtctctagaaaactaaaaacattttaaaaaatactggctggattttctagcctgccagactaatcttcttgaaagatttagacataaataatttattttagcctttgtcattattactgttatgatagtaaaataatgaatcttttaagtattttttgaatgctcaaggtatatctctgaaagagtaccaaccaaatgctgatattagggattaaatccagttttgagagagacagcaattcattcaaacttgttgcatgcaggatcctatgtcaaagtgtatatgagagggcactccgctgggtggcggctgctgtggtttgaatcatatgccttagtattggtatttgacaataagagttgtcaacctgaatttctagttggatgtatagccaagaaaataagaagttctgagggagcggggaactttgaggggtggagtggtccctccatgtacccctatattacagattgcaggttcatactgaggattttaccttgagcttctgggctccacagaacacttgcgtgtttccataagggcctagaagaagtgtcttctattcccatggacacaatgccagaatgtgattccctggttttattttaagctctttcttccacccagaaacacaacccaccacccctgagaaaagatgggaaataagtggattaaaccaaacattcagaagctgctcaatacatttccttgtgcgctaaagaggaggtacagtgctggggtcaagaaagcagggaaggagtcagggcatgggcacccaaaccacttattggccatgtgttctgagacaggcttccttcctgggccctgtctaaaaacaatgggcataatgacaacacctaccttatatggttattgagaagaagaggagttaacgtatgtaaagggcatgaacaggtgttcggcttatatatggtaagtggtcagtaagtgtagtttttctctcaaagacagttctccaggcagagcaagtgaggaggccttttttccacccctcagccgttcagaactggaaagcagttgtatttgcccatgca

SEQ ID NO: 41176 - DNA, 502 bp, Homo sapiens
cagaaaggtatctgaatagctgaataaactgcatgtaaaataaaaacatgtatacaatttaatcaactgtaattccagggaggaaaaataagttcagaagactttcatcagttttacatttacactgaacagttttgagcrattcaagataacaaagacacatatccaaacaattttaaaattatcaaaagaacgaggccaggcgcggtggcttatgcctgtaatcccagcactttgggaggccgaggcaggcagatcacctgaggtggggagttcgagaccagcctgacaaacatggagaaaccccatctctactaaaaacacaaaattagccgggcatggtggtgcatccctataattccagttactagggaggctgaggcaggagaatcatttgaacccaggaggtggaggctgcggtgagccgagatcacaccattgtactccagcctgggcaacaagagcaaaacaccgtctcaaaaaaaaaaaaaaaaaaaaaaaa

SEQ ID NO: 41177 - DNA, 502 bp, Homo sapiens
cagaaaggtatctgaatagctgaataaactgcatgtaaaataaaaacatgtatacaatttaatcaactgtaattccagggaggaaaaataagttcagaagactttcatcagttttacatttacactgaacagttttgagcgattcaagataacaaagacacatatccaaacaattttaaaattatcaaaagaacgaggccaggcgcggtggcttatgcctgtaatcccagcactttgggaggccgaggcaggcagatcacctgaggtkgggagttcgagaccagcctgacaaacatggagaaaccccatctctactaaaaacacaaaattagccgggcatggtggtgcatccctataattccagttactagggaggctgaggcaggagaatcatttgaacccaggaggtggaggctgcggtgagccgagatcacaccattgtactccagcctgggcaacaagagcaaaacaccgtctcaaaaaaaaaaaaaaaaaaaaaaaa

SEQ ID NO: 41178 - DNA, 502 bp, Homo sapiens
cagaaaggtatctgaatagctgaataaactgcatgtaaaataaaaacatgtatacaatttaatcaactgtaattccagggaggaaaaataagttcagaagactttcatcagttttacatttacactgaacagttttgagcgattcaagataacaaagacacatatccaaacaattttaaaattatcaaaagaacgaggccaggcgcggtggcttatgcctgtaatcccagcactttgggaggccgaggcaggcagatcacctgaggtggggagttcgagaccagcctgacaaacatggagaaaccccatctctactaaaaayacaaaattagccgggcatggtggtgcatccctataattccagttactagggaggctgaggcaggagaatcatttgaacccaggaggtggaggctgcggtgagccgagatcacaccattgtactccagcctgggcaacaagagcaaaacaccgtctcaaaaaaaaaaaaaaaaaaaaaaaa

SEQ ID NO: 41179 - DNA, 565 bp, Homo sapiens
gcactccagcctgggtgacaagagtgagactctgtctcaaaaaaaaaaaaaaaattaactttattgagatataactcatataccataaaattcaaccagttaaactgtacagttcaatggcttttagtatacacagagctgtgcaaccatcaccacaatctaattttagaacattttcatcacttcaaaaataaaccccatactggtagcattcactcctcattcttctctcccctactcttgaccctagccaactactaatctacttttttgtctttatagatttgcctattctgaatgtttcctagaaatggaatcatatagtatgtggttttttgtgacctggcttcattcactaagcatgttttcaaggtccagctatgttatagcatgtatcagtatttcatttcttcttatagctgaataatattctatgatatggatataccatattgggcatttgcttgtttccatttttgtctcttatgaataatgctgctgtraacattcacatatatttctctactactttttaaatcataactttgtttcaaaaattcctcca

SEQ ID NO: 41180 - DNA, 648 bp, Homo sapiens
aactgcattcctgctctaacctctccataattccattattttggtttgcaccacatggaagaataatttttttttttaaatattccctcttctcaggatggtcaatgactagtgaagaagactgccatgattaaaatacacatgacaattaagagaaattgcaagggggattacaggtacacaaagaaacaccatctgattttgctttaggcgtcaggaaagattttcctgaggaaatatttgcacttccttggcagcttgccatttattcattcctttttgcattcaacaattttttttttttgcctgtctattgtgcctgtatttacctgtttattctcaaatccagtctgtgttattcatctgcaaactacactgttgagctgggacgggtaggacaaaagaaatcctttgtagcaaggtattggcagtggggaatggagaaggggtaagtttttaagggcagagagatcaaccagcagagaattgcaatacacaaaaggaagaatagmtattagggacatagaaggaacagagttgattaagaaaaagttacaaattacaggttcttgcttgaaaaaccagttgaatgaaaatacaattcgccaaaatacgaagtatttggggaacataagtgttgtgttagtc

SEQ ID NO: 41181 - DNA, 1264 bp, Homo sapiens
cttctctcaaataagtaatgacgtagaaaatgttcacctaaatataagctgcctatcgaatattccatagtacttcccagaaatttcaagtgctgatacttaaaaatatgtacaatatgctaaaagacctaatctaaagcatttgattttattttataaaaatatttgattggccgggcatggtggctcacacctgtaatctcagcactttgggagaccaaggcgggtggatcacctaaagtgaagagctygagaccagcctggccaacatggtgaaaccccatatctaataaaaataaaaataaaaaaattagccaggcatggtggtgtgcacgtgtaatctcagctacttgggaggctgaggcaggagaattgcttgaacccagaaggcagaggttccagtgagccaagatgccaccactgcactcctgcctgagcaacaagagtgaaactgtctcaaaaaatgataataataaaaagtgaatgtcacaaatagattaatttaaccacgttccttttcaaaggtctagttattctttgcagcatggtttctagtggtaaattgttaaggaattcaattttataatttatctaaatatctggatttccctattccatcctttattgttattacagctttttagaaatcattaaaaataaacatacctgtttttgttttttgtttgtttttagaaacagagaagcaacaatagaaaaaataatacatcaagtggtcatattttgtctaatttattatctattattgaccttttatggatggccattatctaaaaaagtttttaaactgggaagttttagaaaatcatcaaacacaacattaacaagaaacgttgcagcaggaagaaaccgataagggactgttacagagatgcttcagaagcaaacaccataggcgtccacttccaacactgaaggactagcttgtagctgaccaatgctcttgccaaaaacttctgaaaaaggcaatacaaatgggaaagagaaactccacatgactgatgaataactaaaacatttctcaaccttattaattatctgagagatttatattaaacccagagtgaaatataattacacagcatcaggatggctaaccttaaaaagaatgaaaataacaggtgggcaaagatatggaacaactgggactttcataaaatgacaacttatagatcaaaaatagccacatatcactaatttgatatgttttcaccgaatgcaatcattttgaaagggtgcctggaac

SEQ ID NO: 41182 - DNA, 798 bp, Homo sapiens
tgaaatttaattgccattgtaacagtattaagaggcttagcctttaagtgatgatgacgtctttattcttatggggatgcttggtgccattatgatagggcaagtttggctcactcttgctctagctttccctctcgcctctgccatgtatctacgcagcaagaagtccctcaccagatgctggcaccatgatattagacttctcagcctccagaactgtgaaccaacaaatttctgtttattataagttacccagtgtcaggtattctgctatagcagcatagaactaactaagacatgggcttatattaaatcttcatgtatttccytgaattgaaatttcgtaagcccatggtctgaaaggtctcttgcaacagcacttatttcaggctaaccctgaagcctttgcatgattagaaagaaaatacttgggctaatctcagtgtttctccattcatattctctacttcctattagtaattgatgaatcacttatccactataattcgagcagaagttggctttatatgaaagaagaagaaatttgctgatctttgagtttgccactgttatttcaatagctgaatactatgttcacttttggactagatctacccattaattaacttggttttacaccattgaaaccatagcttctaagaccaatgtagaatcaggcttttccaagaaaatatatatggccaagaactactaacctctgagtaagtgaaattgaggacattcatgcagagttgtgtaattgtgtactgcactaggccccacatctaagtgtgagtc

SEQ ID NO: 41183 - DNA, 798 bp, Homo sapiens
tgaaatttaattgccattgtaacagtattaagaggcttagcctttaagtgatgatgacgtctttattcttatggggatgcttggtgccattatgatagggcaagtttggctcactcttgctctagctttccctctcgcctctgccatgtatctacgcagcaagaagtccctcaccagatgctggcaccatgatattagacttctcagcctccagaactgtgaaccaacaaatttctgtttattataagttacccagtgtcaggtattctgctatagcagcatagaactaactaagacatgggcttatattaaatcttcatgtatttccttgaattgaaatttcgtaagcccatggtctgaaaggtctcttgcaacagcrcttatttcaggctaaccctgaagcctttgcatgattagaaagaaaatacttgggctaatctcagtgtttctccattcatattctctacttcctattagtaattgatgaatcacttatccactataattcgagcagaagttggctttatatgaaagaagaagaaatttgctgatctttgagtttgccactgttatttcaatagctgaatactatgttcacttttggactagatctacccattaattaacttggttttacaccattgaaaccatagcttctaagaccaatgtagaatcaggcttttccaagaaaatatatatggccaagaactactaacctctgagtaagtgaaattgaggacattcatgcagagttgtgtaattgtgtactgcactaggccccacatctaagtgtgagtc

SEQ ID NO: 41184 - DNA, 798 bp, Homo sapiens
tgaaatttaattgccattgtaacagtattaagaggcttagcctttaagtgatgatgacgtctttattcttatggggatgcttggtgccattatgatagggcaagtttggctcactcttgctctagctttccctctcgcctctgccatgtatctacgcagcaagaagtccctcaccagatgctggcaccatgatattagacttctcagcctccagaactgtgaaccaacaaatttctgtttattataagttacccagtgtcaggtattctgctatagcagcatagaactaactaagacatgggcttatattaaatcttcatgtatttccttgaattgaaatttcgtaagcccatggtctgaaaggtctcttgcaacagcacttatttcaggctaaccctgaagcctttgcatgattagaaagaaaatacttgggctaatctcagtgtttctccattcatattctctacttcctattagtaattgatgaatcacttatccactataattcgagcagaagttggctttatatgaaagaagaagaaatttgctgatctttgagtttgccactgttatttcaatagctgaatactatgttcacttttggactagatctacccattaattaacttggttttacaccattgaaaccatagcttctaagaccaatgtagaatcaggcttttccaagaaaatatatatggccaagaactactaacctctgagtaagtgaaattgaggacattcatgcagagttgtgtaattgtgtactgcactaggcmccacatctaagtgtgagtc

SEQ ID NO: 41185 - DNA, 652 bp, Homo sapiens
tgttttactctctctaagctttccacaagcctataaataatcttaactacaattattattagcctaaattatctttcctagtacctaagaactaaaacaatgtgatatttcagcttagctggacatccgttgttctacaaatcttgtctcaggaggtgaaacaagcctcgtagttttgttttatcatgttttgtttgtttgtttgttgttcatttttctttgctcctggtaaatgaagctagtaatagctgccaacaagattattttaaagtcaaattatatagtctaatttttttaaaaatctctttctcctatggttaatgtgctaagaaaacatcttcagtctatarccccttagaaaagtcaggaatcaaagttagtcttacaagcaagggacagcttacaaccatccacctaagtagaagaaggggtgtgccagcccccagggccatagccccccatgggaaaaatagaacttgcctgccaaaagtttgtaaaaataaacaatgaaaggaaaaaaagttaatacttaaattgtcatgtgtcatgctgatatgaaataatgccattaccatcacgacttcagttaatatttagcacttgatacgtgttgtgctacctataataattttatgtttcaataagttggcaa

SEQ ID NO: 41186 - DNA, 1146 bp, Homo sapiens
gaacaaacatacatttaaaatcactaccgattaactaatggtaattaaataagaattagaataaatttttcatggactaattttatcaattacaaatttaaagataaatttcagcattcacataatattgcatatatatttatatgatatatmtattcatatcttatacacacacagaaatatatattccatacacatattagtttattataaatcatgttccattaggatctttggaaagcttttgaacaatatctagagcataaatacgtttatgcttttattttgttaaataaaatattcttttttttaggctagtcaagtgaatctttctatttctttctccttccttccttctttccttccatacttccttctcttaccttttagtttatttcctttctcttttatatttctcttctcctccctccctttttcttttcttttctatactttttaatcatttatcatattatcattaacagatatttattaagaatttagtaggtactccactaaagtactttagtaggtactccactccactataagtactttaaagcttttgaagtgtacacacaattgctccccctgaaaatgtatagtctttattaaagggacaaagttaatgtttatggaacaattggaagctaagtataagtgatgtttaattctgtcaatgcaaataatgatgactccaagaggttaattttggaagacgaagagaccttttagacaaaatttcattaaaaggctgacaatggaagacagtaatctagtatcatttttaacataattatgacacataataagttattcatggctatattatcttgcaatatgttcttttttctttcttcctataatatatagcacaattgttatggggtattttgtaagcaatattctttacacagaaagttatagtccattttgaaaatagctttctgaacttgtctccagccaaaagtaggtcatacatacagtagtcagaagaagagaaaaatcaaagttttaaaaagccaacttgcttccctacattttttttactttctaattctctctctctctctctctctctgtgtgtgtttgtgtgtgtgtgggtgtgtgtgttgcagggtgggggcatgtgtgatacatatacct

SEQ ID NO: 41187 - DNA, 650 bp, Homo sapiens
gataagttacttgcagatcaactctatccttttgaggtttgttttaaaccttgtcagggtttcgccaacagggtttggagtagtactctgaytactccaactgtgaatttctctcaggcctgtgggagtaatggtaatttttctacttgcagcactccggaagttgttctttccgcgttttttgatgtgtatggtctcatagactctcatccttggcacacacaagttagaatccatccaaagacccaaggagactcctatacaaatttctagaattttttttctgtgtactcattcttttccagtaattttgtcaggcatttgaactacagcaactcaatcttgaatagaagctgggtaaaatgaggctgagacctactgggctgcattctcagaaggttaaggcattctaagtcacaggatgagataggaggtcagcacaagatacagaacaaagaccttgctgataaaacaggttgcagtaaagaagctggccaaaatccaccaaaaccaagatggcgatgagagtgacctctggtcatcctcactgctacactcccaccagcaccatgacagtttacaaatgccatggcaatgttaggaagttacccaatatggtctaaaaaggggaggcatgaataatccacccc

SEQ ID NO: 41188 - DNA, 650 bp, Homo sapiens
gataagttacttgcagatcaactctatccttttgaggtttgttttaaaccttgtcagggtttcgccaacagggtttggagtagtactctgattactccaactgtgaatttctctcaggcctgtgggagtaatggtaatttttctacttgcagcactccggaagttgttctttccgcgttttttgatgtgtatggtctcatagactctcatccttggcacacacaagttagaatccatccaaagacccaaggagactcctatacaaatttctagaattttttttctgtgtactcattcttttccagtarttttgtcaggcatttgaactacagcaactcaatcttgaatagaagctgggtaaaatgaggctgagacctactgggctgcattctcagaaggttaaggcattctaagtcacaggatgagataggaggtcagcacaagatacagaacaaagaccttgctgataaaacaggttgcagtaaagaagctggccaaaatccaccaaaaccaagatggcgatgagagtgacctctggtcatcctcactgctacactcccaccagcaccatgacagtttacaaatgccatggcaatgttaggaagttacccaatatggtctaaaaaggggaggcatgaataatccacccc

SEQ ID NO: 41189 - DNA, 650 bp, Homo sapiens
gataagttacttgcagatcaactctatccttttgaggtttgttttaaaccttgtcagggtttcgccaacagggtttggagtagtactctgattactccaactgtgaatttctctcaggcctgtgggagtaatggtaatttttctacttgcagcactccggaagttgttctttccgcgttttttgatgtgtatggtctcatagactctcatccttggcacacacaagttagaatccatccaaagacccaaggagactcctatacaaatttctagaattttttttctgtgtactcattcttttccagtaattttgtcaggcatttgaactacagcaactcaatcttgaatagaagctgggtaaaatgaggctgagacctactgggctgcattctcagaaggttaaggcattctaagtcacaggatgagataggaggtcagcacaagatacagaacaaagaccttgctgataaaacaggttgcagtaaagaagctggccaaaatccaccaaaaccaagatggcgatgagagtgacctctggtcatcctcactgctacactcccaccagcaccatgacagtttacaaatgccatgrcaatgttaggaagttacccaatatggtctaaaaaggggaggcatgaataatccacccc

SEQ ID NO: 41190 - DNA, 1207 bp, Homo sapiens
cacttacgagaactttttttttttgtagattgaggaaacttgaatatttttgtatcctgaagggagaatggatgaagaagaaatggatgaagaagaccgaagataatgatgaagggataattkggaataggattcacagcaagagagacagaagggaaagacattgaagaaacagactagttaacacatgaaaaaaatagagcagaggaaaacacgtccatgtttttccacgtctaatgagaacaggtctgatgtgaaaggaattggaggagaaggggaagtttggtgatgcacagtttgcatcccagaaggctcttgacaaccaaagtgtccacagcagattcgtccagtctagatagaccatgcacagagaatttcaaagaaaagcagaatagatttccaaacctttaccctaatccagggaggagaagacgggacgtcaaaatatagtcttgggtatagaagcattgggtcgcaaagacctgaacaacggctgaaatcaaggacaaatattatggtacatggccctgggtcagcttgtattttagaaacgaattaagaaaaccaaaacaattgcaaagcccgccctgtgctctaacaatcttccctcttcgatctcttcattggccagtgtcatgcaaacactctggattaaacatgcatggtctaacattgattggcatgttaaagaatccttctgtggccagcgattggcgggcgtgtctgggctctagccaatccggaaaggggcgggctggttaagcgtcaggttccttggatcgaccggtcagcccagtaactgactacttttctcccttctctagggtcctagcacagtgtctgatggagctttcctaccagaccctgaaattcacgcatcaggcgcgggaagcggtaaggaacgcatatataaaacatgattataccaagaacccctctcctactgttgctgcgggacgattccgagtctccggttgctatggcgacagagtccgctactagagaagcgcaaacgcagtgagaggcgctcggccgaggtggttaaatcccgggctgggcttgcagccgtgatggagggaaaaataaatgagacacaggcgggtttgggggtgacaacgggtcggatgaaagggacggcagggtcggttcctgattgaggaaatgaggtattgacggggaggtgttattagactctggatcttgattg

SEQ ID NO: 41191 - DNA, 495 bp, Homo sapiens
ttaatagtactgtaccaatgttgatttcatggttttgatcattgtactatggtgatataagatttaatattaaaggaaacagggataaagaatatatgtattatttctataatttttatctaaataaaaattactacaaaatataaagtttttatgccgggcatggtggctcacgcctgtaatcccagcactttgggaggccgaacaggtggatcacttgaggccaggagttcaagacaaccctggccaacgtggtgaaaccccgtctctactaaaaacacaaaaattagccaggtatggcggcacctgcctgtagtcacagctactcaagaggctgaggcaggagaatcgcctgaaaccgggaggtggaggttgcagtgagccaagatcatgctactgcactcactccagcctggatgacaragcgagactctgtctcaaaaaaaaaattatgtaattaagtacagaatttcccaaacttacttaactgcaaca

SEQ ID NO: 41192 - DNA, 570 bp, Homo sapiens
atcaaaaagaataataactgcattggattcaaaccgattaaatatagtaatgtttcattttattcataataatactttaaaaatcactgatctcctttaaaggatgttaagggaaaaattcatcattattctgacaactgatagagaaaatgcaaacagatttttggtttgagtagaaaagccatatgattaatggctaaatgctagaagggcatttgataaaattctattcattcctgatgaaatctctcaataaacaagaaaagaaagaaattctgttaacatgataactggtatctgtcagaaagcaatagctaatatactaaaaatgaaacactaaatcacaaagctaagacttctaaaatgtatactatgttctgtcatttgacagtattctaaaaattctagataatacaaggcaatataatttttgggttttttttttttgagacaggatctcgttttattgcccaagctggagtgtggcaacaygatcttggctctctgcagcctcaacctcccaggctcaagtgatcctcccacctcggcctccagagtagctgggaggcc

SEQ ID NO: 41193 - DNA, 567 bp, Homo sapiens
acaatggaaaaaagattgcatggaaatagttaaattcccaggaccctgggggctttaagggatgggctagacggcggggaaaagacactgcttccagaagggtcttgatgctgatggagccgaggttgaggagtaaaatacgcctgtttcctctytctcccttaatcccacttttctaccaatgtttccaagtcccctcacacaacgtcaatcccaggtaaagagttgtcatcctctgttggttcttcttcctacgattctgtcttgcggtgttgttattttcgcttttactcccaagaagattctctctgtgtcttttggaatccacagatgtggaagctgggtacatggagggccaacggtagaactcagtggggtgtgtccaggctgcaattaacctaatgaccccgcggggcacagcagtccacctggcgtggaccgccccgattggctgcgttgggctgacggaatgaattcctatcggggcggggcagcccaggggcccaggggggtcagggcttgagccctgggtgggcccggggctggctatataaggccgggctctgg

SEQ ID NO: 41194 - DNA, 573 bp, Homo sapiens
cagtcagagaggctgcaggcggccggcgctgattccgccgggccgaaaacggtgcccagccatgtcttctcggagctctgggacccctcagaggcctggatgcaggccaactacgatctgctgtccgcttttgaggccatgacctcccaggcaaacccagaagcactctccgcgccaacgctccaggaggaagctgctttccctggacgcagagtgaacgctaagatgccggtgtactcgggctccaggcctgcctgccagctccaggtgccgacgctgcgccagcagtgcctccgggtgcctaggaacaatccggacgccctcggcgacgtggaaggggtcccctactcggytcttgaacccgttctggaagggtggacgcccgatcagccgtaccgcacagagaaagacaatgccgcactcgctcgagagacagatgaattatggaggattcattgcctccaggacttcaaggaagaaaagccacaggagcacgagtcttggcgggagctgtacctgcggcttcgggacgcccgagagcagcggctgcgagtagtgaccacgaaaatccga

SEQ ID NO: 41195 - DNA, 1885 bp, Homo sapiens
tttcaaattaagctcccctaaacacatacatcagtttttatgtttattgtttcacatstacaattatttttttccccaaaagacagtatttttttttttttttttgagacagagtcttgcttgttgcccaggctagagtgcagtgtcatgatcctgtggtcttgaactactagacttaagcgatcatcccaccttagcctccggagtagctagtactaaaggtgtgtgcaccatcatgcctagataatttttatttttaaatttttttgtagagatggggtctcattatgtgcccaggttggtctcaaactcctgggctaatgtgatgctcttatcttggacgcccaaaatgctgggatttgtaagttttgtaataacaaaaattattaagatcatctcaaagtctaatgctctcagaagcctccccttattttttgcagtcagaagtaattgctacttttcacatgtattcattagttcaacaaatatttatctgctattttttcaagcacagctgtaaataggattcaaaaataaaggtaggcatttattgtctaatgaataaacagatatgtaaataaactaatacaaggcaattgataatagaggtggaaacaaagattttaacttaaagagaaaggacataaactgtgccctgggggaattagaagaggcttcgcttctctggaagttcaagatgggattaaagagtgagctagggccgggcgcggtggctcacgcctacaatcccagcactttggggggtcaaggctggcagatcaggagtttggctggctgaggtcaggagtttgagaccagcctggccaacatgatgcaaccccatctctactaaaaatacaaaataattagctgggcgtggtcgctcatgcctggaatcccagctacccgggaggctgaggcaggagaattgctggaacccgggaggcaaaggctgcagtgagctaagatcgcaccagtgcactccagcctgagtgacagagggagactgtctcaaaaaaaaaaaaaaaaagtgaaagagtgagctgggtttccccgtaacactacatttatgttgcactggtgcacaggtgcaatgatagatccatcatttgggatttgttctgcactaagaaacttctcagaggtcactgttggagacaacacttatctcttgtcttcctttatctacactgaaggatttactctagagcattcagtcctattgttgtagttcttactttatgccagtggctcaccaatttgagcatgcatgggaatcacctggaggatttgttaaatgatagattactaaacccaattccagatagccttattcagtagctatgggatatggaccaagagtctggattttaacaagtattcagatgatgctgatgttgctgattcagggaccccatactttgagaaccattgctctaagcaataccatccattctagctacttattcttttttttacaaaaaaatctgaaacatcttttgagtattttgcaagatgctttcttgaaagtttgtaccagtttacaccgctattatgagcatacccatattttgatactaacactataaatattaataaaagtggaaacgaagaatttgttttttaataaacattaaaaaatgatatcttattttgtaggttgcaagtgatacattgatcttttccttgatagttctttgtgaaattaaagatttttaaatgtctctaggtaatttattgttattattttgttttgtgaattccctagttacatatttaactcacatttccatggtaggtgggtagagggattgagatattctaaaggatttgtaggagctctttttatattaaaagatttttgattgtatttgttgcaaatatt

SEQ ID NO: 41196 - DNA, 1035 bp, Homo sapiens
tggcctccctgatgctggggtgcttatatctacctttattcaggggctctggagccctggatcaggaaaccctaacrccaagagccactgaaggtggctcatggcctcttaaataagcaagatgtagtggactgctctgttcatgggtttttttcttttttgcctctgagccactcctacgtgcttccttcatgggacagttcttaccaaattagatttttgtttcatcagttctggtcagtttcctggacatcagcttgacccaaccagacctcaaaccagaaagccttattaaacaagacaattatatctttcccaagagcccttccttctagatttcttccttacctgagcatagggtaattttttttgttttcctaattgcctagtgactggaaaatcactgagtttagactttctcttctacttttccctggaataccaccctgtagctttcccctggattgtcaggtcactcagtctggcccttaatttacccccaagagacatcagggaaccttaaatccacaaatgcaatacacttgttacaagaaacaaagagcagggtcaaatacactaggtgagatcccgactcattttgttttactcagatgaatgaatcaggactgctgaacatctgtgggcctggaaaacacagatgtcaaaaattgtaaggtgggtaggagtcattcagaagtggtgtataagatgtgggtgagggttcagaggcaacgtccatctggattctcaagactgacctgcacattcattacttatccacagaccacccaaaggaccaagcagtaatcactctggaaccatgattaaagggtgtgtgactggtcatttatggcagaagctgggatcatcatacagttgaacccagtctctgttgactgtatatcattatactaagtaatactttttttggcgattaaataaagtaacattcaataaaaagataagtgctgactggggaacataaggaaagtgtttttaatgttaagaattgcctaagcattctcttttagaaaa

SEQ ID NO: 41197 - DNA, 1035 bp, Homo sapiens
tggcctccctgatgctggggtgcttatatctacctttattcaggggctctggagccctggatcaggaaaccctaacaccaagagccactgaaggtrgctcatggcctcttaaataagcaagatgtagtggactgctctgttcatgggtttttttcttttttgcctctgagccactcctacgtgcttccttcatgggacagttcttaccaaattagatttttgtttcatcagttctggtcagtttcctggacatcagcttgacccaaccagacctcaaaccagaaagccttattaaacaagacaattatatctttcccaagagcccttccttctagatttcttccttacctgagcatagggtaattttttttgttttcctaattgcctagtgactggaaaatcactgagtttagactttctcttctacttttccctggaataccaccctgtagctttcccctggattgtcaggtcactcagtctggcccttaatttacccccaagagacatcagggaaccttaaatccacaaatgcaatacacttgttacaagaaacaaagagcagggtcaaatacactaggtgagatcccgactcattttgttttactcagatgaatgaatcaggactgctgaacatctgtgggcctggaaaacacagatgtcaaaaattgtaaggtgggtaggagtcattcagaagtggtgtataagatgtgggtgagggttcagaggcaacgtccatctggattctcaagactgacctgcacattcattacttatccacagaccacccaaaggaccaagcagtaatcactctggaaccatgattaaagggtgtgtgactggtcatttatggcagaagctgggatcatcatacagttgaacccagtctctgttgactgtatatcattatactaagtaatactttttttggcgattaaataaagtaacattcaataaaaagataagtgctgactggggaacataaggaaagtgtttttaatgttaagaattgcctaagcattctcttttagaaaa

SEQ ID NO: 41198 - DNA, 1035 bp, Homo sapiens
tggcctccctgatgctggggtgcttatatctacctttattcaggggctctggagccctggatcaggaaaccctaacaccaagagccactgaaggtggctcatggcctcttaaataagcaagatgtagtggactgctctgttcatgggtttttttcttttttgcctctgagccactcctacgtgcttccttcatgggacagttcttaccaaattagatttttktttcatcagttctggtcagtttcctggacatcagcttgacccaaccagacctcaaaccagaaagccttattaaacaagacaattatatctttcccaagagcccttccttctagatttcttccttacctgagcatagggtaattttttttgttttcctaattgcctagtgactggaaaatcactgagtttagactttctcttctacttttccctggaataccaccctgtagctttcccctggattgtcaggtcactcagtctggcccttaatttacccccaagagacatcagggaaccttaaatccacaaatgcaatacacttgttacaagaaacaaagagcagggtcaaatacactaggtgagatcccgactcattttgttttactcagatgaatgaatcaggactgctgaacatctgtgggcctggaaaacacagatgtcaaaaattgtaaggtgggtaggagtcattcagaagtggtgtataagatgtgggtgagggttcagaggcaacgtccatctggattctcaagactgacctgcacattcattacttatccacagaccacccaaaggaccaagcagtaatcactctggaaccatgattaaagggtgtgtgactggtcatttatggcagaagctgggatcatcatacagttgaacccagtctctgttgactgtatatcattatactaagtaatactttttttggcgattaaataaagtaacattcaataaaaagataagtgctgactggggaacataaggaaagtgtttttaatgttaagaattgcctaagcattctcttttagaaaa

SEQ ID NO: 41199 - DNA, 1035 bp, Homo sapiens
tggcctccctgatgctggggtgcttatatctacctttattcaggggctctggagccctggatcaggaaaccctaacaccaagagccactgaaggtggctcatggcctcttaaataagcaagatgtagtggactgctctgttcatgggtttttttcttttttgcctctgagccactcctacgtgcttccttcatgggacagttcttaccaaattagatttttgtttcatcagttctggtcagtttcctggacatcagcttgacccaaccagacctcaaaccagaaagccttattaaacaagacaattatatctttcccaagagcccttccttctagatttcttccttacctgagcatagggtaattttttttgttttcctaattgcctagtgactggaaaatcactgagtttagactttctcttctacttttccctggaataccaccctgtagctttcccctggattgtcaggtcactcagtctggcccttaatttacccccaagagacatcagggaaccttaaatccacaaatgcaatacacttgttacaagaaacaaagagcagggtcaaatacactaggtgagatcccgactcattttrttttactcagatgaatgaatcaggactgctgaacatctgtgggcctggaaaacacagatgtcaaaaattgtaaggtgggtaggagtcattcagaagtggtgtataagatgtgggtgagggttcagaggcaacgtccatctggattctcaagactgacctgcacattcattacttatccacagaccacccaaaggaccaagcagtaatcactctggaaccatgattaaagggtgtgtgactggtcatttatggcagaagctgggatcatcatacagttgaacccagtctctgttgactgtatatcattatactaagtaatactttttttggcgattaaataaagtaacattcaataaaaagataagtgctgactggggaacataaggaaagtgtttttaatgttaagaattgcctaagcattctcttttagaaaa

SEQ ID NO: 41200 - DNA, 1235 bp, Homo sapiens
catttctcctagagacacatttaaattccttcaaagccttagagagtgaacccaatgctttaagtacagattttggatcacaactctattgcttcttttgtaatgtaatgtgaggccaacatcttagcaaaggggccccatggttttcttccctaaaagtagcaaacccccaattcctcagactttgcactagccaactttgccaaagttcacaagatctgcagttagccagcaatttgtggacatcacattatttttagacaatgttgagccctgatgggtggagaagcaagaatgcttttcagtggtctcctttgcaagcctttgatgttccctctaagtcatattgtgtcagtggaaatgttggtctgaggagactctggcaattctttcaaaaatgcacaaatgctgagtgtatgtttttaatggcttcaagcaattaaaataatgtttaaaataattataagtagcagctcattaaagcaaggaggctgagggcccggatggccactggcttgtagctgtgctagggacagtgttgtgaaagggatgcttaggtcaatggaagttcctgctgagaaaattctggtgtaatctaaatcagctgctgcctctgtggtgcagatgcccctgaaaatgggccattagacattaactggggagaaacgtggtcccttaggaaaaggacaattaaacacaaatgcaggaatgagcatattaaatgtttcacaaaactaaaaactaaaatttaaaaaaagcccaataaagtgatttcttcaaactagaaacctacagagattgaagctaagtgcccaaaatactaagccaaagcaaattctcyaagggtatgttcagcagatagtgagctgatggagaagaaaagaagcttccagaaaccgtgcaggctatggtcaaccaaggaagaaatgagtggattaagatgtaagcatattaagatgataagaaattccagcatcagaaagaataaaggagtcggtcattaaaatgaattagagattaatcaaaataaaacttaagaaggctgagcctgttgatctgctatcagtggggcttgttttagcagggaatttcaggggatttatcacaagataatatggataaaaagttgctcttaagtctttaaagggatacaaccaaataaagtaatcctgcaagatgactttccttttacaacgacccatattcaagacaaaaatatatatatatatatatgc

SEQ ID NO: 41201 - DNA, 1129 bp, Homo sapiens
gggtggatttcatagagttggtgtggcagacagctgccgaggcaatgcaaattgtgctgttaaaattatgctccagttagacattcaccattgtagcaagggagcagagtctgtaggactagaggcacaaatggagtagcagctatttttactgaagagccttttatttttccaaagtaaattctcacatcactcctctgaagcaaaaagtaaaggaggagagggtggttaatgtgaactcctctaggtgaatgtgtgtcaaaagagaggcacatttgtagatattttttctcaaaaagaaaaatgatgcgaagtttctttttaccttaggtaagttgagctctcatgggatcacacattttcaactaaactttccaaactgaaggttcttcagagcagcctgatctatttttcttagctagttctgcaaagatggaaacacagagctctttttgtctctaagtaattctgatggctcacttgaccttgaactggatggctgaaagyatcttcagaggatcctggtcctccaagcccaccttgcatctccaggaatcgtccgggagttctctgggattgttgcaactcttggattatatacatgcaaaaaagaaaagagcaagtgtctagaattttaacacattttccttcaggactggatagatgcatctaaatcacaggtcccaacattttgctttgtggatgaagctttggtgttcataaagacaccaccacccttctctctgtctgcttattcttggcccttgtcccctcattctgaaatcccgacattagcaactcttcagaggcagtggcctgggttattgaccctcatcattccggctagacatgggttgtggttggaagataaagggagtgtaatgatgacaacatgactctccagaggactttgaggaacctcaggcaaaggctttggggtgacaccagcttgcaggctgcagaaagtcagcctagatgctgacattagcacctgggtccaggttgtgcagccctatagagacttatgttttataaaatgaacactaatccttttgactggtacaagaagagcccacattgccaaataccacgaaatagggctctttagctcaagggaaaagtagaattc

SEQ ID NO: 41202 - DNA, 2425 bp, Homo sapiens
gcatcctggaaccacccctctgtcactaattttcgagctaatcttgggaaaactgtatttcttcactttgctgctttcacatctgctaatgggaataaaccttgtattgtggaagtatagggattggacttagggaatatgtatctcttagggcagactaggtacattgttctgtatgtgggatttgcattcttattttatgttattaccttgatctttattattattgctactattggtatttctcacaaagcctcatttattttcttgttttctctacccacatcttgatacccatagcgtttccatgatatatctagactggccaatttgttttagagttgtgtcatcttgattcataaagttgttagtgaaccattctctaacattactcagaggccacaaatgaggctgaggaataatcatrctaagatggtgctttatccattcagttgtaatagaatagtggaaacattgactacagcacgttttattgctgaatgcaattttcagctattttgcaacacttttataacatatgtaaaatgaggttgtatatggaaaagttgaatatcttatgtactcactgtgtagattgttatgaataaatctctaagctataacaaataaatacaaaataaagtcaaggactttattctaaaaatgcttcatcttaaaactgacaataaaaaacgaaaaggaaatttcttggcaataattcttggcaataaacaaatgaaaaggaaaattgaaaaggaaaagaaaaataccattcaatattgatttatttcctttttccaaattgtgtacttcaatatctctgcacctatcttctcacatttgtaaggaagaggagtcctgcttcacagacaaagagagaaaaacaaaaacaaaaccactcaatacatccagacacatcactaaatgttttaatttaatttaatgttgaaatgtttgtgatagtatcattttcagttggcatttccacatttgttactaacatacatgaaggttaggagtctttcatatgtaaaactatttttaaagcaactttttttttttcagaaagtctgtgagaatcagacttattgcactggatttttaggcagtgactctctttaaaaactgctacattatactatatttcacctgaatagaacacttgtataatgtacttatttaaatgcatcaaagatacaagcatttttctcaatctaaagaaaatcagactaggcacaaattctgcaagaaatctaaaggtagaaaatggctcatctgttctgaaacactaacactcactctttccctctttagacactccaactaagggctaattcccactcattctctgtaagtgattatagatactgaatggccacaattatgttgctgcatatgaatgtagtgtttgatgaatgtaactacaacaatcacaaagcaatagaactaagaagaaaaatgcaataaactatcattttttaaattgccacactgaagcaaaattatacatgctaagaaagacaaacactcagcagataagatctatttgatacaaaattttattatacatgacaataacttggtattttactttctattatacaaattaatgatcgtgcttagttcttgtactgtgtgtgagagagcaatcctctctaacatgtgcaaagatatgtgcaattaataaaaatactataaaggaggtatgctagataataaaaattcagaccttccttagaatctgaatttaagtcttccaatttgttttcaaacatgaacttgggaaacacttttagcttattgttatactcgtcaattaggtcagtggcctcttacaaaggatgcacttttgccccacccagtggccgcctcacaaatagccaccgttcccctgagtaaggtaattcctttcccaggtgggttttggtactagaaacacaagggaatacgttgtccctgcggctcaatgtgtacatgaagctatcatttcatcagcgctgctgccatctgtactgagctgtggagcaaactcacaagaatgccagccacttcgggacttctaccaaatgcttcattatgcaagatctacaaagtcaactatgctttcatccaaaacaccaaaagaaagagcaaacgcacatctatggtaatgagattgagttggtgagaggaagagaaaggaggcaaagtaatttcatgacagagagtacaggtccaggaggtttcactctatgctaattatataaatttgagcaactcatttgtattgtacttgcttatacgttactgtaaaaggaggagagtaaaatttaagtaaaatcaagcaactggaaaaaggtaaagtctctacaaaaattgcaagaaaatatttaatatttttattctacaggtcatataatatttttctgtttgtgtctcatgcata

SEQ ID NO: 41203 - DNA, 2425 bp, Homo sapiens
gcatcctggaaccacccctctgtcactaattttcgagctaatcttgggaaaactgtatttcttcactttgctgctttcacatctgctaatgggaataaaccttgtattgtggaagtatagggattggacttagggaatatgtatctcttagggcagactaggtacattgttctgtatgtgggatttgcattcttattttatgttattaccttgatctttattattattgctactattggtatttctcacaaagcctcatttattttcttgttttctctacccacatcttgatacccatagcgtttccatgatatatctagactggccaatttgttttagagttgtgtcatcttgattcataaagttgttagtgaaccattctctaacattactcagaggccacaaatgaggctgaggaataatcatgctaagatggtgctttatccattcagttgtaatagaatagtggaaacattgactacagcacgttttattgctgaatgcaattttcagctattttgcaacacttttataacatatgtaaaatgaggttgtatatggaaaagttgaatatcttatgtactcactgtgtagattgttatgaataaatctctaagctataacaaataaatacaaaataaagtcaaggactttattctaaaaatgcttcatcttaaaactgacaataaaaaacgaaaaggaaatttcttggcaataattcttggcaataaacaaatgaaaaggaaaattgaaaaggaaaagaaaaataccattcaatattgatttatttcctttttccaaattgtgtacttcaatatctctgcacctatcttctcacatttgtaaggaagaggagtcctgcttcacagacaaagagagaaaaacaaaaacaaaaccactcaatacatccagacacatcactaaatgttttaatttaatttaatgttgaaatgtttgtgatagtatcattttcagttggcatttccacatttgttactaacatacatgaaggttaggagtctttcatatgtaaaactatttttaaagcaactttttttttttcagaaagtctgtgagaatcagacttattgcactggatttttaggcagtgactctctttaaaaactgctacattatactatatttcacctgaatagaacacttgtataatgtacttatttaaatgcatcaaagatacaagcatttttctcaatctaaagaaaatcagactaggcacaaattctgcaagaaatctaaaggtagaaaatggctcatctgttctgaaacactaacactcactctttccctctttagacactccaactaagggctaattcccactcattctctgtaagtgattatagatactgaatggccacaattatgttgctgcatatgaatgtagtgtttgatgaatgtaactacaacaatcacaaagcaatagaactaagaagaaaaatgcaataaactatcattttttaaattgccacactgaagcaaaattatacatgctaagaaagacaaacactcagcagataagatctatttgatacaaaattttattatacatgacaataacttggtattttactttctattatacaaattaatgatcgtgcttagttcttgtactgtgtgtgagagagcaatcctctctaacatgtgcaaagatatgtgcaattaataaaaatactataaaggaggtatgctagataataaaaattcagaccttccttagaatctgaatttaagtcttccaatttgttttcaaacatgaacttgggaaacacttttagcttattgttatactcgtcaattaggtcagtggcctcttacaaaggatgcacttttgccccacccagtggccgcctcacaaatagccaccgttcccctgagtaaggtaattcctttcccaggtgggttttggtactagaaacacaagggaatacgttgtccctgcggctcaatgtgtacatgaagctatcatttcatcagcgctgctgccatctgtactgagctgtggagcaaactcacaagaatgccagccacttcgggacttctaccaaatgcttcattatgcaagatctacaaagtcaactatgctttcatccaaaacaccaaaagaaagagcaaacgcacatctatggtaatgagattgagttggtgagaggaagagaaaggaggcaaagtaatttcatgacagagagtacaggtccaggaggtttcactctatkctaattatataaatttgagcaactcatttgtattgtacttgcttatacgttactgtaaaaggaggagagtaaaatttaagtaaaatcaagcaactggaaaaaggtaaagtctctacaaaaattgcaagaaaatatttaatatttttattctacaggtcatataatatttttctgtttgtgtctcatgcata

SEQ ID NO: 41204 - DNA, 553 bp, Homo sapiens
catcacacaccggggcctgtcatggggtgggggtagggggtagggatagcattaggagatatacctaatgtaaatgacaagttaatgggtgcagcacaccaacatggcacatgtatacatatgtaacaaacctgcacgttgtgcacatgtatcctaaaacttaaagtataataaaaaaaaattaactttttgaggcattaacattttaattatgaaataaaatatactcacttttgtaaatttaaagggcattttaaataatactttaaaacattaggtattaataaactatattggtaaaataacttgagcatcaaaagatctattatatattttttaaataaatgtaaaaattcagatattttcagatgtatctctatgtccttgttataataggacaaggttcatcagtattaagagtatatacaaatctgttattctcttgatatgcataaatctgcatctttagatgttgtctttaaatatattttcaaaattatgtgmataactcccaaaacatatataactaataaaaatatcaataataccaaaa

SEQ ID NO: 41205 - DNA, 553 bp, Homo sapiens
catcacacaccggggcctgtcatggggtgggggtagggggtagggatagcattaggagatatacctaatgtaaatgacaagttaatgggtgcagcacaccaacatggcacatgtatacatatgtaacaaacctgcacgttgtgcacatgtatcctaaaacttaaagtataataaaaaaaaattaactttttgaggcattaacattttaattatgaaataaaatatactcacttttgtaaatttaaagggcattttaaataatactttaaaacattaggtattaataaactatattggtaaaataacttgagcatcaaaagatctattatatattttttaaataaatgtaaaaattcagatattttcagatgtatctctatgtccttgttataataggacaaggttcatcagtattaagagtatatacaaatctgttattctcttgatatgcataaatctgcatctttagatgttgtctttaaatatattttcaaaattatgtgcataactccmaaaacatatataactaataaaaatatcaataataccaaaa

SEQ ID NO: 41206 - DNA, 553 bp, Homo sapiens
catcacacaccggggcctgtcatggggtgggggtagggggtagggatagcattaggagatatacctaatgtaaatgacaagttaatgggtgcagcacaccaacatggcacatgtatacatatgtaacaaacctgcacgttgtgcacatgtatcctaaaacttaaagtataataaaaaaaaattaactttttgaggcattaacattttaattatgaaataaaatatactcacttttgtaaatttaaagggcattttaaataatactttaaaacattaggtattaataaactatattggtaaaataacttgagcatcaaaagatctattatatattttttaaataaatgtaaaaattcagatattttcagatgtatctctatgtccttgttataataggacaaggttcatcagtattaagagtatatacaaatctgttattctcttgatatgcataaatctgcatctttagatgttgtctttaaatatattttcaaaattatgtgcataactcccaaaacatatataaytaataaaaatatcaataataccaaaa

SEQ ID NO: 41207 - DNA, 624 bp, Homo sapiens
tttccagaaggtgtcagttcataggaaaacatgttttctaaggaaaacgtttgatgataatgatggaaaagttctaagtcaatgacctcccatgtaaaacagaaaatttctctccactggaaattagaatccgtgttaaacacaactgtaagagtgttagcaaagcagttttggattggaagcattgagagtaacaattgatatgttgacatgaaagaaattagcatgttagtgtagacttgctaagytgacttgtgacctcatgggacgcagtaaacagggtcttagaagaattgtacacaacttacaggaaaagttcaaatgtatgtgtttgtgtcctaaggaagataagagctggatggcatcatattaaagatcgcaagtagcttgaaggtgttaaacactagatgtgttgaggttggcactaaaatatgcagactttctaaagaagggaggtgggctattcctaagacaagctaatatttacagttttaattgatacagtcccttcttttcccactcacatcacaatcgtcattgagctcttctttatctaatagaagacagtaagaaacttaaaggaggcaataaacctcagactataattcaatcatcaacctaagt

SEQ ID NO: 41208 - DNA, 580 bp, Homo sapiens
caaaatgatccaaaaggattaaatagttaatgcagactccaaagttctactctttgtgaaatcatgcaccaaatattgaagtcaatgttattaaccatgtagaattattcaatctccccgaacaccaaatctaccatttctcccataactttcaacaaatgatctttcaacttctttcatagagaaataggagctaaggacgtcctgtgatgaaatacacaaatttgcatgtctccacagagacatctcttctaaaatatctcttctaaagtcaaagtctaatcatttcagttgtacttggaatttcatacctttagggtatttggcaaactcattctaagagttgtttctctcgtgtatcttgaaattttcttggtttcttccccattaacatttaattgctcgatactttccatttaggttggggatgagggagcgtgggagatcaagggtcgaaggataatcttttctctattactattatgrttatactttaagttctgggatacatgtgcagaatgtgcaggtttgttacataggtatacatgtgtcatggtggtttgctgcacctatcaacccg

SEQ ID NO: 41209 - DNA, 524 bp, Homo sapiens
gtacagaattttagctacataccactagtaattctaattttctattttctcccaaatcagaaaggtattttgaggtgtttaaaataaggcttcaatgtaagccataaaggggcccaacaatgcctgtgtctctgaaagtatttataaatatttatgaaakaatattataaattataagctactaggcacattgttatgatcacaaaaagatgacttattaagaaaatatattagaacattccaagcaaatgctcacaatgttcaaagaaaattaaaagttactttttaaaaattttttaccttgagactaatttttaaatgttagcaagtattctcacatgtggcaaagaatctcttccattatggaaagaatcagagtcactgactgttaaaatgaggtgccagaattatgagtaatcaatgttacctacatgaatgtttgatcctctagaccatgaaatttcataaatgatcctttccacacactcagaattcataatttaattctgaatcaatatagacag

SEQ ID NO: 41210 - DNA, 526 bp, Homo sapiens
cattttattgatgaaaatgcaaaagaaaagtaccctggcaagtggctgatcccaaataactacaatgtcgatatgaaaagaacctcaatatgcctgagataaattgatattatcaggctgcttcatgaaagaataagataaagtcatttatgatagatggtgtgctatcagaggatatctttaaccatcccctctaatgtgcctagaatgggtattaattgtgtcatgtagctcatcattaaccatttaactatcaatatggatatcaaaacatcatttttatatcttaaatatatagaataagatttttgaaaataaataatgaccaatataaaactgacacaaatgtgtaaataaaaacaagatrtcatagagtctgaatttgaccaagcccactattgacaagtgatttcaagtattactcttatagaggaaattccaatttttaacctcccttcctcttatctgttgtgcctttctgcccacatgcttacatatccaaagaaagaaaaagctaggcttcatt

SEQ ID NO: 41211 - DNA, 526 bp, Homo sapiens
cattttattgatgaaaatgcaaaagaaaagtaccctggcaagtggctgatcccaaataactacaatgtcgatatgaaaagaacctcaatatgcctgagataaattgatattatcaggctgcttcatgaaagaataagataaagtcatttatgatagatggtgtgctatcagaggatatctttaaccatcccctctaatgtgcctagaatgggtattaattgtgtcatgtagctcatcattaaccatttaactatcaatatggatatcaaaacatcatttttatatcttaaatatatagaataagatttttgaaaataaataatgaccaatataaaactgacacaaatgtgtaaataaaaacaagatgtcatakagtctgaatttgaccaagcccactattgacaagtgatttcaagtattactcttatagaggaaattccaatttttaacctcccttcctcttatctgttgtgcctttctgcccacatgcttacatatccaaagaaagaaaaagctaggcttcatt

SEQ ID NO: 41212 - DNA, 526 bp, Homo sapiens
cattttattgatgaaaatgcaaaagaaaagtaccctggcaagtggctgatcccaaataactacaatgtcgatatgaaaagaacctcaatatgcctgagataaattgatattatcaggctgcttcatgaaagaataagataaagtcatttatgatagatggtgtgctatcagaggatatctttaaccatcccctctaatgtgcctagaatgggtattaattgtgtcatgtagctcatcattaaccatttaactatcaatatggatatcaaaacatcatttttatatcttaaatatatagaataagatttttgaaaataaataatgaccaatataaaactgacacaaatgtgtaaataaaaacaagatgtcatagagtctgaatttgaccaagcccactattgacaagtgatttcaagtattactcttatagaggaaattccaatktttaacctcccttcctcttatctgttgtgcctttctgcccacatgcttacatatccaaagaaagaaaaagctaggcttcatt

SEQ ID NO: 41213 - DNA, 526 bp, Homo sapiens
cattttattgatgaaaatgcaaaagaaaagtaccctggcaagtggctgatcccaaataactacaatgtcgatatgaaaagaacctcaatatgcctgagataaattgatattatcaggctgcttcatgaaagaataagataaagtcatttatgatagatggtgtgctatcagaggatatctttaaccatcccctctaatgtgcctagaatgggtattaattgtgtcatgtagctcatcattaaccatttaactatcaatatggatatcaaaacatcatttttatatcttaaatatatagaataagatttttgaaaataaataatgaccaatataaaactgacacaaatgtgtaaataaaaacaagatgtcatagagtctgaatttgaccaagcccactattgacaagtgatttcaagtattactcttatagaggaaattccaatttttaacctcccttcctcttrtctgttgtgcctttctgcccacatgcttacatatccaaagaaagaaaaagctaggcttcatt

SEQ ID NO: 41214 - DNA, 1158 bp, Homo sapiens
tattgaatgtcatttacatatttataagaaaaatgattcttcctggtaacaatactatgataattcaaagtagtgttaggctgtaaatatattagtttaattcaatcaaatggagaagcagcctattaaaaagttatataattatatttacataaatcaagccacaaaattgaaagaggatataaaagaattagttagagcttagcttaacctcaaaagacataggttgcaaaaaaatggtgcaaagcaccacttataggactctgatccggaatcccttattaacatagcaaatatattaaacaaaattaacaaacaaagagactcaacttgaaagtttaggtcytctgaacactgaatatgaatgtttataatccagattaaccacagcggtcacaatttcagatagaaaagtaaacctagccagctgaggacacccaagttgcttataatgatataatttttgttttactacttgcgtttgagatgatgagaggaaaataattaaatagagaaataataaatcagtaagtattagtattttgtgttagatttagaaagtatatgtacaaatcatcatatggtgaaatatattgcatatctaacatttgagtgcattttaagttttgggtgataaaatagaatatttaaaagatattgagtattgacttagacctgtgaatttacattgaaaattataataaaattgtactaagtttgtaacttcattggaatgtttaagataagaatcaccatatttataattttaattttttagattttcttgtgtaggatgtgggaatgtcttgtcagtaactgaaaaactgaaaaagcaaatggcatatgttaaattaataaaatatttttataaaagattttaattaactgcatttgtgtaatgaagcatatatttatgttcctccttaaaattaattttgagaattattttatttataatagaatggaaacatacttgaaaaatacctagagttaaaatcatacatgttgagaaatcaaatgtctgcttttgatattatactttaatgaatcaaatgataagttagaaactcaaaataaattcaaattcaaaaattttcaaagaaagtaatagttacctccttaaatatacatcataaagaaaatatctgatatgtattt

SEQ ID NO: 41215 - DNA, 1421 bp, Homo sapiens
ataaacagagaaagcatactattcatcatttgttatctgaaaggtagcatcaattgtggctgctgccaaaccaaggaackaaagaaaatcatttaaaaagtaaatcaattctcaggtcgaacaatatgatactcaggacacaagagaactcatctaggtgcatcagaaggcaacgtcaagcattattcaaatggaaaaagtggcttttcacttctctaaaatcttaaaacgcaaatatagtggaataacagtatcttttatatgaatattgaagtagttgcttattgaggtaattatctaaaaataattaaagctaatacatgtcaaaaaatgataaagtacttcaaaataacagaggatgaaaattcaagctaaaggactaaaaattgcagctggaactggaaatgaacaatcatatgaaaagaaaaaacagagaaacgttttctcgtcttggtaaacagacgtgtgtgtgcttgtgtgcacacttcactcaagtatggccaagatcatcaattttgtgaacaaatcaaataaagttcttcagaaagaaccatcaaaaggacattttctttggttgaaacctagttaaatcagagtaagtacaaaaggctgaagcaaaatatacataaatacatttgctttacttttttaagaagaatttgtgttctcagaccatcattgtttaagttaaaagttttaacccacaaggcaattttttgttttttttttttaagacacggtctcgctctgttacccaggcttcagtgcagtggcgcaatcatggctcacaacaatttctgtgtcccaggctcaagcaatcctccaacctcagcttcctgagtagctgggactaaagatatgtaccaccacacacaattaatctttctattttttggtagagatggaatttcaccatcttacccaggttggtcttgaactcctgaactcaagatatcctgccgccttggcctcccaaagtgctgagattactggtacgagcacccagccgggaaacgatacttaagcagtaaatacaactgtgaaagctatgaatagaaaaaaaggggctagaaataaatacattaaaatcataaatataattggccgggcacggtggctcacacctgtaatcccagcactttgggaggctgaggcggacggatcacgaggtcaggagatcgagaccatcctggccaacatggtaaaaccccatctctactaaaaatacaaaaaattagcagggcatggtggcaggtatctgtagtcccagctacttggaaggctgaggcaggagaatggcatgaacccgggaggcggagcttgcagtgagccgagatcgcgccactgcactccagcctgggcgacagaccaagactctgtctcaaaaaaaaaaaaaaaaaaaaaaaaaaaaaaaacttcaa

SEQ ID NO: 41216 - DNA, 548 bp, Homo sapiens
tggaaaaagtgattattacttcagagaatgagccacatcctggattaattgaaatccaaggacctttatcattgaaaagtgtattgggaattaccagtaggtaacctatagctatagctataccttttctcgacatatagagcattgactgcttcagaatattaatggttttattttgccaataagagtgtctaaacagaaagataattcccctggggtacatttatataagactttgtattttatgtcaaatttaaatttgtgtaaccaacctattataagaaaaaccccacaaattagcattaggtgtgctattagtgtgtggtgaatacagaaacaatcaatattgactctaaatatgtacaattagtttgaacttttttaaaaagcaaaaaaaaatacacaatacgtatcttttgttgcatacagttgctgtggttggctgataaatatttgtcgaagaaagaaagaactgaaagctcgcacmgtatggcttggatgtcctgaaaagtgtgaagaaaaacatcccaggaattctataaaaaatc

SEQ ID NO: 41217 - DNA, 192 bp, Homo sapiens
ttccctcttacaccacccactctttcctgtagaatarggatgtgcaaacgttctctctaaaggaccagatggtaaatattttaggctttacaggttatatggtctcggtagcatcttcttaactctaccatcatagcttgagagcagccataggtaataagtcaacagattagcgtgattgtgtttcaaaag

SEQ ID NO: 41218 - DNA, 579 bp, Homo sapiens
ggctcaggtaaatattctcctctttgtatggcctgggtctgggacactttagacagacagtgtagataaaatatccaagaacwctgccaccaaggcttttcctgtccttggctccaccaaaagtattttattgctgatgactaaactgcctaggatggaaagaacaaatgcctgtcctcaccttctcccaagtcataattgggaagtcattcagtcttcaaatggctgcagaaaaaaagaaactaactaataagaaagacagagggtgaaggacagcagcaagtacaaaataaagagatagacgtctaaaattcaagttgagagacagcatgtgtttctgaactcagaggaaggcagcaatgggaggaaacaggcagactgactcactggcaatgagatgcaggtgacccctcaacaatgcctcactgcccagcctcgttaacttgtagtcagcagggaccaggcacggtggctcaagcttgtaatcccagcactttgggaggccaaggcaggtggatcacttgaagtcaggagttcaggaccagcctggccaacatggtgaaaccccctctctactaa

SEQ ID NO: 41219 - DNA, 579 bp, Homo sapiens
ggctcaggtaaatattctcctctttgtatggcctgggtctgggacactttagacagacagtgtagataaaatatccaagaactctgccaccaaggcttttcctgtccttggctccaccaaaagtattttattgctgatgactaaactgcctaggatggaaagaacaaatgcctgtcctcaccttctcccaagtcataattgggaagtcattcagtcttcaaatggctgcagaaaaaaagaaactaactaataagaaagacagagggtgaaggacagcagcaagtacaaaataaagagatagacgtctaaaattcaagttgagagacagcatgtgtttctgaactcagaggaaggcagcaatgggaggaaacaggcagactgactcactggcaatgagatgcaggtgacccctcaacaatgcctcactgcccagcctcgttaacttgtagtcagcagggaccaggcacggtggctcaagcttgtaatcccagcactttgggaggccaaggcaggtggatcacttgaagtcaggagttcrggaccagcctggccaacatggtgaaaccccctctctactaa

SEQ ID NO: 41220 - DNA, 1153 bp, Homo sapiens
tatatatttacatagttgcaatcacagtgaatgtccattttatttgataaaaagtaaactttttcacaatattgcatatctctcctatcttcaaacagctagataatattcttatgaagttgataaatttttcccaatatttagctattcattcactttacaaacatttagtctttatcaggcattgtgatagatttgatagttactaaggatacaaaataataattacgatgaatttcaaactgggcattccagtgtatttaataccgaaataactgattttactcagaaaggcaacttttttcttctgcattatttctttagagtaattcccacaactggggtttttgaatcagaaatactcttaaagctctcagacatattgctattttgctgtctcaaaatattttccaacttaaaatgctactagcaatatttcacagaagtagcacagcatctggtagtataagacgatagcagttatcatttgagtgctttctatgtcctagaccccttctaggctacgtttctctaatcattccaacactgctgcacgttaaccaccatggagccctcttcagagatgggaaagtattgaagttcaaggaagttaagaagcttcaagggtcagaaagccactagaggaacagggatttgaaacaaaactctcctcattttcaaaatacaggacactagccacaatttatttatttatttatttatttatttatttatttatttatttatttaattttgagacagagtctcgttctgtcacccaggcggagtgcagtggcgctatctcggctcactgcaagctccacctcccaggttcacgccattctcctgtctcagcctcccgagtagctgggactacaggcgcccacaaccacgccaggctaattttttgtatttttagtagagacggggtttcaccgtgttagccaggatggtctcgatctcctgacctcgtgatccgcccgcctcagcctccyaaagtgctgggattacaggcgtgagccaccacgcccggccttcacataatttttttaaccacagaatggatgagactaaatcaatggtgtaagagtgtaagaaagaaattcaaaagctccaaaagcctattgaacagtgtgcagaactggttgtatat

SEQ ID NO: 41221 - DNA, 680 bp, Homo sapiens
ccccagatgaaaatggtgtagctatggggataagctaggcccagagatgctcacatgtggtttagggggacaaaggaaacatgaggatatccgtttctctttgggtgctgtgatttggactatgcagactccactggggtggcatgaggaagtattggtaaaatctggctgttcttgaaatcgagctccttggaagatcgtgataatcaagtgagagatcactgccccaccaaatttgagtacttacagttgatcacacgaaataaaaatgcccaattatgattactaaggaagagatcctatattgctggaattattgtctccccagagtcaagcgccagtgccagggtcagaatgagyactgaacaccagaagacttcctatccaaagtatttgctgagctactaggcatccaggtggtcaagaggacaatgagctaaactgatagtagcaatcaagcctctatctgcttactatgacagtgtgagcaagaggcagaaaaagaagtgccaaccacccccctccccgtgttccatttcccccatggagcagtgccaggtcaagatcagcatggacctgggcaataggaaactgcagaggagtgccagtctaaggtctactgcctctttatggacacagaggctggggagagaagggggacaaggatgttctttagccat

SEQ ID NO: 41222 - DNA, 680 bp, Homo sapiens
ccccagatgaaaatggtgtagctatggggataagctaggcccagagatgctcacatgtggtttagggggacaaaggaaacatgaggatatccgtttctctttgggtgctgtgatttggactatgcagactccactggggtggcatgaggaagtattggtaaaatctggctgttcttgaaatcgagctccttggaagatcgtgataatcaagtgagagatcactgccccaccaaatttgagtacttacagttgatcacacgaaataaaaatgcccaattatgattactaaggaagagatcctatattgctggaattattgtctccccagagtcaagcgccagtgccagggtcagaatgagtactgaacaccagaagwcttcctatccaaagtatttgctgagctactaggcatccaggtggtcaagaggacaatgagctaaactgatagtagcaatcaagcctctatctgcttactatgacagtgtgagcaagaggcagaaaaagaagtgccaaccacccccctccccgtgttccatttcccccatggagcagtgccaggtcaagatcagcatggacctgggcaataggaaactgcagaggagtgccagtctaaggtctactgcctctttatggacacagaggctggggagagaagggggacaaggatgttctttagccat

SEQ ID NO: 41223 - DNA, 680 bp, Homo sapiens
ccccagatgaaaatggtgtagctatggggataagctaggcccagagatgctcacatgtggtttagggggacaaaggaaacatgaggatatccgtttctctttgggtgctgtgatttggactatgcagactccactggggtggcatgaggaagtattggtaaaatctggctgttcttgaaatcgagctccttggaagatcgtgataatcaagtgagagatcactgccccaccaaatttgagtacttacagttgatcacacgaaataaaaatgcccaattatgattactaaggaagagatcctatattgctggaattattgtctccccagagtcaagcgccagtgccagggtcagaatgagtactgaacaccagaagacttcctatccaaagtatttgctgagctactaggcatccaggtggtcaagagracaatgagctaaactgatagtagcaatcaagcctctatctgcttactatgacagtgtgagcaagaggcagaaaaagaagtgccaaccacccccctccccgtgttccatttcccccatggagcagtgccaggtcaagatcagcatggacctgggcaataggaaactgcagaggagtgccagtctaaggtctactgcctctttatggacacagaggctggggagagaagggggacaaggatgttctttagccat

SEQ ID NO: 41224 - DNA, 798 bp, Homo sapiens
ttctttaaacagcagagggagaaagtgtataaattgagtgacattcactggaattaggagatccggagtggaaatttccagagaaattccaaaaatcctggtgagaagaaaggaatagccatagcaggccctgagaatacagagcttcctagccaagtcaaatccgtcccatccttctcccacctccactccccctcccctggcaccaagggggtcagcagagggagcagaaaccttcagccactccccttcctgcagaccagcagccccagccctgaccacagctggctggccttggaatgaagcttgaaggactgataaatacctgggactggacrtactagtttctgaattgagaacaagtttgtgatttaaagtgatcttggccgggcgcaaatggctcacgcctgtaatccctgccctttgggaggcttaggcgggcagatcacctgaggtcgggagattgagaccagcctggccaacatagcgaacccccgtctctactaaacatacaaaaattagccaggcatggcggcttgcgcctgtaatcccagctactcaggaggctgagacaggagaatcacttgagcccaggaagtggaggttgcagtgagccaagatctcactactgcactccagcctgggcaatggagcaagactgcatctcaaaacaaacaaacaaacaaatcaataaagtgactctaagattgtccccaacctaacatgagcagaaacgttttgggtctgtgttatgagttcaattgtatcctcctaaaaaagctatgttaaagtcctaaa

SEQ ID NO: 41225 - DNA, 746 bp, Homo sapiens
aagataaagctgtgtttctcacgtcctgtgagttatgcatgcaaggtaccagttactcaactgtcctgtggactaaatctctttaagggactaagggagcttaccaggcccctggtaaggaggcctaggcccataggtggtaccaaagcaaaagggacctagcacagtggtgaaaaactccagcataccttctgggaacttgccctgcagatacggtcatctgtgtgcaaaatggtgtatgtgtgtacaaggttattcactgaggcattgtttgcaataacagaaggttggaaaccactacatatccaataggtatggaaggcaaataagtatttgtactccatgcgctattaagactgtgcagcttggccgggcatggtggctcatgcctgtaatcccagcactttgggaggccgaggtgggtggatcacgaggtcgggggttcgagaccagtctgatcaacacggtgaaacccccatctctactaaaaatacaaaaaactggccaggctggtggcgcgcgcctgtaatcccagctacgtgggaggctgaggcaggagaatcgcttgaacccgggaagcggaggttgcagtgagctgagatagcgccactgcactccagcctgggcgacagagcgagactccgtctcagaaacaaacmaaccaacaaaaaaaccgtgcagctcttaaaaactgggaggaagcgacgcccagcaagacggcggcagcgcagcgcgtgtgttgttga

SEQ ID NO: 41226 - DNA, 762 bp, Homo sapiens
atgaggtagtcattgttctctggttttacaatatacatttagcaattggcaggatgtggacgaacctcatgggaatcggaagtagctctgaattgtaaagagaaacagccagatcagataggaaagtaatttttaattactccgctgaatttctagcagggagattgcaaccttggtgagtgagtctccatgctggtatgaggtagagctggatttggacagctcaatgcaggtgtgccaacctttccttcctctctcagtggacaaggaagggaggaacaagactaaaatacagttttaggtcgaccaagtgtctgctcgctgacatcattcatccctccctcaagtatcacagacaatttttgtasccgagcgttgctgctgtttagtaattcaaagtgtatctgagaaacacaattatctcgacagagagttggacagcagctgagggtgatgtgtgagctggtgccagaggtttgcttgtttagttactccaagcagggagttgtcataaggcttcctggaggagtggagctgggggcagagagtggcctctcactggatgcaggtagaaaaaggagccagaaatgagcaggcccagctagttgctggattggctagttgctaccatgatgtcatttcatacccacagccaccctgaaacctgaaagcaaggttttatcacttcccatgttgcaggttagaagacatggcttgcacaggtggagtgatccttcccaaaccacagaagcgggagtgaag

SEQ ID NO: 41227 - DNA, 762 bp, Homo sapiens
atgaggtagtcattgttctctggttttacaatatacatttagcaattggcaggatgtggacgaacctcatgggaatcggaagtagctctgaattgtaaagagaaacagccagatcagataggaaagtaatttttaattactccgctgaatttctagcagggagattgcaaccttggtgagtgagtctccatgctggtatgaggtagagctggatttggacagctcaatgcaggtgtgccaacctttccttcctctctcagtggacaaggaagggaggaacaagactaaaatacagttttaggtcgaccaagtgtctgctcgctgacatcattcatccctccctcaagtatcacagacaatttttgtagcsgagcgttgctgctgtttagtaattcaaagtgtatctgagaaacacaattatctcgacagagagttggacagcagctgagggtgatgtgtgagctggtgccagaggtttgcttgtttagttactccaagcagggagttgtcataaggcttcctggaggagtggagctgggggcagagagtggcctctcactggatgcaggtagaaaaaggagccagaaatgagcaggcccagctagttgctggattggctagttgctaccatgatgtcatttcatacccacagccaccctgaaacctgaaagcaaggttttatcacttcccatgttgcaggttagaagacatggcttgcacaggtggagtgatccttcccaaaccacagaagcgggagtgaag

SEQ ID NO: 41228 - DNA, 762 bp, Homo sapiens
atgaggtagtcattgttctctggttttacaatatacatttagcaattggcaggatgtggacgaacctcatgggaatcggaagtagctctgaattgtaaagagaaacagccagatcagataggaaagtaatttttaattactccgctgaatttctagcagggagattgcaaccttggtgagtgagtctccatgctggtatgaggtagagctggatttggacagctcaatgcaggtgtgccaacctttccttcctctctcagtggacaaggaagggaggaacaagactaaaatacagttttaggtcgaccaagtgtctgctcgctgacatcattcatccctccctcaagtatcacagacaatttttgtagccsagcgttgctgctgtttagtaattcaaagtgtatctgagaaacacaattatctcgacagagagttggacagcagctgagggtgatgtgtgagctggtgccagaggtttgcttgtttagttactccaagcagggagttgtcataaggcttcctggaggagtggagctgggggcagagagtggcctctcactggatgcaggtagaaaaaggagccagaaatgagcaggcccagctagttgctggattggctagttgctaccatgatgtcatttcatacccacagccaccctgaaacctgaaagcaaggttttatcacttcccatgttgcaggttagaagacatggcttgcacaggtggagtgatccttcccaaaccacagaagcgggagtgaag

SEQ ID NO: 41229 - DNA, 699 bp, Homo sapiens
gcccttcactggctcatttgaagaacctctctgctgcctgcaggctctcttcatctattccataagtgtcactttactgctctaaagtggaagagaaaagaaagaaaatcaagtgaaggaagaaagcttgatctctcttactcttcacaccaaaattccagccccatggagggagaacacactgccttggcttaatgatccatrtactgtcacggcaccttctaaagggcagatgaggcttccagcaaatgcaaattaattaaggcagattgttttgccaatcaacatatctagaatttctcatcttccaatgtcagggactatgtgccttactctgcacatgccgaaattggaacaacagcatggacaattgatggcgttctccactctgttctgtgctcttatcctcattgtcacaggacctctaggggtacgtctgtgggatattttttaactttgctttatagtttggaaaaacggaggcacagaaagttgtgctttgtggacacagcccttttgatgggctggagctgggctagtgaggccccaagttctcttcctccaagttcactgctctttctactttaaactgcaaacgcataatttctcctggaattccagaatgaactcagcaggctcttgtggatgtcccagggacttatggactacacagcacacgaggttcggtggtgaggcatg

SEQ ID NO: 41230 - DNA, 1365 bp, Homo sapiens
aagccagccaacaaggaatctgagattatattctccaggcatatgttcttctcctttggcacagttggcctctcatttatcgggttctgggataatcctttctgcatatctctgtgctgtaaatggtgtcctcagagccttcacagaagctccttaaatgtctgctcatgtttcagacaagtggttagatcatacatcaatgcatgatcttctcataacagattacctgcctctgaactccaaccttcacaaaatgcggtatttgattctaacctatcactcataggcagcgtgacaactcttaaaagaaggagacgaactctatatagttcattccttactgacatttttaaatgaacatctgttatgtaaactcaggtgaagttttcaaaaattcagctttactttttcattaattctgataactgrttgactggtttccttgactcctggttcattaatcttcagctatgatgatatttctctttagacatattttctgaataggttgtgcatggggggattagttaagaatgtcctttcttcctctgtaactggataagccctagattttttaaattggcagttaagtgatgttcaatcccaaaataaccacaaaggttgagctgatttctgcattatgacaaggcagtaaggagtagacattaaaatcgcaacgtgtcttagctttaattcatttgatgaacagtcagtcaggtatagccatgggttaggagtctgagtctctttgggatgctggtgatttgtttttttttttctttctgaacacccatctcaattaattgtctcagcaaaatgagaaagtcaaatttcgatgggcctcattttaatttctaccctagtcaaaacattctacttattgatttctgctctaattcccctaaggggttataagaaattttctgtcttggaaaaaatgctccacagtgtcacagagctagtgggaacttcagagatcatatagttcaatgtcctcatttcacagatgagaagactagggcctagaacgatcgagtgatctgaccaaggtgactcagaaagttagcagcaaagccaggccaaggcccttccagtgctctgtttatcataccatgttctctgccccggtatagactgccttgctgctactatctcctatttattctagtctcttgtactcatcctcccatttcctgtgattcagctatttcctgaccacctattttatattctggccacccattttaccatgaaacatttcacctgatgtcttactcattgccttcctgaattgtggtataaatttagtgctctcattttggcttacatccatggtgtctgctttaccctgacagttaaatcctg

SEQ ID NO: 41231 - DNA, 603 bp, Homo sapiens
tggtrtttttcaagctctgagcctcacagatccatagtgaaataactgaacgcttttagtccctgatatgtactgaattgtgttcccccaaaattcatacgttaaaaccctaactcccagtgtgactgtatttggagctagagcttttaggaggtaattaaggttgaatgaggtcttaagagtagactcctaatccagtaagaatatggcctcctaaagaaaggaagagagagaaagagatctttctctgtatttccataagcactcaccaaggaaaggccatgtgaggacatactgagaaggctgccatctgcaagccaggaagagagccctcagcagaaattgaatcagctcacacagcttctaaaactgtgagatagaaatctctggtatttaagccacccaatttatgatattttgttatggcagtccaagcagactaacagtctcaaatccaaaattatcaaagaaaagatcgttgttccaggtgaagtaacatccttcttcttggatcaattaactgtgtttcagggtggtagaatcacatgtgaaccatgtgtgtagtggggagttcctacacaaggggtattgttaggcaggaaa

SEQ ID NO: 41232 - DNA, 603 bp, Homo sapiens
tggtgtttttcaagctctgagcctcacagatccatagtgaaataactgaacgcttttagtccctgatatgtactgaattgtgttcccccaaaattcatacgttaaaaccctaactcccagtgtgactgtatttggagctagagcttttaggaggtaattaaggttgaatgaggtcttaagagtagactcctaatccagtaagaatatggcctcctaaagaaaggaagagagagaaagagatctttctctgtatttccataagcactcaccaaggaaaggccatgtgaggacatactgagaaggctgccatctgcaagccaggaagagagccctcagcagaaattgaatcagctcacacagcttctaaaactgtgagatagaaatctctggtatttaagccrcccaatttatgatattttgttatggcagtccaagcagactaacagtctcaaatccaaaattatcaaagaaaagatcgttgttccaggtgaagtaacatccttcttcttggatcaattaactgtgtttcagggtggtagaatcacatgtgaaccatgtgtgtagtggggagttcctacacaaggggtattgttaggcaggaaa

SEQ ID NO: 41233 - DNA, 546 bp, Homo sapiens
gcttcttctgaatttataagaatgcccaattttttttattggagtagggtctattaactgctgcaaaattgcgacgactctatacacacacacacacacacacacacacacacacacacacacacacacacacttgccttccatgaggtctttcttctgaggaaacttacctttaaaaaataaatttatatttttttcaaagatgtacttgcatgttcaactgataccacttaaacaataaaataaaagcttatgggtttaaactttggcttataaatctgagacctgaactaacaattttatagaagcaccaatttggattggctgagaaggtgggcaaggaaatgtcaattttgcctcaactggagtgctgcrcacaggcagcaatgatatcaatgagcagcaatgtggtatgtttatcatgagataatcacacccctagaggtttagaagcactcagctgaaccttatgcctcacaacacacttggggtgtcattatctcatgataaccatactccctgtcaagccttattgcttaattaggg

SEQ ID NO: 41234 - DNA, 725 bp, Homo sapiens
gggatttctgtgggtctttcacccagctggctggcaggatcctctcaccgagtggagcccggccccgatcccgcctcgggaggccagggaaagcgcaccccctaccgggctccttcctgggycggggtcgccgcgggaccgggggcatgccaccggcgcccggccgctgaccgggctcaggccacgctcagcaacgcacatgcactcccagaagcgctggaagtggggggctgggggctgcttctgccctgcctcccctgagtttgcgggcggcggttagggcgtggaaggaggtccaggaacttcacgttttctggctacacaaagaccactccgctttcccgagcagctcaagccagcagaaagcaggaagccgccgtcccctctctctggccattcccactgcccctccccaaagtgggctgcaaggaaaatggagcccatcagctctagggatctctctgggccttgattgattctgtttttgcgctttacaaatgatcgctggcctgctggttaagcaagccaagtaaacctttgctaagtacttaggcaacttaagcacctggcctgggaggtacaggcctagtttaaggagctctgtccagtagaaatctaaaaagcaagccacatatgcaattttaatttttctagtagccacattaataaacgtacaaagaaataagtagaattaatttttcaattaatagactttactttataaa

SEQ ID NO: 41235 - DNA, 725 bp, Homo sapiens
gggatttctgtgggtctttcacccagctggctggcaggatcctctcaccgagtggagcccggccccgatcccgcctcgggaggccagggaaagcgcaccccctaccgggctccttcctgggtcggggtcgccgcgggaccgggggcatgccaccggcgcccggccgctgaccgggctcaggccacgctcagcaacgcacatgcactcccagaagcgctggaagtggggggctgggggctgcttctgccctrcctcccctgagtttgcgggcggcggttagggcgtggaaggaggtccaggaacttcacgttttctggctacacaaagaccactccgctttcccgagcagctcaagccagcagaaagcaggaagccgccgtcccctctctctggccattcccactgcccctccccaaagtgggctgcaaggaaaatggagcccatcagctctagggatctctctgggccttgattgattctgtttttgcgctttacaaatgatcgctggcctgctggttaagcaagccaagtaaacctttgctaagtacttaggcaacttaagcacctggcctgggaggtacaggcctagtttaaggagctctgtccagtagaaatctaaaaagcaagccacatatgcaattttaatttttctagtagccacattaataaacgtacaaagaaataagtagaattaatttttcaattaatagactttactttataaa

SEQ ID NO: 41236 - DNA, 1307 bp, Homo sapiens
gtgaacagtgtcatagtttaagatcttacagtttgtaagtcagctaaacactaccaggatctcaaaatagtaatttaatcttggaaatggctgatctttaattattccttccaaatgctcatggataggcaagggtctcagttgtctcttcgctccacatctagtagaacatttatgtttctgtaacttttgggaataacaaaaataataatgtttataaatttatcttgatggtggtgttagaaagtccagtccagctaccctacccaaaaagaataaacaatgggagagaggaagtggaaagaacagcagggcaagacaggacccttccttccccaccaattctgaaagatacacccgactctttcctaccgggtcataattttgcagtaatacatcagtgtccacgacaaagctggtgggactctatatttagctagtcaaacttaggctgtaagcaattattttttcttagaaacaaaggccatgtaaagatcaagaaagataacagataatctaatgttcttcatggtagtcttctccataagctatcaaacagtaatacaatggaatgtggcttaaaaattgtctatagctcaagagttcctcatatgtaacatggactgagaaaacctagcagcattattttcagttaaatacttgcaagagaatgttggtagagctccccaaatctgagagagatatataatttggagtggaggtgttcattttttggataagggatcaatggtataaaatattgtatcaaaggacactttgcttaaagtgttattagaagataacaataaagtatttgttgtctatttaattttaattaattaaacaaatacatctcagcaaggtacttttatgagggcagggttatagaagtgatatagtttgggtgtgtccccacccaaatctcatcttgacttgtagctcccataatcctcacatgtagtgggagggacccagagtgaggcacctgaatcatggggcgggtctttcttgtgctgttctcatgatagtgaataagtctcatgagatctgatggttttataaaagggagttaccctgcacacactctctttcctgttgccatgtaagatgtgatttygttcctcattcaccttctgccatgattgtgaggcctcctcagccatgtggaactgtgagtacattaaacctttttcctttataaattacctagtctcatgtatgtctttattagaagggtgatagactaacacaagaagagaaaaaaatagacaacattttctggcctcattgagcctatattctactgt

SEQ ID NO: 41237 - DNA, 1307 bp, Homo sapiens
gtgaacagtgtcatagtttaagatcttacagtttgtaagtcagctaaacactaccaggatctcaaaatagtaatttaatcttggaaatggctgatctttaattattccttccaaatgctcatggataggcaagggtctcagttgtctcttcgctccacatctagtagaacatttatgtttctgtaacttttgggaataacaaaaataataatgtttataaatttatcttgatggtggtgttagaaagtccagtccagctaccctacccaaaaagaataaacaatgggagagaggaagtggaaagaacagcagggcaagacaggacccttccttccccaccaattctgaaagatacacccgactctttcctaccgggtcataattttgcagtaatacatcagtgtccacgacaaagctggtgggactctatatttagctagtcaaacttaggctgtaagcaattattttttcttagaaacaaaggccatgtaaagatcaagaaagataacagataatctaatgttcttcatggtagtcttctccataagctatcaaacagtaatacaatggaatgtggcttaaaaattgtctatagctcaagagttcctcatatgtaacatggactgagaaaacctagcagcattattttcagttaaatacttgcaagagaatgttggtagagctccccaaatctgagagagatatataatttggagtggaggtgttcattttttggataagggatcaatggtataaaatattgtatcaaaggacactttgcttaaagtgttattagaagataacaataaagtatttgttgtctatttaattttaattaattaaacaaatacatctcagcaaggtacttttatgagggcagggttatagaagtgatatagtttgggtgtgtccccacccaaatctcatcttgacttgtagctcccataatcctcacatgtagtgggagggacccagagtgaggcacctgaatcatggggcgggtctttcttgtgctgttctcatgatagtgaataagtctcatgagatctgatggttttataaaagggagttaccctgcacacactctctttcctgttgccatgtaagatgtgattttgttcctcattcaccttctgccatgattgtgaggcctcctcagccatgtggaactgtgagtacattaaacctttttcctttataaattacctagtctcatgtatgtctttattagaagggtgatagactaayacaagaagagaaaaaaatagacaacattttctggcctcattgagcctatattctactgt

SEQ ID NO: 41238 - DNA, 665 bp, Homo sapiens
ggacaatcctggtcagtgagacaggtctgctggtgtttatgaaagtgactttccaactgttaagattaggaagggagacagaaagagggcagtgggtaatctcttatctatttgaataggatgcctgaaccactgtaaccatttagccatcttgtcaactcaagaaaatttatactgagaacactgccaacaaaggagagaaaaacatagctgaaagactraaaataatctgagtattgttatcattgagctatgaaaatgagtcagttctgacctctactattctgccaggatataataaggcattctctgattccttaagtaattttgttggctttctaatacttgcagtcaaaagcactaactcaaagcaaaaatgcagcaacagcaactcttggactagatgtaaagagactctaatatctgaataccgtacctaaaacacgaggaggtgcattaaaaggggtgggatgtgggattacatcccttcctgagttaacacttgggtaatgtggatgaagagataccaagatgatactagaaataattctaattaatattaacaattcatacgtaagtctacggcagtcaatactacacatacacacacacatatatgtttctgttaaagagttttcatggaaggaaaaggaaatagcaaagtc

SEQ ID NO: 41239 - DNA, 962 bp, Homo sapiens
ttaaattgtcactacgtaaggtcaagtttaaagtgaggctaagattcacgtgaaaatcaagcatgcygttctcgtaacacaggagaaatgcaaaatttgggcatcaagaagagtcttgaagtgatttcagaaatagattacttaatgggaatagcccttaaaagcatgcttgctatgtgtacaggtaaatgtacacatagcatttcccaggctaaataaccaaccttttaaagactaatacacaatgcaggcataccaccaatgtatctgaaagccttgttggtgtattgtgactctgaaaactatgaaaagagtggcattgaaaaaatctccattatctcaaacccatcatattacgtagttttcaatatttttggcaattcgtatactatgtaattttactggaatttatatgttgtccagttttcacactaaactgtaatttggataagagtaggaagtctattttccatataaggaaaaggaagtatcaggtttctaaaaaggctcattacgagtgtgtgtatttccctattatttcctagggaagaagggaaattacaacttaatatagcatttattcattaaaaaattaaatgataggaaaataacagagtattgagtaatattccatctgttttttttttattttggaagaaaccaaatgttacaaaaatattttattatttgcattatacttaacccataacatccattaaattaatcttcaagattacaagtacatgacctttgaaaatttacaactccccgccaggcatggtggctcagccagtaatcccagaactttgggaggcagagacagatggatcacttgtgatcaggagttccagaccagcttggccaacgtggtgaaaccccgtctctactagaagtataaaaattagccaggtgtggtggtgggcacctgtaatcctagctactcaggaggctgaggtgggagg

SEQ ID NO: 41240 - DNA, 962 bp, Homo sapiens
ttaaattgtcactacgtaaggtcaagtttaaagtgaggctaagattcacgtgaaaatcaagcatgctgttctsgtaacacaggagaaatgcaaaatttgggcatcaagaagagtcttgaagtgatttcagaaatagattacttaatgggaatagcccttaaaagcatgcttgctatgtgtacaggtaaatgtacacatagcatttcccaggctaaataaccaaccttttaaagactaatacacaatgcaggcataccaccaatgtatctgaaagccttgttggtgtattgtgactctgaaaactatgaaaagagtggcattgaaaaaatctccattatctcaaacccatcatattacgtagttttcaatatttttggcaattcgtatactatgtaattttactggaatttatatgttgtccagttttcacactaaactgtaatttggataagagtaggaagtctattttccatataaggaaaaggaagtatcaggtttctaaaaaggctcattacgagtgtgtgtatttccctattatttcctagggaagaagggaaattacaacttaatatagcatttattcattaaaaaattaaatgataggaaaataacagagtattgagtaatattccatctgttttttttttattttggaagaaaccaaatgttacaaaaatattttattatttgcattatacttaacccataacatccattaaattaatcttcaagattacaagtacatgacctttgaaaatttacaactccccgccaggcatggtggctcagccagtaatcccagaactttgggaggcagagacagatggatcacttgtgatcaggagttccagaccagcttggccaacgtggtgaaaccccgtctctactagaagtataaaaattagccaggtgtggtggtgggcacctgtaatcctagctactcaggaggctgaggtgggagg

SEQ ID NO: 41241 - DNA, 962 bp, Homo sapiens
ttaaattgtcactacgtaaggtcaagtttaaagtgaggctaagattcacgtgaaaatcaagcatgctgttctcgtaacacaggagaaatgcaaaatttgggcatcaagaagagtcttgaagtgatttcagaaatagattacttaatgggaatagcccttaaaagcatgcttgctatgtgtacaggtaaatgtacacatagcatttcscaggctaaataaccaaccttttaaagactaatacacaatgcaggcataccaccaatgtatctgaaagccttgttggtgtattgtgactctgaaaactatgaaaagagtggcattgaaaaaatctccattatctcaaacccatcatattacgtagttttcaatatttttggcaattcgtatactatgtaattttactggaatttatatgttgtccagttttcacactaaactgtaatttggataagagtaggaagtctattttccatataaggaaaaggaagtatcaggtttctaaaaaggctcattacgagtgtgtgtatttccctattatttcctagggaagaagggaaattacaacttaatatagcatttattcattaaaaaattaaatgataggaaaataacagagtattgagtaatattccatctgttttttttttattttggaagaaaccaaatgttacaaaaatattttattatttgcattatacttaacccataacatccattaaattaatcttcaagattacaagtacatgacctttgaaaatttacaactccccgccaggcatggtggctcagccagtaatcccagaactttgggaggcagagacagatggatcacttgtgatcaggagttccagaccagcttggccaacgtggtgaaaccccgtctctactagaagtataaaaattagccaggtgtggtggtgggcacctgtaatcctagctactcaggaggctgaggtgggagg

SEQ ID NO: 41242 - DNA, 962 bp, Homo sapiens
ttaaattgtcactacgtaaggtcaagtttaaagtgaggctaagattcacgtgaaaatcaagcatgctgttctcgtaacacaggagaaatgcaaaatttgggcatcaagaagagtcttgaagtgatttcagaaatagattacttaatgggaatagcccttaaaagcatgcttgctatgtgtacaggtaaatgtacacatagcatttcccaggctaaataaccaaccttttaaagactaatacacaatgcaggcataccaccaatgtatctgaaagccttgttggtgtattgtgactctgaaaactatgaaaagagtggcattgaaaaaatctccwttatctcaaacccatcatattacgtagttttcaatatttttggcaattcgtatactatgtaattttactggaatttatatgttgtccagttttcacactaaactgtaatttggataagagtaggaagtctattttccatataaggaaaaggaagtatcaggtttctaaaaaggctcattacgagtgtgtgtatttccctattatttcctagggaagaagggaaattacaacttaatatagcatttattcattaaaaaattaaatgataggaaaataacagagtattgagtaatattccatctgttttttttttattttggaagaaaccaaatgttacaaaaatattttattatttgcattatacttaacccataacatccattaaattaatcttcaagattacaagtacatgacctttgaaaatttacaactccccgccaggcatggtggctcagccagtaatcccagaactttgggaggcagagacagatggatcacttgtgatcaggagttccagaccagcttggccaacgtggtgaaaccccgtctctactagaagtataaaaattagccaggtgtggtggtgggcacctgtaatcctagctactcaggaggctgaggtgggagg

SEQ ID NO: 41243 - DNA, 562 bp, Homo sapiens
atttttaaaactagactgtgagagacaaattcaaaatacttggaggtttcaagatatttctgtgtacaatacatgtattcagtattcaggttacaaaaattatgtttcttatgtaaktcttacatcatcactatataatatgtaatatattcagcaaacaattcctgtatgctgaattatataattctcctatgctgagtaccaaaaacattattgagaggaattaaggaagatctagtaaacatagaaatgtgcctgtttcatgatgtgaaagatttaatataatattaattttccatttgtctgtaaatttagtgcaaccataataaatattccagcaaatatttttacagaaattgataagtgaatttaaaaattcacttatgagaatcaaaggaccaaaaaagccaaaataacttggtgagagttttacattggctgtcttaacctagctgaattcaaaattaactttaaacctgaagaaatgcagactatttgaaattggtataaggataaacttacaaacaaaatacaagaatggagattccaaagtagctccaca

SEQ ID NO: 41244 - DNA, 1258 bp, Homo sapiens
acaccagaaatgtatgactagctttattgtgaagttggctttgttgcattgggtggcaatgtctcccaggtgtgcttgcagttgccccgcatgcttcaactgcttttcttctatgccatcattgagcacgttttcttggctaatgaaagccmagtggagatctcaggagctgagctggcccttcaaaggctttgtacccccacattgaatgtgggctctgcttaaggagagggaatgagggcttctgtcccagacaagtagtctccccagatcaccacagcacccacttcagtcagcaaggggtgagcccaagagtagcctctcacatttggatgggagatgtccatccagggaaataagaaacaagtagaacattttgttaagtcttgtgaatttttcttggaaattttcaaaaattaagaagattaaaaaaaagtaaatgactgaacttccagaagttgaatgtaatctaattcagaagatttcataagcatagcaaaaggaagagtgacatctgaggccctgaaaacctaaagaaacacaaagggtatcttactgaattcagttataatcgtgaccaatgattttaatactttaccttctttccaaaaacatccaggattctgagggaactgaagccttttattttgttttatgtatttattcattgttattttggaggtggaatttccaaaagtagggctacaaaaatgttgttttagcaaaatttacaaagttactgtaccatgtggacacattgtgaattacactgtacaagaggccactgcgtacatataagcttcacgagactttgtggcaaatgcactctccaagtacaggcagattctatcaaggtcattcacagttaaatcttatgccgtataaaccttttcaagtgataatattttccctttttagtcgctccccttaatagttataatgctgtgctttctaatttttatggcatttttgctgcttctttctgcctctttaaatcatttttttttccttcatggctcagttaaatctcaagtgttctttgaaacttacatttatcatttagttttcatttgtttctcatgcccataacactgatagactattctacaacatgtctgacatttttttttctcatttggtacaacattacctcccattttcttcttctaactggacaaaatgtagaaaatatatatctggtttattttctcttatttcccccaatttcccaaagcctagaatgtacacccaatatata

SEQ ID NO: 41245 - DNA, 1258 bp, Homo sapiens
acaccagaaatgtatgactagctttattgtgaagttggctttgttgcattgggtggcaatgtctcccaggtgtgcttgcagttgccccgcatgcttcaactgcttttcttctatgccatcattgagcacgttttcttggctaatgaaagccaagtggagatctcaggagctgagctggcccttcaaaggctttgtacccccacattgaatgtgggctctgcttaaggagagggaatgagggcttctgtcccagacaagtagtctccccagatcaccacagcacccacttcagtcagcaaggggtgagcccaagagtagcctctcacatttggatgggagatgtccatccagggaaataagaaacaagtagaacattttgttaagtcttgtgaatttttcttggaaattttcaaaaattaagaagattaaaaaaaagtaaatgactgaacttccagaagttgaatgtaatctaattcagaagatttcataagcatagcaaaaggaagagtgacatctgaggccctgaaaacctaaagaaacacaaagggtatcttactgaattcagttataatcgtgaccaatgattttaatactttaccttctttccaaaaacatccaggattctgagggaactgaagccttttattttgttttatgtatttattcattgttattttggaggtggaatttccaaaagtagggctacaaaaatgttgttttagcaaaatttacaaagttactgtaccatgtggacacattgtgaattacactgtacaagaggccactgcgtacatataagcttcacgagactttgtggcaaatgcactctccaagtacaggcagattctatcaaggtcattcacagttaaatcttatgccgtataaaccttttcaagtgataatatyttccctttttagtcgctccccttaatagttataatgctgtgctttctaatttttatggcatttttgctgcttctttctgcctctttaaatcatttttttttccttcatggctcagttaaatctcaagtgttctttgaaacttacatttatcatttagttttcatttgtttctcatgcccataacactgatagactattctacaacatgtctgacatttttttttctcatttggtacaacattacctcccattttcttcttctaactggacaaaatgtagaaaatatatatctggtttattttctcttatttcccccaatttcccaaagcctagaatgtacacccaatatata

SEQ ID NO: 41246 - DNA, 2492 bp, Homo sapiens
gaacaaacagagctggagaatgtatatcactagatatcaagagtttttttaaagctagcaataagacagcatagtgtccatgtaagtgtagagatataggacatagcacctagagaacagaaaaagacacatacctatataactcccaaatgtacacaaagacctaagttgaaaaggattacagatctatataagaaaggaaaaataataaagcttttacaagaaaatttaagtgcatattgcagaaaatacaaaacataaaagaataaccataaaattttgagaaattaaacttagtttaaatagggatttctatgaaataaatacatcattaaaagagtaaaatttccaggagaagatatttgcaagccatacatactcatacttagctaatacaaagcacggctacaaaacaatgcagaaagggcaaacaaatataatatgcaaacaaatagagcagacatttcagcaataaggttttctgaatgaccaatatgtatataaaaggatacttgacatattagatccacccccagaatggctaagatttaaataattgacaagacctagtgttgtcaaaaatgtagagcaactggaaatttcacaattccctggttggaattgaattggtaaaaccggttggaaaaaccttttcattgtctactaaatctaaacatttgtacagaaactaacaactactgaatgtacatcattcctaaaatatataagtaatttgtaatatattaatataataaaatctgccaagcaagaaaagagcaaaccactgaaacatgcaataacttggatgaatcccatatttacaatgttgagtgaaaaaaaatgagatatgaagyactatatactgtattattacatatatatgaatttcaaaattaggaaaaataacatatgatggtagaaaatataaaagtggtcattttgggtaatcgttatccagaatgaaggcatgagggtgcctgatggggtcctagaaatataatgtctttgtctggatgtaaacatacattaaaatcatgaagatgtagacttaagatttgtgcactatgtcatatgtaagttttacttgaaagaaaaataaatgttagcaaatgaattttttaaaaggtaaggcagaatttaagataaagtcagttctgaaaagttttgactcaatatattggtcttcttattttatcagtatttccttgcattgctaaaacaaattatagaacatttctaatatttctgaaaaaaagtgcagtgcatgtaaataaatatacacatatgtatgcacataaatgcatacactcatatgcatatatattaattcagcaaattttgactgagtttccacttcattgtcagcactatgctagcatggcatacttaaaatcatattaaagaccagatcccagtgtccactcaataatgtaagacaattagagaagatagaaagcaattccactaccatcaggatctacaagcttcctgggggactttggggctgatcatcaggcctttagtaggaagaaaatattctcctccgtgggatcgctctcagacatcgcaaaactcgctgtagggtaagaaagagccaaaagatccatatttatgaacagctataaatacaacaccggggggtatccttcaaacctcactgattaccatgcaacatcacccaattatccacggcatcgtaagattgccataccaagcagcagctaatgttaggcttgatatctgctggaagatcatgagggagacagctagggatcaagtgacaatattatacatgatttcagtgctaaattttatttttattgtcatcctgggcttcatctcttatatccgtgtatcactgagaaattatgcttggacacacaaactaaacttattgtttctcttctctttttaattcatgcctaaaaccaaggaccccaggcaattagctatgacattttctgatgattatctctggaaagttatatagaatagtgtaaacaactcacccttaacctgcattactcagtttccaatgtaaattggctataatagataatgaatgtttttagctatttatgtttgtaaatgtattgttaatccacttcagtgaaatggcattttttctaatcctatgaatgaacacctgagaggaatctagtgaaaatgttctcttggtgaaaataaactgtggtttctttgtaacacacactgttgctggcaattcatgtatgcagtgctcatttccagatctgaaaattaaaacaaaacaatggttttgctttcttccaaagcgtactccatggattcaaaagatctcgagaaagcttaaatttctctttattttatttctccgtaagacaaaggacaatgactaaaacttaaaaaaaaagttgtttgctttcattaaaacataatgatattctaagaacattttattctctttgtttttctgatatagtgcattgcacagaagtcaaacaagattaaga

SEQ ID NO: 41247 - DNA, 2492 bp, Homo sapiens
gaacaaacagagctggagaatgtatatcactagatatcaagagtttttttaaagctagcaataagacagcatagtgtccatgtaagtgtagagatataggacatagcacctagagaacagaaaaagacacatacctatataactcccaaatgtacacaaagacctaagttgaaaaggattacagatctatataagaaaggaaaaataataaagcttttacaagaaaatttaagtgcatattgcagaaaatacaaaacataaaagaataaccataaaattttgagaaattaaacttagtttaaatagggatttctatgaaataaatacatcattaaaagagtaaaatttccaggagaagatatttgcaagccatacatactcatacttagctaatacaaagcacggctacaaaacaatgcagaaagggcaaacaaatataatatgcaaacaaatagagcagacatttcagcaataaggttttctgaatgaccaatatgtatataaaaggatacttgacatattagatccacccccagaatggctaagatttaaataattgacaagacctagtgttgtcaaaaatgtagagcaactggaaatttcacaattccctggttggaattgaattggtaaaaccggttggaaaaaccttttcattgtctactaaatctaaacatttgtacagaaactaacaactactgaatgtacatcattcctaaaatatataagtaatttgtaatatattaatataataaaatctgccaagcaagaaaagagcaaaccactgaaacatgcaataacttggatgaatcccatatttacaatgttgagtgaaaaaaaatgagatatgaagtactatatactgtattattacatatatatgaatttcaaaattaggaaaaataacatatgatggtagaaaatataaaagtggtcattttgggtaatcgttatccagaatgaaggcatgagggtgcctgatggggtcctagaaatataatgtctttgtctggatgtaaacatacattaaaatcatgaagatgtagacttaagatttgtgcactatgtcatatgtaagttttacttgaaagaaaaataaatgttagcaaatgaattttttaaaaggtaaggcagaatttaagataaagtcagttctgaaaagttttgactcaatatattggtcttcttattttatcagtatttccttgcattgctaaaacaaattatagaacatttctaatatttctgaaaaaaagtgcagtgcatgtaaataaatatacacatatgtatgcacataaatgcatacactcatatgcatatatattaattcagcaaattttgactgagtttccacttcattgtcagcactatgctagcatggcatacttaaaatcatattaaagaccagatcccagtgtccactcaataatgtaagacaattagagaagatagaaagcaattccactaccatcaggatctacaagcttcctgggggactttggggctgatcatcaggcctttagtaggaagaaaatattctcctccgtgggatcgctctcagacatcrcaaaactcgctgtagggtaagaaagagccaaaagatccatatttatgaacagctataaatacaacaccggggggtatccttcaaacctcactgattaccatgcaacatcacccaattatccacggcatcgtaagattgccataccaagcagcagctaatgttaggcttgatatctgctggaagatcatgagggagacagctagggatcaagtgacaatattatacatgatttcagtgctaaattttatttttattgtcatcctgggcttcatctcttatatccgtgtatcactgagaaattatgcttggacacacaaactaaacttattgtttctcttctctttttaattcatgcctaaaaccaaggaccccaggcaattagctatgacattttctgatgattatctctggaaagttatatagaatagtgtaaacaactcacccttaacctgcattactcagtttccaatgtaaattggctataatagataatgaatgtttttagctatttatgtttgtaaatgtattgttaatccacttcagtgaaatggcattttttctaatcctatgaatgaacacctgagaggaatctagtgaaaatgttctcttggtgaaaataaactgtggtttctttgtaacacacactgttgctggcaattcatgtatgcagtgctcatttccagatctgaaaattaaaacaaaacaatggttttgctttcttccaaagcgtactccatggattcaaaagatctcgagaaagcttaaatttctctttattttatttctccgtaagacaaaggacaatgactaaaacttaaaaaaaaagttgtttgctttcattaaaacataatgatattctaagaacattttattctctttgtttttctgatatagtgcattgcacagaagtcaaacaagattaaga

SEQ ID NO: 41248 - DNA, 2492 bp, Homo sapiens
gaacaaacagagctggagaatgtatatcactagatatcaagagtttttttaaagctagcaataagacagcatagtgtccatgtaagtgtagagatataggacatagcacctagagaacagaaaaagacacatacctatataactcccaaatgtacacaaagacctaagttgaaaaggattacagatctatataagaaaggaaaaataataaagcttttacaagaaaatttaagtgcatattgcagaaaatacaaaacataaaagaataaccataaaattttgagaaattaaacttagtttaaatagggatttctatgaaataaatacatcattaaaagagtaaaatttccaggagaagatatttgcaagccatacatactcatacttagctaatacaaagcacggctacaaaacaatgcagaaagggcaaacaaatataatatgcaaacaaatagagcagacatttcagcaataaggttttctgaatgaccaatatgtatataaaaggatacttgacatattagatccacccccagaatggctaagatttaaataattgacaagacctagtgttgtcaaaaatgtagagcaactggaaatttcacaattccctggttggaattgaattggtaaaaccggttggaaaaaccttttcattgtctactaaatctaaacatttgtacagaaactaacaactactgaatgtacatcattcctaaaatatataagtaatttgtaatatattaatataataaaatctgccaagcaagaaaagagcaaaccactgaaacatgcaataacttggatgaatcccatatttacaatgttgagtgaaaaaaaatgagatatgaagtactatatactgtattattacatatatatgaatttcaaaattaggaaaaataacatatgatggtagaaaatataaaagtggtcattttgggtaatcgttatccagaatgaaggcatgagggtgcctgatggggtcctagaaatataatgtctttgtctggatgtaaacatacattaaaatcatgaagatgtagacttaagatttgtgcactatgtcatatgtaagttttacttgaaagaaaaataaatgttagcaaatgaattttttaaaaggtaaggcagaatttaagataaagtcagttctgaaaagttttgactcaatatattggtcttcttattttatcagtatttccttgcattgctaaaacaaattatagaacatttctaatatttctgaaaaaaagtgcagtgcatgtaaataaatatacacatatgtatgcacataaatgcatacactcatatgcatatatattaattcagcaaattttgactgagtttccacttcattgtcagcactatgctagcatggcatacttaaaatcatattaaagaccagatcccagtgtccactcaataatgtaagacaattagagaagatagaaagcaattccactaccatcaggatctacaagcttcctgggggactttggggctgatcatcaggcctttagtaggaagaaaatattctcctccgtgggatcgctctcagacatcgcaaaactcgctgtagggtaagaaagagccaaaagatccatatttatgaacagctataaatacaacaccggggggtatccttcaaacctcactgattaccatgcaacatcacccaattatccayggcatcgtaagattgccataccaagcagcagctaatgttaggcttgatatctgctggaagatcatgagggagacagctagggatcaagtgacaatattatacatgatttcagtgctaaattttatttttattgtcatcctgggcttcatctcttatatccgtgtatcactgagaaattatgcttggacacacaaactaaacttattgtttctcttctctttttaattcatgcctaaaaccaaggaccccaggcaattagctatgacattttctgatgattatctctggaaagttatatagaatagtgtaaacaactcacccttaacctgcattactcagtttccaatgtaaattggctataatagataatgaatgtttttagctatttatgtttgtaaatgtattgttaatccacttcagtgaaatggcattttttctaatcctatgaatgaacacctgagaggaatctagtgaaaatgttctcttggtgaaaataaactgtggtttctttgtaacacacactgttgctggcaattcatgtatgcagtgctcatttccagatctgaaaattaaaacaaaacaatggttttgctttcttccaaagcgtactccatggattcaaaagatctcgagaaagcttaaatttctctttattttatttctccgtaagacaaaggacaatgactaaaacttaaaaaaaaagttgtttgctttcattaaaacataatgatattctaagaacattttattctctttgtttttctgatatagtgcattgcacagaagtcaaacaagattaaga

SEQ ID NO: 41249 - DNA, 653 bp, Homo sapiens
cagacacaatgaaaatgaacagcacaatgtggggttacctgggtattttgctggctattttttgtagtttttagtatgccttaacttgaaagtttggtttctctccaacatggtaagcaggggaaacagcaggaggtaagattggaacataattaacatctaatttttctctgagtaccttctatttggcattctttgccaaataaatgaaaatagcccagaggaaatgaatgtatgataaatagagacaaggacttcccccagagactgcatgtcttggtctttcaagatcattaaactgagcatccaagttataaacaaatgcagagtaccttggctaggatactggatttccgtacagaaatctagggttgaataaacattttggttggagwtgttagctgagaattgactgaacacaaatgtaaaagtctaagtgttatgttaagaaaccataagttgaatgacgacaactcttaaccggaaaggaattcccaggctgctgcattcccatagtcaagaacaactaaaacgctgagtaagctgggttgactcccagaaaacatagtcctcccaatatacagcccaggtttgaaccttaaggacaatggacaagaaaaattcccttaaatgaagaattaagaattatggat

SEQ ID NO: 41250 - DNA, 785 bp, Homo sapiens
atacagtcaaatgtgggttggacagctggmtctttttctctaaaagattaagaatcagcaatatttattcaaaggactaaacagtaaatatctttgactttgtatgtcatgtatgggttcctattgcacattcttctttattttttaccgacactttacaaatgtaaacttaaattgccaacccctgtcctaggatgtactctttcaaatatttggtggggggcagggtgatcatctgactgtagacagttctggcatgttgacagcttgacagctaggtcaactggattctcttctctgtgatgtttcctcttccataaggtcatctgggcttttcaagtcgcggttacaagatagatcagagatgtgcctactttcttgaggctctgggttagcatacaaaatgtccaaaagcctgcagtttccttttggtcaaagcaagttacatgggcagtacatttttgagagctgaagaaatagactccaacttttgataaaagtaattgcaaaaattagctatagagagagtttttttttttttaagtcgactattttggaacttgtcagagttttcgtattctcttttctctgtgttggttatctagtggatacctgtatcaagatgtaatgagaaagacttgagcataaaccagagttcctgaaattggacatagatacactagaaagatgaagcttttctcacattccagatgagtgagtgcattatctacaggtataagctttattaatgagaaaaagggaaggagtggatgtttagcatgtac

SEQ ID NO: 41251 - DNA, 785 bp, Homo sapiens
atacagtcaaatgtgggttggacagctggatctttttctctaaaagattaaraatcagcaatatttattcaaaggactaaacagtaaatatctttgactttgtatgtcatgtatgggttcctattgcacattcttctttattttttaccgacactttacaaatgtaaacttaaattgccaacccctgtcctaggatgtactctttcaaatatttggtggggggcagggtgatcatctgactgtagacagttctggcatgttgacagcttgacagctaggtcaactggattctcttctctgtgatgtttcctcttccataaggtcatctgggcttttcaagtcgcggttacaagatagatcagagatgtgcctactttcttgaggctctgggttagcatacaaaatgtccaaaagcctgcagtttccttttggtcaaagcaagttacatgggcagtacatttttgagagctgaagaaatagactccaacttttgataaaagtaattgcaaaaattagctatagagagagtttttttttttttaagtcgactattttggaacttgtcagagttttcgtattctcttttctctgtgttggttatctagtggatacctgtatcaagatgtaatgagaaagacttgagcataaaccagagttcctgaaattggacatagatacactagaaagatgaagcttttctcacattccagatgagtgagtgcattatctacaggtataagctttattaatgagaaaaagggaaggagtggatgtttagcatgtac

SEQ ID NO: 41252 - DNA, 1635 bp, Homo sapiens
agttcacactcaccaggatggctataataaagacagacaataacaagtgttggtgagaatatgaagaaatcagaaccctcatatgctgctggtgggaatataaaatggtgcagcagctctggaaaacactctggcaattcctcaaaaggtttaacatagagttgccatgtgacccaggattgctactcctgggcagatacccaagataaatgaaaacctagtccacacaaaaacttgtacgctgactgacacaaagaacaacctcaccctttctagcttaagtcacaggatgcagtcatcttccagaggactcgtctcaacctgtgtagaaagagtctcaaaaatgacctcctcaggacagcaccacaacacataatgactagcaagtgtgcaatggcagagggactaattggtgactactgggattgcaacctaggagatgaccacgtggagcagaggagagatgaccatacagacccctgagtacccacctgcacccccatcagacaggcacctttcaaactcttctagactttatggcattaaaacccagagaggtggccctagggatatggactaaaccagcagaagcctaaattgatatggtttggacattcatttcctccaaatgcatgaggtttgaatttcaactggttacaatgcttaaatgccaactttccttcctctcctggctttaaattaagctcaaggcaccaagaggtgagttaataagggaggagctgccccaccctcggcatcaggtagaaaggggcaggaaaaaatggcaacatactggaactaaggattggggtcactggctctccccaccccaggaactcagaaggcagcgactctcacttaatggtgcctcagctactctggggagctgctgatgggtctatagtggccttccattaggtttgtcctttaaaggcccatatagaaaagtaggatacacaatacaatactattaagggcttgcaaaaagatccaagcactttgttaacacccttttttttgagacaaggtctcaccctgttacccaagctggagtgctgtggtgagatctcggttcactgcagcctcgacctccccaggctctggtgatcctcccacctcagcctcctgagtagctaggactacaggtgcctgccaacatgcccggctaatttttgtatttttagtatagacggggttttgccatgttggccaggttggtcttgaactcttgggctcaagtgatttgcccaccttggcctcccaaagtagctgggtttacagatatgagccaccggcacctgaccaacacttttaacagtctagaaccccttcaaatttaaggagtttttcaatctttctttcccttcaattcaagcagactcagtttgtctcatccgtttatctgtrgatgggcttccatgagttacaagaaggaggctctgacaagcatgttttcaaaagttgtccaggtaattctgaggctctagaggttgagagctgctggtcttatgtctttatatccagcagaactcctcaccccacaagtaaatgataagcacagtcagggactctcggtatggagagtcaggcaaaggggttggctttctgcccaacaggaggtcaaatcagataaag

SEQ ID NO: 41253 - DNA, 606 bp, Homo sapiens
ggatggggtgagtgctgacttgtcagcctggagagtgcctggcagcattgggagggtaaggtttagaggatctgggttttatcaattacctaacttctttagcctctggtttcctgctcgatgataggggttcatctaatctgcaaaatctctcccagtggagtggttgattgctaaaaggggtaaatatataccagttcctccagggatggaaacactaatcaacaggtataaaagccacatgattcttgctattgcaagggaaagaacccacttgcttttactttctgctctcccacatcttgcctgtaaaggcttaagtgtggcttgatggtttggtaggaagtgtttcctttcagaagggctctcctagttttgttgcctttgaaaatgaaagggaaacagtagaagacagagaaaaatataccagttctacagcttgcatatttttttttaacctcctgaaggtttttagcatttcactagagatgtgggcttcatccygagaatcggtatccaagcagagataatctctcagtgtagcaagtgtttgtccaggcttgcctaacctgaggggtagcagtaaaggtaaaacaattgtcccta

SEQ ID NO: 41254 - DNA, 601 bp, Homo sapiens
cacctctggcccctggagatccctggggtctgggtgaaggcaggagctgatggtgctgaggcccgaggtgggaagaagatctatgcaagcccagcacatgctggcactgtaggctctataacctccacggatgtctgtgtgttcctcagctgcatgtgaaggctcaggccaggaaaaggcagtgggaaatagaagagagaaggactcccacgtagggccaagggcctctgctccttccagaagccaaacacaatctcatggwggcagccaggtgcaagtctagaaggggccttggagatgatctgaaccaacttttataaatatacacacagatgagggaactaaggccagtgaggctttctgcacatgcttgggaatggcagagtggggatgggaatctggggactccaaggtctaccgcagggcccttcctgcagcagcatccagcctgccccaattttgaagttgttactccaacaccctgaacactggatctctccctcttagatccccatccactgcgactccccattgatggacaaacactgaaaaagcgggcaacatgctatttcccttgtggcttgtagagatggtggtggga

SEQ ID NO: 41255 - DNA, 601 bp, Homo sapiens
cacctctggcccctggagatccctggggtctgggtgaaggcaggagctgatggtgctgaggcccgaggtgggaagaagatctatgcaagcccagcacatgctggcactgtaggctctataacctccacggatgtctgtgtgttcctcagctgcatgtgaaggctcaggccaggaaaaggcagtgggaaatagaagagagaaggactcccacgtagggccaagggcctctgctccttccagaagccaaacacaatctcatggaggcagccaggtgcaagtctagaaggggccttggagatgatctgaaccaacttttataaatatacacacagatgagggaactaaggccagtgaggctttctgcacatgcttgggaatggcagagtggggatgggaatctggggactccaaggtctaccgcagggcccttcctgcagcagcatccagcctgccccaattttgaagttgttactccaacaccctgaacactggatctctccctcttagatccccatccactgcractccccattgatggacaaacactgaaaaagcgggcaacatgctatttcccttgtggcttgtagagatggtggtggga

SEQ ID NO: 41256 - DNA, 2405 bp, Homo sapiens
tgttatattcttatattctaagggacacattttaataggatgttggcaaactacagtgtctttagaggaaagcagtcagaattaatgtcaaataaaaaactattgaaagaatgcctttaatttacctgagatgagagtcactaggtttggggacttacaggttagctgacttcagatactggaggtgggggatacacatgtagaaggtaacctgttttgcccattttttttctaagagtaaaagataatagttcaggttatttatttgaagtctgtaacttgagtcatcctgtgactctagaaccggtagcagcatatattctagaaactacatctctatctgtgttggtgcttttggagagaactagaattggtggatggaagactttgtaagctgagttagttcaatataaagaaatatcattcgttggggccgggagtgggtgactcacgcctgtaattctagcactttgggaggctgaggtgggtggatcccctgaggtcaggagttcaagaccagcctggccaacatggtgaaaccccgtctctactaaaaatacaaaaattagccgggcctggtggtgggtgtctgtagtcccagctactcgggaggctgaggcaggagaatcacttgaacccgggaggcggaggttgcagtgagccgaaatcgcaccactgcgctccagcctgggcgacaagagcaaaactctgtctccaaaaaaaaaaaaaaaaagcaatatcattagtttatgttgtccatgaccagcacactgtttcatgcagtagagtatgccctcttactgaaagtttcctggcagaggtttagagagaaccttttgtcaggaatttttagaggtagttcttatagagtgagtggttgacctcagacaaccctaaggcaccttctagtttggagattcttttattctaatactaggcaatatactccagcacatagaagaaggattttagttctcaacatatgtttctagcattgtgaagcatcagagaacaagaaagttgtctaaccagaatggctttacatcacagtgtagcaggacgagccacrgtcaaaactcctcagacactggattaaagaaggaagaggctttatttggcttggagcatccaccaacttgcgtcttaagagccgagctccctcaaaaagaaattcttggcccttttaagggcttacaactctaaggggtccacctgaaaggatggtgatagatcaagcaagtgtggggaacgtgactgggggctacatgcattagcttacagagcagaaagttttgcaatgctttttcatacaatgtctggaaattacagataacacaagtagtttaggtcagggattgatattattattattattattattattattattattattattattattattttaactaccagggccgggtggtggcaccaggccatctggctatttatcttacttctgtttctttttaactttttgcttttttcttttcctcctgttttataaactaggcaaggggggcggggtgcgcaggagaagtggtggtcttcttccttaacagcatgcagtgcagttcttggtacctgcatgtaggtaaagatcaaactgtcaaactggtagtccttaagactctgcttccatgggtatgacttgttctaggtattattgcctaacagaaatttccattatctaattttaaattgtgtaaggtttcacagtgagattattcgaagcatttagaggtatttactaacctgtgatggcttacaaatctcttcttgttgcaataggtgtgtttgtagttgctgctaagcgaacgccctttggagcttacggaggccttctgaaagacttcactgctactgacttgtctgaatttgctgccaaggctgccttgtctgctggcaaagtctcacctgaaacagttgacagtgtgattatgggcaatgtcctgcaggttagtagagtaaaggaaggtgttcactcctattgcttctttgatcagtttctaaaaataattcctttaacatatcataatggtaaacaagttaataatagttatagactttttttttttttttttttgagatggagtctcgctctgccgccaggctggagtatggtggtgcgatcttggctcgctgcaacttccgcctcccgggttcaagcaattctcctgcctcagcctcccgagtagctgggattacaggcgtgtgccaccaagcccagctaatttttgtgtttttaatagagacagggttttaccacattggccaggatggtctcgatctcttgacctcgtgattctcctgtctcggccccccaaagtgctgggatgacaggcgtgagccaccactcccagccaatagttacagactttatacgtttgtaatttgagtaa

SEQ ID NO: 41257 - DNA, 632 bp, Homo sapiens
aaaaatccaaactaggcaaatctatagaaatagaaagtaggttagcgcttgccaggggctgggagtggggactattaatggacacagggtttccttttggggtgataaaaacattctgaaattagacagtggtgatggttgtataactctgtatataatgaaaataactgaaattgcatactttaaaggggtgaattttatagtwgataaattatatctaaattttgaaaagatgatgaaaacataagaggtttgtgggtggcctttataaagtaatacatacaagttttcagctctgaaactcacggaggggttccagtgcaaaggttgtcacatgctcacccagcactcacaccatcagaaacactccatgtttgcctttccttttatcccccaactatgtcctgggcctcctaggggaacacagactcagccccattagtggccctagatctgaagcctgcagaactttgttgcagagggaaggaaacacaattcctccccactggctccgagttggagctgagacacaaagtgaggacacaggaaaacccactccatcctatcactgcttggatgtgacgaagtggcttgtagtttacccagggggcaacacatgccttcagggtaat

SEQ ID NO: 41258 - DNA, 814 bp, Homo sapiens
gcccaccaccccatatccaccacccactgtttccaagcagaagcctgagacagaggcagatcctcttggaaaacctctactatggctgtttagaagaaaactatgagcttggagcccccatggaggataccaccatcctccagaccccagacccatagatccatcaacagctcacaccccatgtacggaaaagctacaggcactcaayaccagcccagcccatgagagcagctacaggtgctaaaccctgcaaagccccaggtgcactgccttagtagagtttttccatgagcctctgcctctgtggcaggctactcccatcctgctacacaccaccctacagccagcctactcctccccactttacccacctgtttttacgtccaatccaacccctctcccattcatgaataaatcacctcccacaaggccccacatgcaaaattcgggattacaattacatgtgagtttaggtagggacacacagctaaaccatattattctgaccctgatcccccgaatatcatatccttctcacagagtaaaatacaatcaggccttttcaaaagttgtcgaaagtcttaagtcattgcagcattaagtcaaatgtaaaaagttcaacgtctcacctgagaaaaggctacagtcccttttgcctataagttcctgaatttaaaagggatttattttctttcaaggtacaaagatggtacaggcattgggtaagttttctcaatccaaagggaagaggtttgccaggaaaataacacaaattggatcacagggccaatgcaagtccaaaacccaggagacc

SEQ ID NO: 41259 - DNA, 653 bp, Homo sapiens
taatacccaatgtaatggttgttaaaaccaactgccattctattttgaacagattggtaaatattaaaatgagtgccaacagcaagtgctggtgaattggtggagcaatggtgattatcatgtactggtagtgggactgtaaattggtacaatcactttggaaaggaatttggtcacatctttaatgatgaagatgtgcattttctacaacccagcatttccactcctaagagtctatgtcagagaagctagcacctaagagcataagcagaaaygtacaacattgttctttgcagcatggttggcgatagcacaaaagctagaaacaagctagatttctctcaataggtaagtggataaataagctgaagtactgtatcactgtttgctgtatcactgttaaagataaatgaataaatcaacatgaatacatttcaaattctgaacaataaaagtgagttttagaggaatacacacagtgtaccattgaaacaaagttaacaatatgcaaaactatatatacagttaattctttacagatatttatacataaggtaaaattataaagacaaaaatgggataataaacctcaaattcaaatacttctgggggaatatgatattacagaaaggtacataaggtacttcaactgt

SEQ ID NO: 41260 - DNA, 825 bp, Homo sapiens
tcccaggttcaagctattctcctgcctcagcctcccaggtagctgggattacagggacccacgaccaagcctggctaattgttgtatttttagtagaaacagagtttcaccatgttggccaggctggtttcaaactcctgacttcaggtgatccacctgccttggcctcccaaagtgctgggattacaggtgagagccagcatgcctggccaaattcatacatttatgaatttgatttgtaccaagacaatccagtgggaaaagaataggcttttaacaaatggtgttgggacaactggctatccacatgcaaaaagaatcaagttggacttcttccttatgccattttaaayaaactcaaaatgaagcatagacctaaataaaagagctgaaactacaaaaccttttgaagaaaacaggtatgaatatttgtaaccttgaattaggtaattgcttcttagctatgacacctgaagcataagcaaccatggaaaaagaaggactgctagtttattttctcattgatttgtgggggggtccatgtatctagggaaacaatccttttctcagttttaggaattgcaaatatcttcgaccgttctgttatctctcattaattttgtccatgattatccttttttgatcttaaatatttatctttgccttgtggcttatgctcttaaagttttgctaaaagtgtcttttttcatccttaggtgacaaatatatttttctatatttccttctgttaagttggcggttttatctttcatgttcaagccaataatccatctaaaatccaccttttcatgtattttcatttag

SEQ ID NO: 41261 - DNA, 747 bp, Homo sapiens
aacccaggaggcgaaggttgcagtgagctgagatcgcaccactaaacttcagcctgggtgacagagtgagactccatctcaaaaaaaatttatatatatatatataaakattatatatataaaatattatgtatataatatatatataactttctcaaagcaaacgataccattttgatctcctattatgtactagttgttacatatgttatcttatttagaacttatactaatctagtgaaatatgtgtttctttccttgtagaacataaacaagagaaattatttatctgaataaatgttgttcctaagcaccgttattccagcaatgctgttgtgcttcacagccctgttaaacgtgtcttttaggcttgttttctgactctgtagcacattcttttgactgcactcagttgtggaaaattttgatctttttaagtttaggcatctgtagtcccagctatttgggaagctctgctgggaggatcccttgagcccaggaggtagagggtacagtgagctatgatcgtgccattgcactccagcctgggtgacagagcatgaccctgtctcaacagcgtctcaacaaaacaacaacaacaacgaaaccaaaccagccaaccaaacaaaaataataaagtttagaatttgtctacctacttacctacctacctgtatctatcatcaaaagtaattcagcacaaattaaaataaggaagtatttttaacttacaggttatagaatgca

SEQ ID NO: 41262 - DNA, 747 bp, Homo sapiens
aacccaggaggcgaaggttgcagtgagctgagatcgcaccactaaacttcagcctgggtgacagagtgagactccatctcaaaaaaaatttatatatatatatataaagattatatatataaaatattatgtatataatatatatataactttctcaaagcaaacgataccattttgatctcctattatgtactagttgttacatatgttatcttatttagaacttatactaatctagtgaaatatgtgtttctttccttgtagaacataaacaagagaaattatttatctgaataaatgttgttcctaagcaccgttattccagcaatgctgttgtgcttcacagccctgttaaacgtgtcttttaggcttgttttctgactctgtagcacatycttttgactgcactcagttgtggaaaattttgatctttttaagtttaggcatctgtagtcccagctatttgggaagctctgctgggaggatcccttgagcccaggaggtagagggtacagtgagctatgatcgtgccattgcactccagcctgggtgacagagcatgaccctgtctcaacagcgtctcaacaaaacaacaacaacaacgaaaccaaaccagccaaccaaacaaaaataataaagtttagaatttgtctacctacttacctacctacctgtatctatcatcaaaagtaattcagcacaaattaaaataaggaagtatttttaacttacaggttatagaatgca

SEQ ID NO: 41263 - DNA, 747 bp, Homo sapiens
aacccaggaggcgaaggttgcagtgagctgagatcgcaccactaaacttcagcctgggtgacagagtgagactccatctcaaaaaaaatttatatatatatatataaagattatatatataaaatattatgtatataatatatatataactttctcaaagcaaacgataccattttgatctcctattatgtactagttgttacatatgttatcttatttagaacttatactaatctagtgaaatatgtgtttctttccttgtagaacataaacaagagaaattatttatctgaataaatgttgttcctaagcaccgttattccagcaatgctgttgtgcttcacagccctgttaaacgtgtcttttaggcttgttttctgactctgtagcacattcttttgactgcactcagttgtggaaaattttgatctttttaagtktaggcatctgtagtcccagctatttgggaagctctgctgggaggatcccttgagcccaggaggtagagggtacagtgagctatgatcgtgccattgcactccagcctgggtgacagagcatgaccctgtctcaacagcgtctcaacaaaacaacaacaacaacgaaaccaaaccagccaaccaaacaaaaataataaagtttagaatttgtctacctacttacctacctacctgtatctatcatcaaaagtaattcagcacaaattaaaataaggaagtatttttaacttacaggttatagaatgca

SEQ ID NO: 41264 - DNA, 747 bp, Homo sapiens
aacccaggaggcgaaggttgcagtgagctgagatcgcaccactaaacttcagcctgggtgacagagtgagactccatctcaaaaaaaatttatatatatatatataaagattatatatataaaatattatgtatataatatatatataactttctcaaagcaaacgataccattttgatctcctattatgtactagttgttacatatgttatcttatttagaacttatactaatctagtgaaatatgtgtttctttccttgtagaacataaacaagagaaattatttatctgaataaatgttgttcctaagcaccgttattccagcaatgctgttgtgcttcacagccctgttaaacgtgtcttttaggcttgttttctgactctgtagcacattcttttgactgcactcagttgtggaaaattttgatctttttaagtttaggcatctgtagtcccagctatttgggargctctgctgggaggatcccttgagcccaggaggtagagggtacagtgagctatgatcgtgccattgcactccagcctgggtgacagagcatgaccctgtctcaacagcgtctcaacaaaacaacaacaacaacgaaaccaaaccagccaaccaaacaaaaataataaagtttagaatttgtctacctacttacctacctacctgtatctatcatcaaaagtaattcagcacaaattaaaataaggaagtatttttaacttacaggttatagaatgca

SEQ ID NO: 41265 - DNA, 747 bp, Homo sapiens
aacccaggaggcgaaggttgcagtgagctgagatcgcaccactaaacttcagcctgggtgacagagtgagactccatctcaaaaaaaatttatatatatatatataaagattatatatataaaatattatgtatataatatatatataactttctcaaagcaaacgataccattttgatctcctattatgtactagttgttacatatgttatcttatttagaacttatactaatctagtgaaatatgtgtttctttccttgtagaacataaacaagagaaattatttatctgaataaatgttgttcctaagcaccgttattccagcaatgctgttgtgcttcacagccctgttaaacgtgtcttttaggcttgttttctgactctgtagcacattcttttgactgcactcagttgtggaaaattttgatctttttaagtttaggcatctgtagtcccagctatttgggaagctctgctgggaggatcccttgagcccargaggtagagggtacagtgagctatgatcgtgccattgcactccagcctgggtgacagagcatgaccctgtctcaacagcgtctcaacaaaacaacaacaacaacgaaaccaaaccagccaaccaaacaaaaataataaagtttagaatttgtctacctacttacctacctacctgtatctatcatcaaaagtaattcagcacaaattaaaataaggaagtatttttaacttacaggttatagaatgca

SEQ ID NO: 41266 - DNA, 747 bp, Homo sapiens
aacccaggaggcgaaggttgcagtgagctgagatcgcaccactaaacttcagcctgggtgacagagtgagactccatctcaaaaaaaatttatatatatatatataaagattatatatataaaatattatgtatataatatatatataactttctcaaagcaaacgataccattttgatctcctattatgtactagttgttacatatgttatcttatttagaacttatactaatctagtgaaatatgtgtttctttccttgtagaacataaacaagagaaattatttatctgaataaatgttgttcctaagcaccgttattccagcaatgctgttgtgcttcacagccctgttaaacgtgtcttttaggcttgttttctgactctgtagcacattcttttgactgcactcagttgtggaaaattttgatctttttaagtttaggcatctgtagtcccagctatttgggaagctctgctgggaggatcccttgagcccaggaggtagagggtacagtgagctatgatcgtgccattgcactccagcctgggtgacagagcatgaccctgtctcaacagcgtctcaacaaaacaacaacaacaacgaaaccaaaccagccaaccaaacaaaaataataaagtttagaatttgtctacctacttacctacctacctgtatctatcatcaaaagtaattcagcacaaattaaaataaggaagtrtttttaacttacaggttatagaatgca

SEQ ID NO: 41267 - DNA, 1074 bp, Homo sapiens
tccctggggaccatcacagctctaacaactcaggaactggggctgcacttcacaccttagaggagaattcctttagggggattaaaagcagcccagacatgtggtctctacagtaagaacaatgaaaatgcttatttcagaacccaaacccccctcctgatgaattgtcactctcctgtcaggccagcacacagcattttcatagggctccttcctccttagagcaccttcactccctcatccaattacctttgcttcatatctaagttcaattaaaataattaaagcagctagcagatagttgatggggaggaaagacatggacaatttcctggaagaattctttaaggggcaatataaaagaccaaggactgtgaaaagtagaatttttcttactggaattcccccgtctgggagcccatgcacttcccagatgtttcccatgatttttatgggtgccacaaggaaattaaccaagcaagaatgcccagttacttctctatgcaaacgaagagcagctcatgcaaaaatagccataccccactgttccagttatctatggctgcctagaaagctaacccaaaatatactggcttccaacagcaaccttttattttatttcccaattacgtgtatcaagaattcagtctgagtgtggctgggcgatttgtccattctacacgtcagccacagaggtcatttagtaactgctggatgaactggtctggagaccccaagatagctcatcctgtgtgtctgctgccttgccagggatggctgaaaggctgagctcacctggagcacccgggctctggtggcttaactctaatagtcaaatcctatttgaattttctctttgctacttaccccaacctctccctccttctcctcatttttctttttgtatttataatgaatattatgatgtctatcctagtctgcttgggctgtataacaaaagtagtataccatgggggaygtaagagcaaacatctatttctcacagtactggtggttgagaagtccaagatcaaggtgccagcagattcggtgtttaatttgagcttacctcca

SEQ ID NO: 41268 - DNA, 1345 bp, Homo sapiens
aagaaagtttttcattttttataaatttagtgtagcataagtgtatagtacttataaagcctacagtagtatacagtgatgtcctaggccctcacagtcactgtctcacccacagcaacttccagttctgcaagctccatcaatggtaagtggcctatacaggtgttccatttttaatcttttactgtatcttttctatgtttagatacacaaatactcaccattgtgttacacttgcctaaggtattcagtacagtcacatgctatacgggtttgttgcctaggagcaataggctatatagcctagatatgtagtaggctataccatctaggtttgtgtacatttacgtacattctatgatgtgatgtttgcacaacgacaaaatcatgtaacgcttttgtcagaacacatctccatcattaaggaacgcatgactgtatctctatttagctgtagaaccatggatgccacataaccttcaaatctcaccattggcctatgtgtctcagaaaaacataagtaaataattctaatgaatattcagttcattgttcaatgtaccttacatttttagtatcctccacaatattcaaaatgacattggactatttaaaaaatcgttatgcaaaaatctaaaattacctaagatgcagtcacttaaccaagcaaagatatcattcagagtggaataaycaaaatgcattttgtatatacaaagtcagtggaatctgttttacttaccacagtttcttaatgataaggttttcttaatattgccaatcttttcattaacatgagagcataattgttccagatctgacgaggccatcctttaagcctctgaagaaaaaaacataaacatattcgtaacaagaaaagccacacaaatttctgttcactttcgaaatccaagaatggtcaatgtcaagtaaatcacatgtctttgaaggttaagcacaaaaattcaagagcaatttctttcatttctacaacattcagtttctaaccacggtaccgtactgacttgtcttagagccttaggccatcgatggatcccaaaccaggggaaagaggataagcctgggtcctttccttaaggattcaggaggacaaacgcactatttgtatataaagacaacattggtattttctttaaacacgcaaaataaggacacattttttaaaaatgtgttacactgtcaaagaaatgggcccaggtaatcatttttcctgtgctgtgaggggttggggctttacagtttgggatcggtaaggaggccgagaaatgggaaagaaccagtttcccacccactccgccggtgagagagaaggggagggtctaaa

SEQ ID NO: 41269 - DNA, 604 bp, Homo sapiens
gggcaatgtgagctgtagggccacactcatctaacaggtgagcttaagtttccattgatggcagacctatcagatgtttcctcccattctcactacttgtattctgtcattttgctcktatcctcccaaaatcatgctaagatttttttttttttttataagacagagtctcactctgtcccaggttggagtgcagtgatgccatctcggctcactgcaacctctgcctcccgggttcaagcaattctcctgcctcagcttcctgagtagctgggattacagttgcgtgccaccatgcctggctaaatttttggaatttttttttttttttttttaatagagttggggtttcaccatgtgagccaggatagtctccatctcctgaccttgtgatccgctcacctcggcctcccaaagtgctgggattacaggcgtgaggcagtgtgtctggccactaagaatttttaaaataagtgacacaatgaagaacaaggccatagagatgatcttgggtaatttgagggtatcaaaaagtatctgcctgatggatggcttgagacactaaaaatgagtaaatgattacaaagtaaggaatgataatttg

SEQ ID NO: 41270 - DNA, 604 bp, Homo sapiens
gggcaatgtgagctgtagggccacactcatctaacaggtgagcttaagtttccattgatggcagacctatcagatgtttcctcccattctcactacttgtattctgtcattttgctcttatcctcccaaaatcatgctaagatttttttttttttttataagacagagtctcactctgtcccaggttggagtgcagtgatgccatctcggctcactgcaacctctgcctcccgggttcaagcaattctcctgcctcagcttcctgagtagctgggattacagttgcgtgccaccatgcctggctaawtttttggaatttttttttttttttttttaatagagttggggtttcaccatgtgagccaggatagtctccatctcctgaccttgtgatccgctcacctcggcctcccaaagtgctgggattacaggcgtgaggcagtgtgtctggccactaagaatttttaaaataagtgacacaatgaagaacaaggccatagagatgatcttgggtaatttgagggtatcaaaaagtatctgcctgatggatggcttgagacactaaaaatgagtaaatgattacaaagtaaggaatgataatttg

SEQ ID NO: 41271 - DNA, 604 bp, Homo sapiens
gggcaatgtgagctgtagggccacactcatctaacaggtgagcttaagtttccattgatggcagacctatcagatgtttcctcccattctcactacttgtattctgtcattttgctcttatcctcccaaaatcatgctaagatttttttttttttttataagacagagtctcactctgtcccaggttggagtgcagtgatgccatctcggctcactgcaacctctgcctcccgggttcaagcaattctcctgcctcagcttcctgagtagctgggattacagttgcgtgccaccatgcctggctaaatttttggawtttttttttttttttttttaatagagttggggtttcaccatgtgagccaggatagtctccatctcctgaccttgtgatccgctcacctcggcctcccaaagtgctgggattacaggcgtgaggcagtgtgtctggccactaagaatttttaaaataagtgacacaatgaagaacaaggccatagagatgatcttgggtaatttgagggtatcaaaaagtatctgcctgatggatggcttgagacactaaaaatgagtaaatgattacaaagtaaggaatgataatttg

SEQ ID NO: 41272 - DNA, 618 bp, Homo sapiens
tctctgactttatgcattcactcattcttatttctgcatattcacgacgtgcattgcttcatgactgtacatatctccttccctctgaggtcattccagctaagttcctggccaatgttcttgcaactgactgacctttgccatatcttcagttgaaattcctgaaagagagagcctaatagactcaccatatatcaccattatccttataaagcagcacttttataccaggcagtgttttatttttgtttttgtttttgtttttttctgatggggtctcactatgttgaccagcttggtctcaaactcctgggctcaagcaatcctccagcctcagactcccaagtacctgggactacaggcacactccaccacactagsctccaggccacttcttaagccagcaataggttgaataacaaggtttattctggcccaatttgctgtggccaaaaagttcggatcaagaggtgggaacacagctacttaggaggaaggaaccacttagctccattgccttggcaaagcatcctggagagcaggtgttcacaggttagtctctgtgcggcatcacactcatacttcctggcgttcctatggcattcacttgtaaggaca

SEQ ID NO: 41273 - DNA, 618 bp, Homo sapiens
tctctgactttatgcattcactcattcttatttctgcatattcacgacgtgcattgcttcatgactgtacatatctccttccctctgaggtcattccagctaagttcctggccaatgttcttgcaactgactgacctttgccatatcttcagttgaaattcctgaaagagagagcctaatagactcaccatatatcaccattatccttataaagcagcacttttataccaggcagtgttttatttttgtttttgtttttgtttttttctgatggggtctcactatgttgaccagcttggtctcaaactcctgggctcaagcaatcctccagcctcagactcccaagtacctgggactacaggcacactccaccacactagcctccaggccacttcttaagccagcaataggttgaataacaaggtttattctggcccaatttgctgtggccaaaaagttcggatcaagaggtgggaacacagctacttaggaggaaggaaccacttagctccattgccttggcaaagcatcctggagagcaggtgttcacaggttagtctctgtgcgrcatcacactcatacttcctggcgttcctatggcattcacttgtaaggaca

SEQ ID NO: 41274 - DNA, 591 bp, Homo sapiens
ctaccactattttgtagtttgctgctgctacagccaaaactgattctaattgataccagaaagaaatttgaaaaatctgttaaataaagttagtatgtgcatacgtttggagatgagggaaggcaggagatttggaattggcaagaaggttgaattggggaagagaggccagaattcaaaaagagaagagacatggtggagattttaactctcctctcttcaaaagatggagtctaattcccctcaccttatgtaggggccagactgagtaatttactattaataaatagattgagtgatggcatgtgggttataagattaggttataaaagacactgtggctttcactttgatctcccttgaattattagcttcaagcaaagtcaggtgctatgtagagtggacactcaaatatccctaggaagaagtctatgtggtgagaaactgagaccttcaacaggctgcatatacttgccaygtgaggacatcattttggaagaagatcctcaagccccagtcaagccttcagatgatagtggtcccaggccaacatcctgaccaaaaccttatgaaagacccttacgccagacg

SEQ ID NO: 41275 - DNA, 660 bp, Homo sapiens
ctccatatgaattttaggattgtttttcctagttctgtgaagaatgatgatggtatcttgatttcactagctagttattactaataatatggctataactattaatgtacaagtccttgggtaaacatatgctttcacttctctcagatatcactctaagagttaatttgatgaatcatatgtagctctatgtataaaattttgagaaactgtcagactttctaaaatagcagcaccattttacattcctaccagcgacatagtaaagttccaatttctccacatcctcactaatacttgctattgtctgtcttttaaattttagccatcctagcacatatgaagtgttatcttttggtytttattagaatattattataaacttaaatataaacatatcatatgacccaacaatcacattcctaggtatttattcaatttaaaaaaaacttaaataagtatttacaaaaatatttatagccatcctaagccaaacaatgatttgaggaatgaagcctgaaatcctccagctctgaggattacctacctctgaagggttggtcagagaaaataaaagtgaacaaacaatccttttttctataagccactgttaaaactaattctgaacctaatcataactaatacaaggcttatctaaat

SEQ ID NO: 41276 - DNA, 914 bp, Homo sapiens
tgattagtaatagaagaggtgacatctgtactctgatgatgacttctcccatttttaaaaaaggtgcaagcatatagagtagccataagttatctgtaaaattgagtagattgcatataaaattgataaaacaaaactaataattttctgtgagtcttagccctgacatactctcaatattgaaaaaatgctataatagaatattcatgatgaatttttgtgtaatttttcattattaacagtaagaattagagtttaactcctctgagattttagaaatatctgtgttaacttttttacatcgcttgcttttgaactcacacaagaggcaaccacaggagcattctgaacattaaaacattcagaatggcatgtcacccagcactgcagggacagtgtatttcaaaggaattatgctgaatgaaaaaagccaatttcataaggatattcttatgatttaatttatgtaccatttctgaaatgacaagattatatttctggagaacagattaacagctgccagggtttacaaaatggggccctgggttctacctccctgtgttggcttcacggtcttaggctcgttttcttccacataatgggcagcatgactactgatatctttgtagtggcactgttcacaatttcaacaccagagaaattatcccttcccttggtacttaacaaagattaccactacaatggccccgtgtgagtcacagttgctcatcrcaactagttaagtgtggcttccagaaagatgacgggttgacagtaccctctagaaccatatgtttaacatatgggcaggatcctgggccaaatattctgtttctaagactacagagaaatgctgggcagggaaaataataggagcaatatgtgagcatttatttaacttcgtgtttttaagt

SEQ ID NO: 41277 - DNA, 1238 bp, Homo sapiens
acattgcataaattttgcatcctttttcttttggaacaggttctcactctgttacatgtgcgatggtgtgatcacagttcactgcagtctcaacaaccccaggcttaagtaatcctcccacttcagccttctgagtagctaggaacacaggcacatgctaccacgccctggctaatcttttattttttgtaaataagataggttctcaatatgttgcccaagctgttattgaaatcctgaacttaagatatcctcctgccttggcctcccaaagttctggtaaacccagtatgagccaccatgcccaaccatttttgatatattaaatagaaatgtttcaggtcagacaggatattgtgtattatgtcactacaatatcgtatggctatgtcctctaggagactttgaagatacaatcttggaaaaaagtactccacgatttattctgtgtgtgtgtgtgtgtgtgtgtgtgtgtgtgtgtgtgtgtaaaagagaaagagagaaagagacagagagttttaattgttgaccttgagcccaaaattcatacagataaatgtggttgatgaattgcagttagtagttgaaggcaagttgctgagtctgtatgggtgaaaacaaggaggccctaaaaggttatatttcatagcctcaaactagatttaagtaagaagcaaatgttcaaggacaatgttaaaatttgccattctagagttagcatctaatttgtagaagcttaataagataatggtgcatgcttcagcagtatatatcaataggttaaacaaatttgcattaacaattaatttctagtccacaaacatttcatgataacctgctatgtgccagagatatatagaattaattaggtcatagctgcttccctcaaaaggttaacttctagtagagagatacacacataaataaataattttgattgaatacactgcaactaaactttcttccctttattccaaaatagggtatgtaagcacctagtaggtcaatttaagattactaagaaaatacaattcaggcttttccaatgtctytatgttggtcccaggttcaacttcattaactagcaaactgaggcagaattcagaatatgtaaaatgtaatattatgctgacgctcactacttagcatatgaatcatatgtaaaatgatatttattaaaattgtaactttgattatcattattcactgaacagcatatcttttacctgtaaatatta

SEQ ID NO: 41278 - DNA, 565 bp, Homo sapiens
tcctctcacttactatggctagcataatccccaataataaatagtagtatgcaataaatgtctatacactatataaaacggtttgaacgaaagaaaaatttgagttcataaaygaattatatttttattacagagatagaacaaaaaactcattagagtcattctcaatttttagtttgtatctcagaagttctgcatatttaacaagaacttcagaaggtgcactctaaagacacactactctttaaacaaatgaatatggttttgaaaattgcagatcatttactaacctagaaatatggagaaaataaaacatgtgattcaaccagaatggactgtattttattaaaatcttagctttaaaattctggggataaacatcaatattagttatagagtggtggtcaccttgttaggtacctgccttttaatgactccttttttaataacaaagaaacctattaataaagaatgaccattacccaagcaagaatcatatgcagattattagagattgggtcaaaattacacatggataaatctaaaaggaagatttagtcttatt

SEQ ID NO: 41279 - DNA, 1117 bp, Homo sapiens
tattttctgagttttattgggagtgctcccaaataatgaacaagagttggtgagtcaggtaaccccaattccagaagctgttagctttgtgcatgaatcatgctccctggggatcagcattcaatccaggctgtgaggtgaagctgattaggtttagacatctagaaactagagccacaacttattcagagatrgtaaaggtcactgcttattttggctaaaatggttgtgaaaatataaaatatgacaatattttgtaaagcatgtaggcattctaaatgggtttgtaaaatcgtataaacaacagtgaactctaattattctgtagtggcaaagtatgttttcttctcccaaatgttaatattttctttttctgtagagatagttctaggcagagttaccaaatttctaccttgacgtttactgatattaacaatggaatatctctaaattaaatcattaattaagagatctgatgacatttggaagtgatattaaaataagtcaaatatttaaccaaaaagaaagccagtgttttcctgttgataaatcaagcccattaagttgcttctttgtgtatttcagataactataatcttatctcaagtcaactggaaaaattgtccgattttaaaaattgcatttaatttcttaccagtgagcacaaaagtgctctagggttagaaaaagatgtataggatcttagaaaaagttatattctctgaatgtttttgagattaaatacattcctctcatagtgtctgggaaatgacctttttgtgttctttttaatagcttcaagagatatttgattttctaaagaggaacaaaggaaacagcaacattctgttgccttttctctctggtgtctcatttttttttttccaatatgttcttcaagctatgcaaatgaaagtcaaattactgtctgacataccacagtcagagagaaccagaaggagtttttaaagatctatagactcacactctagacaatttataaaaggctgatgtataattggattcattaaagttcatattgaaaaattccattttatagttattttaaattatttctgcatagtgtgggtatacgtatgtgtatacatgtgtgtat

SEQ ID NO: 41280 - DNA, 647 bp, Homo sapiens
ttttttttttttttttttttttggcctttctcttcttcctccccggaagctttcattcactcacacttccacttcagggtaccgtaagcccttcaaatgtctgacaagctgaagatggaaatcatcctttgcccccttccttccccacttaactcaaacttattcttcctttttggtctttcttgggattaatggtggcctctttatccagccaatcatttagactgaaaatcttgacatcatcgtagactgttcttcatttgcctcctctgaattgattgcaacaaaggtctcctgctttgcattctatgtgtttctgagttccacttctgcctttcaaacttcactgttttttgctgagatgaattcctctcccattaggcttttctgccctctgcctctaatatcaaatatccattttcaytaatattaaagaaatttcagttatactaatttacgaatattgccactattactgaaatcgttatgtattccataactttggggtcaaatttcagtatcctcagtgtgatttgtatggactctctatcatctgttttatccaattgtaatcgttatttattggtacatttataccaaagtttagcagattaaagcaacaaacatgtaccatctcatgatggcaa

SEQ ID NO: 41281 - DNA, 647 bp, Homo sapiens
ttttttttttttttttttttttggcctttctcttcttcctccccggaagctttcattcactcacacttccacttcagggtaccgtaagcccttcaaatgtctgacaagctgaagatggaaatcatcctttgcccccttccttccccacttaactcaaacttattcttcctttttggtctttcttgggattaatggtggcctctttatccagccaatcatttagactgaaaatcttgacatcatcgtagactgttcttcatttgcctcctctgaattgattgcaacaaaggtctcctgctttgcattctatgtgtttctgagttccacttctgcctttcaaacttcactgttttttgctgagatgaattcctctcccattaggcttttctgccctctgcctctaatatcaaatatccattttcattaatattaaagaaatttcagttatactaatttacgaatattgccactattactgaaatckttatgtattccataactttggggtcaaatttcagtatcctcagtgtgatttgtatggactctctatcatctgttttatccaattgtaatcgttatttattggtacatttataccaaagtttagcagattaaagcaacaaacatgtaccatctcatgatggcaa

SEQ ID NO: 41282 - DNA, 647 bp, Homo sapiens
ttttttttttttttttttttttggcctttctcttcttcctccccggaagctttcattcactcacacttccacttcagggtaccgtaagcccttcaaatgtctgacaagctgaagatggaaatcatcctttgcccccttccttccccacttaactcaaacttattcttcctttttggtctttcttgggattaatggtggcctctttatccagccaatcatttagactgaaaatcttgacatcatcgtagactgttcttcatttgcctcctctgaattgattgcaacaaaggtctcctgctttgcattctatgtgtttctgagttccacttctgcctttcaaacttcactgttttttgctgagatgaattcctctcccattaggcttttctgccctctgcctctaatatcaaatatccattttcattaatattaaagaaatttcagttatactaatttacgaatattgccactattactgaaatcgttatgtattccataactttggggtcaaayttcagtatcctcagtgtgatttgtatggactctctatcatctgttttatccaattgtaatcgttatttattggtacatttataccaaagtttagcagattaaagcaacaaacatgtaccatctcatgatggcaa

SEQ ID NO: 41283 - DNA, 928 bp, Homo sapiens
catcccttttctctagtattaccatcatgtattaccatcaattataatttaccctgggctgggtattagaataacaatagttgtgaggcyggctagtatattttacacctccaattttcacatagcagaataaacagtatttttccctcttctttgggtggtttgtttgtattggattgttttaattttaattttctatgtgtcaataattatttcttcctcatttcttcttagtttatatacttctgctttatcttacctttttatagattaaattagtgattcatttattttaatttttttctaatgaagcagaatttgatttatttgatgtaagctttttattagtcctttaccacactaatttatgtttttgtttttatttcatacagtgtactttgttttagctattctttaacacatacatgcagcccaggtttctgcatacacaattaaatatcttaacattattaatctcataattttcaaattaaattaattgcctttgttttgaagaaaacttcacttatgaagttagaattcaatattgtctcctatgacatctaatgcagtgccaggtatagagtctgtattataaaatatattttgaattgggaaattatcagtcagttaaataatatcttgaagcctgatataaaacaacttggcgaagtggctatagactatttcctaggttgaaagcttcgtgttaagagtttatgcaccatgaggattgacacagtttggcgctgtgtcctcacccaaatctcatcttgaattgtaatctccacagggggaggaacctgtaatcctcacatatggagggagggaagtgattagattacgtgggtagtttctcccatgctgttcttgtgatagtgaatgaatgctcacaagattttatggctttataaatggtagtttttcc

SEQ ID NO: 41284 - DNA, 928 bp, Homo sapiens
catcccttttctctagtattaccatcatgtattaccatcaattataatttaccctgggctgggtattagaataacaatagttgtgaggctggctagtatattttacacctccaattttcacatagcagaataaacagtatttttccctcttctttgggtggtttgtttgtattggattgttttaattttaattttctatgtgtcaataattatttcttcctcatttcttcttagtttatatacttctgctttatcttacctttttatagattaaattagtgattcatttattttaatttttttctaatgaagcagaatttgatttatttgatgtaagctttttattagtcctttaccacactaatttatgtttttgtttttatttcatacagtgtactttgttttagctattctttaacacatacatgcagcccaggtttctgcatacacaattaaatatcttaacattattaatctcataattttcaaattaaattaattgcctttgttttgaagaaaacttcacttatgaagttagaattcaatattgtctcctatgacatctaatgcagtgccaggtatagagtctgtattataaaatatattttgaattgggaaattatcagtcagttaaataatatcttgaagcctgatataaaacaacttggcgaagtggctatagactatttcctaggttgaaagcttcgtgttaagagtttatgcaccatgaggattgacacagtttggcgctgtgtcctcacccaaatctcatcttgaattgtaatctccacagggggaggaacctgtaatcctcacatatggagggagggaagtgattagattacrtgggtagtttctcccatgctgttcttgtgatagtgaatgaatgctcacaagattttatggctttataaatggtagtttttcc

SEQ ID NO: 41285 - DNA, 731 bp, Homo sapiens
gagataccagtataaattcacgtttcactcagatgtccttcatacagacacagatggttgcatatggaaatatttatagaaatacatgggttagtgtgtgcacatagatttcatttctatgtcagatggtatgacaccraagaaacaatagtctagtagcaagaagcacacccagtttccacatcttggtttctaataccattctctaataaaaggaaacggctccttgatgaaatggctgattctagcattgaaaaggaaatatacaagatgagcatctgatatcttgtattcagaaagtaaggaagtgctaaacacacacacaaacacacattggtaggggtgtgtcaaggagacacaggagtcaactgaaagagctaccaaaatccaaacagaggtgacttgagcaaccaaataaagtaaattcaatgataacccaaagtgtaaaataaaatccatcagtacttatcaatataaataaatgactgaataaattaacaaatggtggagaatgcctgggccaagaatccaaaacacttatatagatactccaccgtgaaagaagaagagcctcatcctctatgccttaagtgtgggctgcacatggtgacttccttccaaagattacagtgtagaaagagcagggaaaggaactgtacagcagagaagcctagcaaacctcagtcgattgattaggtcaatcttaacaggttgttagccatcttaacaga

SEQ ID NO: 41286 - DNA, 731 bp, Homo sapiens
gagataccagtataaattcacgtttcactcagatgtccttcatacagacacagatggttgcatatggaaatatttatagaaatacatgggttagtgtgtgcacatagatttcatttctatgtcagatggtatgacaccgaagaaacaatagtctagtagcaagaagcacacccagtttccacatcttggtttctaataccattctctaataaaaggaaayggctccttgatgaaatggctgattctagcattgaaaaggaaatatacaagatgagcatctgatatcttgtattcagaaagtaaggaagtgctaaacacacacacaaacacacattggtaggggtgtgtcaaggagacacaggagtcaactgaaagagctaccaaaatccaaacagaggtgacttgagcaaccaaataaagtaaattcaatgataacccaaagtgtaaaataaaatccatcagtacttatcaatataaataaatgactgaataaattaacaaatggtggagaatgcctgggccaagaatccaaaacacttatatagatactccaccgtgaaagaagaagagcctcatcctctatgccttaagtgtgggctgcacatggtgacttccttccaaagattacagtgtagaaagagcagggaaaggaactgtacagcagagaagcctagcaaacctcagtcgattgattaggtcaatcttaacaggttgttagccatcttaacaga

SEQ ID NO: 41287 - DNA, 1207 bp, Homo sapiens
actaagaaaagtagcttatataagctgttattttgtcaatatatttttataatatgacagatatagtgaggacacatcaatttactaggaagaataatgaatgcttagtcaaagttaattttttgaaaaatcagcgaacatataactaaacagtattttctttgtctcagggtaacgttcaatggaggtaataatgaaagtgccatttgttgatacaaaaacaaatttactatttttcttaaatggagtttggcaggaattaaatcaaagatgtacaacaaggttacaccatacttgaaagaaagagttctgataaaatacttattaatcaatctcatggtcacaaagtttatgagaattgaagagaatacacccatgaattatgagcattgtcaacacagcytatttcttgactaattagcaaattagttctaagtggaatttcggcaccttcaaatgagcttcttatagctaatttatcttggccttcctacataatttatcaaattcttaataataaaaaaccattaaaatgttaatctataatagattcaaataatttagtgttggtttttcttcttttatgctttacatagtgttgaaagcaaagatattctgtacattgcaaaaacatttattttacaagtggtgagatcatgagtaatatgcagtgttgaaatccatctcatacagaagcgtgggactcagactgatggagtgaatggtcatgcagaacctactcagttacaggcactgagcaaaagacactttggcaaatatactcatgatatgagcatctggcatttcaacttatcgcatgtgtcaagcttatgttattggatatatgtggggagctacaaaaaagaattttgtttcttttcaagtctcattaaatatccaaatcacatgtcatcataggctactaagtgattataagttggtgatgaatacagtgttagttatctgatgaccagtaaacttatagcacacagaggaagtcagacacataataccttcccccgctccaccaaaaaaaaagtacataattttattttccctgttttttgttaactctccatgtccaaggctacattaacaaaatatatggcagaatactttatctatatatagagataggaaaaaagacagaaacaaagccttctgaggccaatcatttctttattcaaatcaaatcaagccatcttaa

SEQ ID NO: 41288 - DNA, 622 bp, Homo sapiens
ttagttcaagattctattaaaawcctgaatagtccaagaaacaacaaaaaagaagaagaaaatagaaaagaaggaaaaagaaaggaaataaaatttatacccagaaagataatttgaaacaaatagttgctaaaaatgcttttacatattgtattagaagaataagttttacctagttttctaatttgcaattatttttgatgcaaagttttttaaattatgttttatttatttagttttcaatttttattttattttatttatattttattttatttatattttgagagggagtctcactctatccccccggctagagtgcagtgctgtgatctcaactcactgcaacctctgcctcccgggttcaagcaattctcctgcctcaacctcacgagtagctaagattacaggcacgtgccaccatacccagctaattttttgtatttttagtagagacggggtttcacctttttggccaggctggtcttgaactcctgacctcaagtgatccacctgcctcggcctcccaaagagctgggattacaggcatgcgccaccgctcccagcctgcaaagtttttcttaagcatatataaacattaataaatattggttaatgtgtt

SEQ ID NO: 41289 - DNA, 622 bp, Homo sapiens
ttagttcaagattctattaaaatcctgaatagtccaagaaacaacaaaaaagaagaagaaaatagaaaagaaggaaaaagaaaggaaataaaatttatacccaraaagataatttgaaacaaatagttgctaaaaatgcttttacatattgtattagaagaataagttttacctagttttctaatttgcaattatttttgatgcaaagttttttaaattatgttttatttatttagttttcaatttttattttattttatttatattttattttatttatattttgagagggagtctcactctatccccccggctagagtgcagtgctgtgatctcaactcactgcaacctctgcctcccgggttcaagcaattctcctgcctcaacctcacgagtagctaagattacaggcacgtgccaccatacccagctaattttttgtatttttagtagagacggggtttcacctttttggccaggctggtcttgaactcctgacctcaagtgatccacctgcctcggcctcccaaagagctgggattacaggcatgcgccaccgctcccagcctgcaaagtttttcttaagcatatataaacattaataaatattggttaatgtgtt

SEQ ID NO: 41290 - DNA, 622 bp, Homo sapiens
ttagttcaagattctattaaaatcctgaatagtccaagaaacaacaaaaaagaagaagaaaatagaaaagaaggaaaaagaaaggaaataaaatttatacccagaaagataatttgaaacaaatagttgctaaaaatgcttttacatattgtattagaagaataagttttacctagttttctaatttkcaattatttttgatgcaaagttttttaaattatgttttatttatttagttttcaatttttattttattttatttatattttattttatttatattttgagagggagtctcactctatccccccggctagagtgcagtgctgtgatctcaactcactgcaacctctgcctcccgggttcaagcaattctcctgcctcaacctcacgagtagctaagattacaggcacgtgccaccatacccagctaattttttgtatttttagtagagacggggtttcacctttttggccaggctggtcttgaactcctgacctcaagtgatccacctgcctcggcctcccaaagagctgggattacaggcatgcgccaccgctcccagcctgcaaagtttttcttaagcatatataaacattaataaatattggttaatgtgtt

SEQ ID NO: 41291 - DNA, 732 bp, Homo sapiens
tttgcaaccccaggatggaggaagaagcctttggtaatgtcccatgtaaagccaccagatgggctgcaayagccttgactggatagtgtgcaaggtggggaaaggtgagtgcctggtggcccacagaagattcaaggttactattttctttttcttgcctttcatgtatgaactggagtctgccttcatgctggcacatgctcaagaccaaaggattgcagggaagtgttggagtccagagagagtgaggttagagatttttggcccagttctctttaaagctgacagatacagagatttcttcctagtaccaaaacctaccttccagcccatgacctgccttttcccaggccaggcccatgtttccccaagagggcaggagagaaaaccaggccaagctgaggtaattttgtagttatgtgtctccaaggaaaaggacatccattggcacaaagcactgagtaaaaaccctttaataacaaaataacattcatgatgtagctacttcagttgtctggaaaactcagcttacacttgattcaacataccactttccacaatgttaaaagaaaaggacataaaatggcataacaaaatataccttgggtttcataagacaagtcttcttggcaaagtgtaaccagccagacccatgcattgcctgtgattaaaaaaagggctgggtacactcatgtctcaaatactcctctactttctttggatcaaaaatgg

SEQ ID NO: 41292 - DNA, 732 bp, Homo sapiens
tttgcaaccccaggatggaggaagaagcctttggtaatgtcccatgtaaagccaccagatgggctgcaatagccttgactggatagtgtgcaaggtggggaaaggtgagtgcctggtggcccacagaagattcaaggttactattttctttttcttgcctttcatgtatgaactggagtctgccttcatgctggcacatgctcaagaccaaaggattgcagggaagtgttggagtccagmgagagtgaggttagagatttttggcccagttctctttaaagctgacagatacagagatttcttcctagtaccaaaacctaccttccagcccatgacctgccttttcccaggccaggcccatgtttccccaagagggcaggagagaaaaccaggccaagctgaggtaattttgtagttatgtgtctccaaggaaaaggacatccattggcacaaagcactgagtaaaaaccctttaataacaaaataacattcatgatgtagctacttcagttgtctggaaaactcagcttacacttgattcaacataccactttccacaatgttaaaagaaaaggacataaaatggcataacaaaatataccttgggtttcataagacaagtcttcttggcaaagtgtaaccagccagacccatgcattgcctgtgattaaaaaaagggctgggtacactcatgtctcaaatactcctctactttctttggatcaaaaatgg

SEQ ID NO: 41293 - DNA, 507 bp, Homo sapiens
taaagatacaaaaaaatagctgggcatsgtggtgggcacctgtaatcccagctactcgggatgctgaggcaggagaatcgcttgaacccaggaggtggaagttgcagtgagtcgagatcatgccattgcactccagcctgggtgacagggtgagagtccatctcaaaaaaaaaaaaaaaaaatcacttgaaataagtcccagctcccctaggggtgtggtgacagtgtggcctcaacaggaaaaactggggaaaggccaggaaggagcagaggcccagatggggcagtcgccctcagaatccatcctactggatattctggccagaggttgagaatccctttgcagtggactgacattcccccaagactggcacccagggtgctgctcagatgctttcctatgtttctcaaagcactggcttgtatattttgtttcctggccttcgggcactgcatttcctgttcaatgtgttctgcaggcagcatcttatgtggacggtctgctac

SEQ ID NO: 41294 - DNA, 622 bp, Homo sapiens
atatttatagaagcattattcatcatagccaaggagttggaacaacccaactgtgtaatgtggtatgtccatacagtgaaatactatttgacaataaaaatgaataaagctctaatacgtggcaaactgtagaaaaactgcaacagtcatgctaagtaaaagatgccagtcaaaaaagaccaccacatgttgtatgattccatatattcaaaatatccagaataggtaaatctatagacataggaagtagacaagtggttgccaagggctggaagtggagggatggggaatgactgcttaatgggcaacggggattcttttctttttgcagggggcaaaaatattcaaaacctagactatggtgatggttgcacaaccttgtaaatacactaaaacacttgaattgtacacctgaaatgggctcatygtatgttaagtgaattatatctcaataaagctgattttttaaaaaacagcaacaatagtatctatatctgaaattctaactctatatgataactatagagtctataaatttcatcacttaccatgagtgaatgtctgttggctgaaagaaggccggttccataccctgagcccagaccacccatggctccattat

SEQ ID NO: 41295 - DNA, 622 bp, Homo sapiens
atatttatagaagcattattcatcatagccaaggagttggaacaacccaactgtgtaatgtggtatgtccatacagtgaaatactatttgacaataaaaatgaataaagctctaatacgtggcaaactgtagaaaaactgcaacagtcatgctaagtaaaagatgccagtcaaaaaagaccaccacatgttgtatgattccatatattcaaaatatccagaataggtaaatctatagacataggaagtagacaagtggttgccaagggctggaagtggagggatggggaatgactgcttaatgggcaacggggattcttttctttttgcagggggcaaaaatattcaaaacctagactatggtgatggttgcacaaccttgtaaatacactaaaacacttgaattgtacacctgaaatgggctcatcgtatgttaagtgaattatatctcaataaagctgattttttaaaaaacagcaacaatagtatctatayctgaaattctaactctatatgataactatagagtctataaatttcatcacttaccatgagtgaatgtctgttggctgaaagaaggccggttccataccctgagcccagaccacccatggctccattat

SEQ ID NO: 41296 - DNA, 1233 bp, Homo sapiens
gagggacaaatagctcatggtttaaagagtgaaataatgaagcatatcttgctttatttcagatttatacaatttaatctttggaatggcgtctgacgtttttgtttgatgtcacaattgcatgtggttaattgaagcagagtggttgatctttgcctctaatgtatttcatgaaccatgccccattcactagagttcagggactgtaccagggggtggctctgccttcctctggttctcctttccagaatcttatggctaaaagaaggaagaaaagcagtgttcctctcctccttccccaacgggatcactgccacgcagggttaccgacattccaggtcttcatttcccagatcaagatctgttcatgattccgacaaacagctacctgctggccttcttgggcccagaggtgcacacaccggcagtgcagcaagacccactcgggagtcggacacaaggagaaggccctcgcaggccctagaagcgtgctggaggccatttcggcaagactgtggactaagcgagtgcttggcaaaagccactggcctgtgggctccttgctctgtgaggagggggcgggctgagggggaccaggccaggctctcaaacaaagagcctatcaggcacagtgactttgggtctataggtcacactgcacagctcgctcgctctctctgtctctctctctctctctctccacccctcctcctccttcccccttcttccttcctctttatctaaactttcactgggataattgtagattcacatgcagttgcaagaaataatacaaaacctggccctggtggctggaggtctgcacacaatggcccctcgtggagtaaggcaagaaaggtgggagtyggggggcaggctgcagatgggacagggaattctcagttggaacctgctctctgtgtcaggatgaagttgtatttagcgaggacatgctatttaatggtttgttagcttgaggaataacttttaaatatttatacagatggtatgtgggcatccctttgtacttctgccccacgtccctgcaaaggttagggtaagcttggggctggcagtgcttgttttcatcagtgaattatccctagagaaagtctgaaggttctggaacctaaccacaatagcccattaggtccctgcaaaggtgttatccctcccttgcagagcttcttaagagtcggcagccaaagaaagaagtgctccaggagtgttgac

SEQ ID NO: 41297 - DNA, 1233 bp, Homo sapiens
gagggacaaatagctcatggtttaaagagtgaaataatgaagcatatcttgctttatttcagatttatacaatttaatctttggaatggcgtctgacgtttttgtttgatgtcacaattgcatgtggttaattgaagcagagtggttgatctttgcctctaatgtatttcatgaaccatgccccattcactagagttcagggactgtaccagggggtggctctgccttcctctggttctcctttccagaatcttatggctaaaagaaggaagaaaagcagtgttcctctcctccttccccaacgggatcactgccacgcagggttaccgacattccaggtcttcatttcccagatcaagatctgttcatgattccgacaaacagctacctgctggccttcttgggcccagaggtgcacacaccggcagtgcagcaagacccactcgggagtcggacacaaggagaaggccctcgcaggccctagaagcgtgctggaggccatttcggcaagactgtggactaagcgagtgcttggcaaaagccactggcctgtgggctccttgctctgtgaggagggggcgggctgagggggaccaggccaggctctcaaacaaagagcctatcaggcacagtgactttgggtctataggtcacactgcacagctcgctcgctctctctgtctctctctctctctctctccacccctcctcctccttcccccttcttccttcctctttatctaaactttcactgggataattgtagattcacatgcagttgcaagaaataatacaaaacctggccctggtggctggaggtctgcacacaatggcccctcgtggagtaaggcaagaaaggtgggagttggggggcaggctgcagatgggacagggaattctcagttggaacctgctctctgtgtcaggatgaagttgtatttagcraggacatgctatttaatggtttgttagcttgaggaataacttttaaatatttatacagatggtatgtgggcatccctttgtacttctgccccacgtccctgcaaaggttagggtaagcttggggctggcagtgcttgttttcatcagtgaattatccctagagaaagtctgaaggttctggaacctaaccacaatagcccattaggtccctgcaaaggtgttatccctcccttgcagagcttcttaagagtcggcagccaaagaaagaagtgctccaggagtgttgac

SEQ ID NO: 41298 - DNA, 737 bp, Homo sapiens
cttaccagggtggcctgaacagtaacattgcagctgctcactgcaagtgccygtgtctaacagtcaagggtcatttccccgggaatatgctaattatctctttaagacttgttcccatctttctttcaacaaggacttcctggtcactggtaaacccacactggtctcttcactgctcaggcacagcccagagaagcagccaaaacagatgccaccagccaccgtgctgtctacaggaccccagccaaggtgacgaggtggcatgtggccactggctgctgagattgatgccacttgagctatttagaaggctcctgctgtgctgtgccagtcatcaagtttacgaaggagaaattgggatctgctccaggcaaaaccaaaacaccaaaactaacatcatcaacaaagagttgttacagatactaaagaaaaaaaagtctctggccttggtggcgtattacggattcaaatggcagagcacagtaatgtttccaacgagtttttgattcaaggataaatgttggttccaagagtctgttcttacagcatcagagcccaagagagcttccagtaaagaatgtaattggctgacgtgaggtacaggaacccagcagctccttggtggttttcaacagtcccttcttccacttttgttgacagggtgtgaaaattggttggaacgccctagaaccatcaacccaccaacgctgggcctgctcttgctcatgcctcctcca

SEQ ID NO: 41299 - DNA, 1185 bp, Homo sapiens
tttcctgtgtctaggcatttcgttttgccattccttcttcctcctccttcctcttcctcttggagggatatctttcccccaatattgacatgcaccctacctcttttcagccagatctttcctcaaatgtcacatcacagaatatcctaaacatcctatttaacaaatcattgccctcactctcagctatctccttgccctgattaatttgttcataaccaacccccaacatttgtttactgtctttctacctccctagagcctatgcttcctgtggccaaggactttgtgttttatttattgctgtattcccaggacctacacacacagtgcttgatatatagtagctgtttgctaaatatatttgaataaataaataaatgaccttttaaaagtaagcatgttatatttatattttttgatagagaataataaagtgaatgtgtatttaattacattattattttgttatttgaggtgaaaaatcaggacctagtgacctagaaattacagaaagtaagaartagcaaaaacctattgttaaggagtttataaataggaggaaataaaaagagtattgccaattccgataatgccaagtactatggtctatattttaaccttgacgtgtaccaggattttcacacaataggatgaaaaattattaaaaaaataacacaaggcaaaagaaactgaagaaaaatcaggtagtgattggatattgattattcagagttctttagttgattttttatatatataaactttttctgtctgggtagaaaatgtactgctgaatttgttgaaatatcatttctccacagtttcactcatttctcttggtacagtactgattttttttctcagtattcaatattattattcctcttcgatctctgtctcccagtagtacaatgcttcttgaggtctggctgttacaaatgctagtggagtattaaaatgttgaatattttaggttgtgagctcattacagctgtcctctcagaaggttgattgctctaaagtaacaacaacaaaaatggtaatggctaattttctagaaatctgagaaggtacagccaggacaggtgatgttcctgtcatcagctgctccaggcagtcccatttctccaagcaatggcataagtgattttaaagagggaatacggcagttctataatacag

SEQ ID NO: 41300 - DNA, 1605 bp, Homo sapiens
gtgtgagccacygcgcccagcacagtagcataattttagagaagttcattcatagctgtcccaggaagtaagaagggaagattcaggataaaccatcatgtgacttgctctcaactggatctggtaaaaatcgtcattgagctcaggattgaaaggagaaatcatacaacatgaagcctgaggaagaattgtaatatttgtgagataaactattcctccattcagtatatactgattgaacactccttttatggaagtagcgaatcgtaggatcctttcctcctttaactagcaacattaccccggttcctttgtctctccttcacttgtggtaatgggctagtacaccacgatgcccttcccccctcaaccatattaacgaagctggttacatgtagcagcctgttccaaaagtttactccatccctctaaccacagagtttgatttagaggtaaataaaggccctaaacttgaccaatgtgaactctttctaagacttaaactatcacttggagaaatacagggagagacacactgaactctgacaacattatttaagactctgggtccagtgatgcctataactagatgcacttctgaatttctaatttcttaggccaaacttttccatttattcttaatctagtttctagttttctagttgggttattgtcacttgcagcaaaaaggttactaataacttattatgagtcaggcatagttctgggtatgtactgaagaaattatggtgaagaacatccaggcttcatacttgtgggtgtagttgtagacttggtgtgtatgtgtgcacacatgtgggggaccgatgtcctaggcattgtggtttctacaatcatgttggaggaatgaccaaatatcatagtctactgctgaaactcttcatgcttctgattcctccccaattcacttgagctgctgaatctgaattgatgaggtatgtttgcactaaatacacatgttttcattgcttgtttgatcaagagaaggtctcacaggtctctcaggtttgatcataagctactattagggagttttagaaaaatacctaaaagtatcagtatttagaaaaatatttgcatatgtgcaataaacatcctaacttctgtgactaggaattggagatcaggaaatattgtgggatgatgagaacataatcaccagatagaaaaccatgatggaggtgctgaatggaaaattttattcttttattttttagacagtcacactctgttgcccaggctggagtgcagtggtgtgatctcagctcactgcaagctctgtctcctgggctcaagtgattctcctgcctcagcctcctaagtggctgggattacaggtgcacaccaccatacccggctaattttttgtatttttaggagagacggggtttcaccatgttggccaggctggtctcgaactcctgacctcaagtaatctgcccatctcatcttcccaaaatgctgggattacaggcatgagcctctgtgcctggccttggaaaattttattataatggaaacataaataggatttaaaagaaaaggatgatgaaattagaaatatgaaagaaaataggacagata

SEQ ID NO: 41301 - DNA, 1605 bp, Homo sapiens
gtgtgagccaccgcgcccagcacagtagcataattttagagaagttcattcatagctgtcccaggaagtaagaagggaagattcaggataaaccatcatgtgacttgctctcaactggatctggtaaaaatcgtcattgagctcaggattgaaaggagaaatcatacaacatgaagcctgaggaagaattgtaatatttgtgagataaactattcctccattcagtatatactgattgaacactccttttatggaagtagcgaatcgtaggatcctttcctcctttaactagcaacattaccccggttcctttgtctctccttcacttgtggtaatgggctagtacaccacgatgcccttcccccctcaaccatattaacgaagytggttacatgtagcagcctgttccaaaagtttactccatccctctaaccacagagtttgatttagaggtaaataaaggccctaaacttgaccaatgtgaactctttctaagacttaaactatcacttggagaaatacagggagagacacactgaactctgacaacattatttaagactctgggtccagtgatgcctataactagatgcacttctgaatttctaatttcttaggccaaacttttccatttattcttaatctagtttctagttttctagttgggttattgtcacttgcagcaaaaaggttactaataacttattatgagtcaggcatagttctgggtatgtactgaagaaattatggtgaagaacatccaggcttcatacttgtgggtgtagttgtagacttggtgtgtatgtgtgcacacatgtgggggaccgatgtcctaggcattgtggtttctacaatcatgttggaggaatgaccaaatatcatagtctactgctgaaactcttcatgcttctgattcctccccaattcacttgagctgctgaatctgaattgatgaggtatgtttgcactaaatacacatgttttcattgcttgtttgatcaagagaaggtctcacaggtctctcaggtttgatcataagctactattagggagttttagaaaaatacctaaaagtatcagtatttagaaaaatatttgcatatgtgcaataaacatcctaacttctgtgactaggaattggagatcaggaaatattgtgggatgatgagaacataatcaccagatagaaaaccatgatggaggtgctgaatggaaaattttattcttttattttttagacagtcacactctgttgcccaggctggagtgcagtggtgtgatctcagctcactgcaagctctgtctcctgggctcaagtgattctcctgcctcagcctcctaagtggctgggattacaggtgcacaccaccatacccggctaattttttgtatttttaggagagacggggtttcaccatgttggccaggctggtctcgaactcctgacctcaagtaatctgcccatctcatcttcccaaaatgctgggattacaggcatgagcctctgtgcctggccttggaaaattttattataatggaaacataaataggatttaaaagaaaaggatgatgaaattagaaatatgaaagaaaataggacagata

SEQ ID NO: 41302 - DNA, 1605 bp, Homo sapiens
gtgtgagccaccgcgcccagcacagtagcataattttagagaagttcattcatagctgtcccaggaagtaagaagggaagattcaggataaaccatcatgtgacttgctctcaactggatctggtaaaaatcgtcattgagctcaggattgaaaggagaaatcatacaacatgaagcctgaggaagaattgtaatatttgtgagataaactattcctccattcagtatatactgattgaacactccttttatggaagtagcgaatcgtaggatcctttcctcctttaactagcaacattaccccggttcctttgtctctccttcacttgtggtaatgggctagtacaccacgatgcccttcccccctcaaccatattaacgaagctggttacatgtagcagcctgttccaaaagtttactccatccctctaaccacagagtttgatttagaggtaaataaaggccctaaacttgaccaatgtgaactctttctaagacttaaactatcacttggagaaatacagggagagacacactgaactctgacaacattatttaagactctgggtccagtgatgcctataactagatgcacttctgaatttctaatttcttaggccaaacttttccatttattcttaatctagtttctagttttctagttgggttattgtcacttgcagcaaaaaggttactaataacttattatgagtcaggcatagttctgggtatgtactgaagaaattatggtgaagaacatccaggcttcatacttgtgggtgtagttgtagacttggtgtgtatgtgtgcacacatgtgggggaccgatgtcctaggcattgtggtttctacaatcatgttggaggaatgaccaaatatcatagtctactgctgaaactcttcatgcttctgattcctccccaattcacttgagctgctgaatctgaattgatgaggtatgtttgcactaaatacacatgttttcattgcttgtttgatcaagagaaggtctcacaggtctctcaggtttgatcataagctactattagggagttttagaaaaatacctaaaagtatcagtatttagaaaaatatttgcatatgtgcaataaacatcctaacttctgtgactaggaattggagatcaggaaatattgtgggatgatgagaacataatcaccagatagaaaaccatgatggaggtgctgaatggaaaattttattcttttattttttagacagtcacactctgttgcccaggctggagtgcagtggtgtgatctcagctcactgcaagctctgtctcctgggctcaagtgattctcctgcctcagcctcctaagtggctgggattacaggtgcacaccaccatacccggctaattttttgtatttttaggagagacggggtttcaccatgttggccaggctggtctcgaactcctgacctcaagtaatctgcccatctcatcttcccaaaatgctgggattacaggcatgagcctctgtgccyggccttggaaaattttattataatggaaacataaataggatttaaaagaaaaggatgatgaaattagaaatatgaaagaaaataggacagata

SEQ ID NO: 41303 - DNA, 1605 bp, Homo sapiens
gtgtgagccaccgcgcccagcacagtagcataattttagagaagttcattcatagctgtcccaggaagtaagaagggaagattcaggataaaccatcatgtgacttgctctcaactggatctggtaaaaatcgtcattgagctcaggattgaaaggagaaatcatacaacatgaagcctgaggaagaattgtaatatttgtgagataaactattcctccattcagtatatactgattgaacactccttttatggaagtagcgaatcgtaggatcctttcctcctttaactagcaacattaccccggttcctttgtctctccttcacttgtggtaatgggctagtacaccacgatgcccttcccccctcaaccatattaacgaagctggttacatgtagcagcctgttccaaaagtttactccatccctctaaccacagagtttgatttagaggtaaataaaggccctaaacttgaccaatgtgaactctttctaagacttaaactatcacttggagaaatacagggagagacacactgaactctgacaacattatttaagactctgggtccagtgatgcctataactagatgcacttctgaatttctaatttcttaggccaaacttttccatttattcttaatctagtttctagttttctagttgggttattgtcacttgcagcaaaaaggttactaataacttattatgagtcaggcatagttctgggtatgtactgaagaaattatggtgaagaacatccaggcttcatacttgtgggtgtagttgtagacttggtgtgtatgtgtgcacacatgtgggggaccgatgtcctaggcattgtggtttctacaatcatgttggaggaatgaccaaatatcatagtctactgctgaaactcttcatgcttctgattcctccccaattcacttgagctgctgaatctgaattgatgaggtatgtttgcactaaatacacatgttttcattgcttgtttgatcaagagaaggtctcacaggtctctcaggtttgatcataagctactattagggagttttagaaaaatacctaaaagtatcagtatttagaaaaatatttgcatatgtgcaataaacatcctaacttctgtgactaggaattggagatcaggaaatattgtgggatgatgagaacataatcaccagatagaaaaccatgatggaggtgctgaatggaaaattttattcttttattttttagacagtcacactctgttgcccaggctggagtgcagtggtgtgatctcagctcactgcaagctctgtctcctgggctcaagtgattctcctgcctcagcctcctaagtggctgggattacaggtgcacaccaccatacccggctaattttttgtatttttaggagagacggggtttcaccatgttggccaggctggtctcgaactcctgacctcaagtaatctgcccatctcatcttcccaaaatgctgggattacaggcatgagcctctgtgcctggccttggaaaattttattataatggaaacataaataggatttaaragaaaaggatgatgaaattagaaatatgaaagaaaataggacagata

SEQ ID NO: 41304 - DNA, 1605 bp, Homo sapiens
gtgtgagccaccgcgcccagcacagtagcataattttagagaagttcattcatagctgtcccaggaagtaagaagggaagattcaggataaaccatcatgtgacttgctctcaactggatctggtaaaaatcgtcattgagctcaggattgaaaggagaaatcatacaacatgaagcctgaggaagaattgtaatatttgtgagataaactattcctccattcagtatatactgattgaacactccttttatggaagtagcgaatcgtaggatcctttcctcctttaactagcaacattaccccggttcctttgtctctccttcacttgtggtaatgggctagtacaccacgatgcccttcccccctcaaccatattaacgaagctggttacatgtagcagcctgttccaaaagtttactccatccctctaaccacagagtttgatttagaggtaaataaaggccctaaacttgaccaatgtgaactctttctaagacttaaactatcacttggagaaatacagggagagacacactgaactctgacaacattatttaagactctgggtccagtgatgcctataactagatgcacttctgaatttctaatttcttaggccaaacttttccatttattcttaatctagtttctagttttctagttgggttattgtcacttgcagcaaaaaggttactaataacttattatgagtcaggcatagttctgggtatgtactgaagaaattatggtgaagaacatccaggcttcatacttgtgggtgtagttgtagacttggtgtgtatgtgtgcacacatgtgggggaccgatgtcctaggcattgtggtttctacaatcatgttggaggaatgaccaaatatcatagtctactgctgaaactcttcatgcttctgattcctccccaattcacttgagctgctgaatctgaattgatgaggtatgtttgcactaaatacacatgttttcattgcttgtttgatcaagagaaggtctcacaggtctctcaggtttgatcataagctactattagggagttttagaaaaatacctaaaagtatcagtatttagaaaaatatttgcatatgtgcaataaacatcctaacttctgtgactaggaattggagatcaggaaatattgtgggatgatgagaacataatcaccagatagaaaaccatgatggaggtgctgaatggaaaattttattcttttattttttagacagtcacactctgttgcccaggctggagtgcagtggtgtgatctcagctcactgcaagctctgtctcctgggctcaagtgattctcctgcctcagcctcctaagtggctgggattacaggtgcacaccaccatacccggctaattttttgtatttttaggagagacggggtttcaccatgttggccaggctggtctcgaactcctgacctcaagtaatctgcccatctcatcttcccaaaatgctgggattacaggcatgagcctctgtgcctggccttggaaaattttattataatggaaacataaataggatttaaaagaaaaggatgatgaaattagaaatatsaaagaaaataggacagata

SEQ ID NO: 41305 - DNA, 1527 bp, Homo sapiens
tgagagatacaagcaacaaacatacaagcagatatttgatattacttgctttgtctattgtatggagaatgtatttttaataataactgctccataaaagtgcaatagacataaaatgtaatatttaaatgttttttccaacttggctttggatattcaatttttgcattaaaaattatcaccatttttatttcttttgatcttttaattctctgctgttttattcagcactgtttaatttaaagcatacataaattattatctcaattgccagggacatcttgaacattaatttgcatttttattggtggaataaaaatataaatgaaattagtacaaaattctgctagtgagttctctatttagagaagcgaacatatactataagaaacaaaatcattaggatttaatgtagagaagacaaagttttaaagaaaactttacagctttggtgtgattcacatgtacaattgactcttgaacaacttggggattaggagtaccaaacatctgaaaatccacatataagttttgattccccagaaatctaactactaatagcctaagttgacaggaagccttaccaataatataaactatcaattaacacagattttgtaggttgtatgtattatatttcttcaagtcttcaaagacttgaagaaagcaagggagtgcagcagatatttgatggagaaatattctaggcattgaagatgaccagtgcaaaacctaaggcatgcttggtgtgtttgaggaatagcaagaatgccagtgtggctggcatagagcaaaagggagagtattaggggatgagctcaggactctgagaaagcaagggaaccccactggaaggatctggggagagaaagtgacatggtcaatgatatgatttcactgtgtgccccacccccatatttcaccttgaattgtaacgatacccacatattaaaggtgggggcagatggagataattgaatcatgggggtggtttcccccatactgttctcatggtagtgaatcaatctcacaagatctgatggtttgataaatgggagttcccctgcacaagctctattgcttgccgccatgtaagatgtgaccttcctccatgagtgtgaagcctccccagctatgtggaactttgagtcaattaaacttctttcctttataaattaccaagtcttgggtatgtctttattagcagcatgagaacagactaatacagtctgacttctgatttaaatagaatctatttggctgtcattcaaattgaatcctggaaatgacttttgactcttcctttcttccttaatttctgattccaaccaaccactaagccacccagttctgtcttcttaacacctcttgtgtttgtccatccactgcacttccattcatggtatcttaatttacacgtrgctcctcctagattatcacaattgatagatggtgagatgccttctttctgctcctgtctttaggccctttgcttgaatgtactttatcatgtttctatttcaaaat

SEQ ID NO: 41306 - DNA, 455 bp, Homo sapiens
aatggaattatctcttctaatgcgtgtttgcaatttttaaagggtggcgttagtacaggtaaatctctggcttattcctggaacatattttgagctaaatagattttttaaaaagtaccttaccgctatgcatctgctggaacataaaagtctggtaccagtcatccaatatcactttactttttgggaaatccccactgaatggagctctgtttaggcacttaactaaaaaaaatcaggctggtgtggtggcttatgcctgtaatcccagcactttgggaggccgatgcgggcagatcgcctgaggtcaggagttcgagaccagcctggcccatatggtgaaaccccgtctcttactaaaaatacmaaaattagccaggcatggtggcaggtgcctgtaatcccagctactcaggacgctgaggcaggagaaatcacttgaaccagaggttgca

SEQ ID NO: 41307 - DNA, 2571 bp, Homo sapiens
tagaatcccctgtagtgaaactctcttcagtctggataggaatgttactatgtctggggatttacctgcctttggagatattgtttgtctttagatgtctattggaaagaaaataagggattttttttacttaagatatcctaacacttaaaaaaattaatgctacctttttcagttcatgaactactgaattttctgtttttatagatacacaaatagcttttgttttaactgctccaagagctaaacatagtgacattactgaagctgtttttagcctcttaattttagaaatcagtgactttcttggttgccctaaataaggatgcaaggcagtcatataaattctgaccttctcaacacacagctgtaggttctttcaaacttgtcagcaagactgcaccccagtgggctgccagaaagagtgtatgctataggggagaagcattggtctaggccttctagactagtccttctagactgtgggcttatctcttatgataaggcacagtgtgtatggattaagttagcaaatttggtagaaaactgttctttagttctaccataatgcctaaagggtatatcagaatataattctgaaatataagactcaaatgtatttttgtatcatagtcaaattagaatatttctaattccctctacaaaaaaggctaaaaatgaattagagatttttaaaacagcacagataatatcttttttttctgatattctaagctgaaggagaaacaactcacaagttcaatcttggtaaaactttaaacaaagttaaaagttcagcccagtaaaagagtgaaattgaaatgtccttaacacaaagaaatgataaatacttgaggtgatgaatactccaattgctataatttgatcmttacacattttattcctgtatcaaaatttcacatgtaccccataaatatatacaattattatgtatccataataattaaaaataaaaatattaaaaatattttttaaatgactggcttgtgtaaacatcaaacttctctgatacctcccagttgttcttttgattgaatgagatgcaagcaaaatgtttgaattctgtttcctgtaagttttcaaataaattccagaaataggaacacttttacactgttggtaggaatgcaaattagttcaaccattgtggaagatggtgtggcaattccttaaagatctggaactagaaataccacttgacccagcaatcccattattgggtatatacccaaaggaatataaatctttctagtacaaagatacacgcacatctatgttcattgcaaaactgctcacaatagcaaactactcacaatagcaaagacatggaatcaacctaaatgcccatcagtgatagactggataaagaaaatatggtacatatacacaatgaaatactatatggccataaaaaggaaagaaataatgtcctttgcagggacatggatagagctggaagccattatccttagcaaactaacataggaacagaaaaccaaataccacaagttctcacttataagtgggagctgaacaatgagaacatatggacacagggaggggaacaacacacactgggcctgtcaagggctgaggagaacggggagaacattaggaaaaatagctaatgcatgctgggcttgatacctaagtgatgggtggataggtgcagcaaaccaccatggcacacatttacctatgtaacaaacctgcacatcctgcacctgtaccccggaacttaaaataaaaaataaaattaattaaaaaaataaaaatttattttatccccaatgtggtgtgccaatatctttgacatcatggtgtttccagtaatataaatgtatatagacaaaaaaaatagcatttcttccatttttcttgaaagtgtaaaaggatgagggcacattggctcaagcctgtaatctcagcactttgggagactgaggtgggtgggttgcttgagcccagaagtttgagaccagcctaggcaacatgacaaaaccctgtctatataaaataaaataaaataaaataaaataaaataaaataaaataaaataagccaataagctgggcatggtgttgcgtgcctgtagtcccagctacttgggagctgaggtacgaggatcctttgagcccaggaggcagacgtttcagcaaatagctgagattagcagtgaatagcagcgaatagctgcagtcaaacctgagcaaaagagcaagacaaataaagtgtaaaagaagaactaaatgaggtaattcttgccttgtcaataaaatagcttagaaaacattctgaaggagaagtaaacgtgattgtaagcctcaaattgtttctagaatttttgtataaattgttcaaagaaggacacataaacaataagtaaatgataaaaaatttaaaaaaataagaaggcacataaacaacagacaaataaaatagatttgcaaggattcagatagtagaggtttcaccatacaacaaccttacaagttgcaaaagaattgagagttacaaatttcaacaaaaatatggaaaccattaagacgt

SEQ ID NO: 41308 - DNA, 2571 bp, Homo sapiens
tagaatcccctgtagtgaaactctcttcagtctggataggaatgttactatgtctggggatttacctgcctttggagatattgtttgtctttagatgtctattggaaagaaaataagggattttttttacttaagatatcctaacacttaaaaaaattaatgctacctttttcagttcatgaactactgaattttctgtttttatagatacacaaatagcttttgttttaactgctccaagagctaaacatagtgacattactgaagctgtttttagcctcttaattttagaaatcagtgactttcttggttgccctaaataaggatgcaaggcagtcatataaattctgaccttctcaacacacagctgtaggttctttcaaacttgtcagcaagactgcaccccagtgggctgccagaaagagtgtatgctataggggagaagcattggtctaggccttctagactagtccttctagactgtgggcttatctcttatgataaggcacagtgtgtatggattaagttagcaaatttggtagaaaactgttctttagttctaccataatgcctaaagggtatatcagaatataattctgaaatataagactcaaatgtatttttgtatcatagtcaaattagaatatttctaattccctctacaaaaaaggctaaaaatgaattagagatttttaaaacagcacagataatatcttttttttctgatattctaagctgaaggagaaacaactcacaagttcaatcttggtaaaactttaaacaaagttaaaagttcagcccagtaaaagagtgaaattgaaatgtccttaacacaaagaaatgataaatacttgaggtgatgaatactccaattgctataatttgatcattacacattttattcctgtatcaaaatttcacatgtaccccataaatatatacaattattatgtatccataataattaaaaataaaaatattaaaaatattttttaaatgactggcttgtgtaaacatcaaacttctctgatacctcccagttgttcttttgattgaatgagatgcaagcaaaatgtttgaattctgtttcctgtaagttttcaaataaattccagaaataggaacacttttacactgttggtaggaatgcaaattagttcaaccattgtggaagatggtgtggcrattccttaaagatctggaactagaaataccacttgacccagcaatcccattattgggtatatacccaaaggaatataaatctttctagtacaaagatacacgcacatctatgttcattgcaaaactgctcacaatagcaaactactcacaatagcaaagacatggaatcaacctaaatgcccatcagtgatagactggataaagaaaatatggtacatatacacaatgaaatactatatggccataaaaaggaaagaaataatgtcctttgcagggacatggatagagctggaagccattatccttagcaaactaacataggaacagaaaaccaaataccacaagttctcacttataagtgggagctgaacaatgagaacatatggacacagggaggggaacaacacacactgggcctgtcaagggctgaggagaacggggagaacattaggaaaaatagctaatgcatgctgggcttgatacctaagtgatgggtggataggtgcagcaaaccaccatggcacacatttacctatgtaacaaacctgcacatcctgcacctgtaccccggaacttaaaataaaaaataaaattaattaaaaaaataaaaatttattttatccccaatgtggtgtgccaatatctttgacatcatggtgtttccagtaatataaatgtatatagacaaaaaaaatagcatttcttccatttttcttgaaagtgtaaaaggatgagggcacattggctcaagcctgtaatctcagcactttgggagactgaggtgggtgggttgcttgagcccagaagtttgagaccagcctaggcaacatgacaaaaccctgtctatataaaataaaataaaataaaataaaataaaataaaataaaataaaataagccaataagctgggcatggtgttgcgtgcctgtagtcccagctacttgggagctgaggtacgaggatcctttgagcccaggaggcagacgtttcagcaaatagctgagattagcagtgaatagcagcgaatagctgcagtcaaacctgagcaaaagagcaagacaaataaagtgtaaaagaagaactaaatgaggtaattcttgccttgtcaataaaatagcttagaaaacattctgaaggagaagtaaacgtgattgtaagcctcaaattgtttctagaatttttgtataaattgttcaaagaaggacacataaacaataagtaaatgataaaaaatttaaaaaaataagaaggcacataaacaacagacaaataaaatagatttgcaaggattcagatagtagaggtttcaccatacaacaaccttacaagttgcaaaagaattgagagttacaaatttcaacaaaaatatggaaaccattaagacgt

SEQ ID NO: 41309 - DNA, 584 bp, Homo sapiens
agaaagatcatggtctttataaggaggaatatcagaatttgaattttaactcttttacttattaaatatagctgyggaccagtgtgtttatacttttacagcaattagaatagtgactaacagaaaaagttcaaataattttagctattaggattacttttaaacatttattcatatctttttctgtacatcctttaaaataatttcattgtaatggtcagtaatgaaataagtagtaatggattcattataatactgaaagtttacttaaacaataaatccatatttagacatacataaaagtggcaataaaagtttatttagctacaagaacattgagatgcacagtgagccaggaagtgtaccatatgccatgttacacctggatgctgtgtggtggcaccttaatcactcttctaatgtcattatagttcctgaatattggaagacatatggtattttgcctccttagtggcgcattttcatcctagcttggttgacagttatttactattaatcttctgccagctgtaaatatgatgttaaaaataaaacttctctctacagaagaacttcctcttggg

SEQ ID NO: 41310 - DNA, 594 bp, Homo sapiens
atgtttaaatatcttaactttagctgttgctgaaaattcagttctataaacataagaaagattattaacaggtgttatgttaacttgcaaagcagtttgggggaagtgggaaaataaagaaattgtttcagagtatagggtttcccttcttttgcctcagggataattcaaggttatttttttttcaaggatagctggcagagaagaaattcaagtcatttctcaggattaaggccatattaataatttgatgaggaaaatgaggacatgacataattgctgaaatgtgcatttatgtgtagacattttcactctatcacttgcagggatcatcataaaacataaatctagttgaaactaaatctcttaaattctgctaaatatactcatattttagtatcctctcctccaaacatactggacttctaatactgtcagtaatatagctaccaacagcatagctattcatggccactatcattaattttcactaaattcrtgtttatcaattatcatttcaatgatcaattatcaatatttatcctctcccctttacaaatgataaaagctgagtttcagaaagtccaaatgacc

SEQ ID NO: 41311 - DNA, 1376 bp, Homo sapiens
tctgtcaatggatactagagttgtttccacctttgtttattgtaaataatgctgctgtgaacttgggagtgagactgttttgatgagagaaattaaattggtttgactctaaacaggtgccaaggaatgaagaagatgcagttttcataggaagatgtgcatcattagtttatgaacaggcattcatttgtattgcactaagaattttagattttctttaattagcttgaggtttatctttacctggcgtgttttttcttcaaagtaaaaattgtttactcttattaccagtaataacatgtataaaacataaagcactttttcatatccatgatctcaattcaatccagcaaatatttattgagcaccagctgtatgctaggagagttgctggggatgagaaactcacagttctgggctttcaggaagcataaggctggaggaggaagcagatccgtgagcaggccatatggtgcagtgtgagaaattttagagtagtctctcttgtactgtggggacacttagggtgtctctctgagtcttgtagcttaaggaaggcttttcagaacaggagctgtctgaacactgcaagtgtggggcttacaagagtacattgggtcacaagaactagggagaatgtgtagagtgagagaaggtgaagagcagagaacaagaagtgtggaaacaaggctgaaagaagtggccagaaggcaggagaaaatctagagagagcagtattgtgaaaatcaagcgagcatttcaggcaggagagaggtcatgcagtctcagatatgacagagtgtaagtgaaaacataaaggtgtgccttggtttaagtggcagaggacgttgttgagcttggctggagaagtttcaggggtaggatctggtgctagattgctgtgctgaatcagatccaccaatttccaggtgaggactgcagaccaaagataaacatttttcttttttctaccaagaccccaataaaaataaacaaacttascaaaatgaaaagagtgggagaaggactatcagcaaatttgagttcaacaaatttctagaagatagataaccagagggaggaaacagcagctgagaaactacagacaggtatggcaaagggaaaggaggtccagggacctcagactcagtgagacagtaatgtggaaggaggagtgaggaagggaagcaggagattaattggatatctgcctaccaaatgatgatatcaacaggctctccatagcccgtctccttccttcatccccatggagaaagtgctacaggcattttattccaagtagaaaaccagaagacacctctaaagagacaaaaaaacaaacaaacaaacaaagacctgggaggaatttcattgct

SEQ ID NO: 41312 - DNA, 1376 bp, Homo sapiens
tctgtcaatggatactagagttgtttccacctttgtttattgtaaataatgctgctgtgaacttgggagtgagactgttttgatgagagaaattaaattggtttgactctaaacaggtgccaaggaatgaagaagatgcagttttcataggaagatgtgcatcattagtttatgaacaggcattcatttgtattgcactaagaattttagattttctttaattagcttgaggtttatctttacctggcgtgttttttcttcaaagtaaaaattgtttactcttattaccagtaataacatgtataaaacataaagcactttttcatatccatgatctcaattcaatccagcaaatatttattgagcaccagctgtatgctaggagagttgctggggatgagaaactcacagttctgggctttcaggaagcataaggctggaggaggaagcagatccgtgagcaggccatatggtgcagtgtgagaaattttagagtagtctctcttgtactgtggggacacttagggtgtctctctgagtcttgtagcttaaggaaggcttttcagaacaggagctgtctgaacactgcaagtgtggggcttacaagagtacattgggtcacaagaactagggagaatgtgtagagtgagagaaggtgaagagcagagaacaagaagtgtggaaacaaggctgaaagaagtggccagaaggcaggagaaaatctagagagagcagtattgtgaaaatcaagcgagcatttcaggcaggagagaggtcatgcagtctcagatatgacagagtgtaagtgaaaacataaaggtgtgccttggtttaagtggcagaggacgttgttgagcttggctggagaagtttcaggggtaggatctggtgctagattgctgtgctgaatcagatccaccaatttccaggtgaggactgcagaccaaagataaacatttttcttttttctaccaagaccccaataaaaataaacaaacttagcaaaatgaaaagagtgggagaaggactatcagcaaatttgagttcaacaaatttctagaagatagataaccagagggaggaaacagcagctgagaaactacagacaggtatggcaaagggaaaggaggtccagggacctcagactcagtgagacagtaatgtggaaggaggagtgaggaagggaagcaggagattaattggatatctgcctaccaaatgatgrtatcaacaggctctccatagcccgtctccttccttcatccccatggagaaagtgctacaggcattttattccaagtagaaaaccagaagacacctctaaagagacaaaaaaacaaacaaacaaacaaagacctgggaggaatttcattgct

SEQ ID NO: 41313 - DNA, 176 bp, Homo sapiens
agtattcyatggtgtatatgtgccacattttcatatgtctgtctaaagtagtcttcccagacctgtaagtcccctaattgaaattataccttttggcaccttttgtaatttcaattaggggacttacaggtttgggaagactattttagacagacagatggacatgagtaaagcca

SEQ ID NO: 41314 - DNA, 650 bp, Homo sapiens
gatgtgaccagtattggacaatgagagatgagaggaagtcggctggaaggcttctagaaaaagcattcctcactatcaaaaagagatgcgcaaagcggcagcttctcttctgctgctggatgttaccgaatctgcatatgatagtaggatgacggcagccaccttgtagcaaagagcagagtttcctccaagagaacattctacggggagaagaggaracagcaccaatgacatcactttgcctgagttcacaaaccctacaggtgctcccaccccctacatttttccttgtgtgagataataaattccttattatttaagccattttgtgttgccttctgctatttgctgctgaaatcatctcgatatgccttttctaccaatatgctttgattttccacagtaagaccagtttttagacatcgtattattagaaataacctcagattcactgctatacagagtttcaaagttccaacagagagaaacaacattttgcgtgttttcttaagctggttaaaaaatacatatgattggccattttaaccacttttaagtgtcagttcagtggcattaagtatatctacattgtcatgcaaccatcaccactattcatttccagaacttttttttttttttttttttttttt

SEQ ID NO: 41315 - DNA, 650 bp, Homo sapiens
gatgtgaccagtattggacaatgagagatgagaggaagtcggctggaaggcttctagaaaaagcattcctcactatcaaaaagagatgcgcaaagcggcagcttctcttctgctgctggatgttaccgaatctgcatatgatagtaggatgacggcagccaccttgtagcaaagagcagagtttcctccaagagaacattctacggggagaagaggagacagcaccaatgacatcactttgcctgagttcacaaaccctacaggtgctcccaccccctacatttttccttgtgtgagataataaattccttattatttaagccattttgtgttgccttctgctatttgctgctgaaatcatctcgatatgccttttctaccaatatgctttgattttccacagtaagaccagtttttagacatcgtattattagaaataacctcagattcactgctatacagagtttcaaagttccaacagagagaaacaacattttgcgtgttttcttaagctggttaaaaaatacatatgattggccattttaaccacttttaagtgtcagttcagtggcattaagtatatctacattrtcatgcaaccatcaccactattcatttccagaacttttttttttttttttttttttttt

SEQ ID NO: 41316 - DNA, 650 bp, Homo sapiens
gatgtgaccagtattggacaatgagagatgagaggaagtcggctggaaggcttctagaaaaagcattcctcactatcaaaaagagatgcgcaaagcggcagcttctcttctgctgctggatgttaccgaatctgcatatgatagtaggatgacggcagccaccttgtagcaaagagcagagtttcctccaagagaacattctacggggagaagaggagacagcaccaatgacatcactttgcctgagttcacaaaccctacaggtgctcccaccccctacatttttccttgtgtgagataataaattccttattatttaagccattttgtgttgccttctgctatttgctgctgaaatcatctcgatatgccttttctaccaatatgctttgattttccacagtaagaccagtttttagacatcgtattattagaaataacctcagattcactgctatacagagtttcaaagttccaacagagagaaacaacattttgcgtgttttcttaagctggttaaaaaatacatatgattggccattttaaccacttttaagtgtcagttcagtggcattaagtatatctacattgtcatgcawccatcaccactattcatttccagaacttttttttttttttttttttttttt

SEQ ID NO: 41317 - DNA, 492 bp, Homo sapiens
ccataaaggccatactgattgtgtatggtcattgcccaaaatgataggtggaggtctgcgcctgcaggttgttaaacatgttgcatggtgaccgaccatcgcccttggcaatggtcacatcattctagccaactgttttggaatgtgtgttgtgcatatcgaagatgaggttaaaaaaatagagaggyggggtgtgttgactcacgcctgtaatcctagcactttaggatcacttgaggtgggtgggtcacttgaggtcaggagttcgagaccagcctggtcaactggtgaaaccccatctctattaaaaacacaaaaattagcccggcgtcgtggcacatgcctgtaatcccagctactcaggaagctaaggcaggagaattgcttgaacccagaaggccaagattgcgccactgcactccagcctgggcgacagagggagactccatctcaaaaaccaaaaaaaaaaaaaaaaaaaaaaaaaaaaaaaaa

SEQ ID NO: 41318 - DNA, 492 bp, Homo sapiens
ccataaaggccatactgattgtgtatggtcattgcccaaaatgataggtggaggtctgcgcctgcaggttgttaaacatgttgcatggtgaccgaccatcgcccttggcaatggtcacatcattctagccaactgttttggaatgtgtgttgtgcatatcgaagatgaggttaaaaaaatagagaggtggggtgtgttgactcacgcctgtaatcctagcactttaggatcacttgaggtgggtgggtcacttgaggtcaggagttcgagaccagcctggtcaactggtgaaaccccatctctattaaaaacacaaaaattagcccggcgtcgtggcacatgcctgtaatcccagctactcaggaagctaaggcaggagaattgcttgaacccagaaggccaagattgcgccactgcactccagcctgggcgacagagggagactccatctcaaaaaccaaaaaaaaaaaaaaaaaaaaraaaaaaaaaaaa

SEQ ID NO: 41319 - DNA, 492 bp, Homo sapiens
ccataaaggccatactgattgtgtatggtcattgcccaaaatgataggtggaggtctgcgcctgcaggttgttaaacatgttgcatggtgaccgaccatcgcccttggcaatggtcacatcattctagccaactgttttggaatgtgtgttgtgcatatcgaagatgaggttaaaaaaatagagaggtggggtgtgttgactcacgcctgtaatcctagcactttaggatcacttgaggtgggtgggtcacttgaggtcaggagttcgagaccagcctggtcaactggtgaaaccccatctctattaaaaacacaaaaattagcccggcgtcgtggcacatgcctgtaatcccagctactcaggaagctaaggcaggagaattgcttgaacccagaaggccaagattgcgccactgcactccagcctgggcgacagagggagactccatctcaaaaaccaaaaaaaaaaaaaaaaaaaaaaaaraaaaaaaa

SEQ ID NO: 41320 - DNA, 492 bp, Homo sapiens
ccataaaggccatactgattgtgtatggtcattgcccaaaatgataggtggaggtctgcgcctgcaggttgttaaacatgttgcatggtgaccgaccatcgcccttggcaatggtcacatcattctagccaactgttttggaatgtgtgttgtgcatatcgaagatgaggttaaaaaaatagagaggtggggtgtgttgactcacgcctgtaatcctagcactttaggatcacttgaggtgggtgggtcacttgaggtcaggagttcgagaccagcctggtcaactggtgaaaccccatctctattaaaaacacaaaaattagcccggcgtcgtggcacatgcctgtaatcccagctactcaggaagctaaggcaggagaattgcttgaacccagaaggccaagattgcgccactgcactccagcctgggcgacagagggagactccatctcaaaaaccaaaaaaaaaaaaaaaaaaaaaaaaaaaaraaaa

SEQ ID NO: 41321 - DNA, 656 bp, Homo sapiens
tgaacttcaggaaaggatttcaataatcaagtatagaaatcactggtgtgtgtctgttacaggtagtgagataggcatgagccggttaggagacggcccttctccccgacccactaggcatgtcaggcgatggttcgacagctgtcacactgcctctctaaaagtgataatgcagccagtgccagggtgccagggagagacaatctcttgataatccacagctgtgaatgttaaagtgttcattgaatgcaggcatcaagggaagcaactttccaggcatgcgcagtaagagacgaaatggcaaaatatgcccttctagaggcactccaycggaaaggggaagaaagcttcggatgggggtcgggcgcagaggctcacgcctttaatcccagcactttgggaggccaaggcaggcggatcacctgaggtcaggattcgagaccagcctgactaacatggagaaaccccgtctctactaaaaacacaaaattagctgggcacggtggtgcatgcctgtaatcccagctaccggggaggctgaggcaggaggatcacttgagcccaggaggcagaggttgcagtgagccgaaacggcgccattatactccagcctgggtgacagagcgaaactccatctcaaaagaaaaaaaaaaaag

SEQ ID NO: 41322 - DNA, 1218 bp, Homo sapiens
tgcataattttattctaatttttcttaactttagctttgactgcttcttccttcttttaaaacatgatgtattaaaaatatttcrgagttggctgggtgcaagggctcacgcctgtaatcccagcactttgggaggccaaggcaggtggatcacttgaggtcaggagttcgagaccagcctgaccaacatggcaaaatgtttctactaaaaatacaaaaattagctgggcatggtggtatgcacctgtaattccagctactcaggaggctgaggcatgagaattgcttgaacccaggaggtggaggttgcagtgagccaagattgcaccactgcactccagcctgagcgacagagtgagactctgtctcaaaaaaaaaaattaacttaaaaatatcaaaaattaatattaatattaaaatgcttaaaatattaactataaggcaaaaagacactgatcaaataacatattgttacctctccatttgaaaggaatagggttgttgcatacgcatatttaactcagatttttaaaaatgtcatttagtctggtttttaaacttttagaacaaaaggttttgtctttgcagaaaattgtatctagtacagaacccctcctgaattattaaatgtcctaattatgaagaaaacatatatatttaaattttaagggaaaacatgattttgaaagtatgttgtgtcctatctttatctttttgatagattgtataggaaaaagacataaaaattcacagtcttctaaatgattttacaaaatcatctgttgatcctctgtgcttattcattgttaagaataaaagaaacattccccttttgactggtgttagcttttctttcctacatggcaccttcctcattttgatgaaattctgcagctgttgctttcagtcagagaaaggtcataaaccaaatgatactgaccttctaaaattacctacttaataatgcactacaaatgttaactttttttcctagtgatgaaatgtaaaaagtactcaagtatgtaatacatttttgatggttatgagttcacttgattaccgttagtgtacaattagtgacatcttaaattgggtttggaaaaggttatttagctcagttagaaaatgtaattaagatttttctctaactagattaggaaaccctacctttatttcattaagatttaaatataggattacttgggtgaattttaaaaa

SEQ ID NO: 41323 - DNA, 438 bp, Homo sapiens
cctatatcttttatattttatttctttaaatcagwgttttagaaatatacttcagtctttataaaaactttggccatggtgtatcctcttaagtcttctccttcctcactccattttccccaacaccatataggtattatctttattaattcttcgcttacttctgcaaatacagatgtacaaagagacgcttactttctccacacatttttacacaaaaagcaaacaaggtccactatccagcaccttgtttttctcattagcaatttatcctgaagatctctagatactgatatatagagatcatcattcatttctttttaacgtctccataatacttcaactgtgtaagtaccctagtttatacagccagtcctctataataaggcactcagcttgtttccatattttttcctattgaaattaatatcacattag

SEQ ID NO: 41324 - DNA, 532 bp, Homo sapiens
aaactctacagcgaagcaggcaggsagatattactatgcatggtatgactatatactaagagatgaaagaaatgaatataaattcagtctacagctaatgatgactcagcactctcttataagggctagaaatacatttatcatggctcattgaactggcatctgaaaaacaggcatacgtatgatttgaaaaaagtgttttctccacgttacacaaccgtaacatttcttcatatccttaccctttctttcattcctcaacttctgttatattaactatcaatacattctttaatcattgacttccttctccactcatcccctaattctgtttcactcatctctctcaccctgtggacacttctgattatcaagacactaaaggtttttcctgaattgtctggttttgtttgtttgtttgttttcttgttgcaggagcaattgacaacaatgtacccacacttgcttgaaactctggctttctcctgctggtctcttccacaatgctctagttgagattccttcctaacag

SEQ ID NO: 41325 - DNA, 532 bp, Homo sapiens
aaactctacagcgaagcaggcaggcagatattactatgcatggtatgactatatactaagagatgaaagaaatgaatataaattcagtctacagctaatgatgactcagcactctcttataagggctagaaatacatttatcatggctcattgaactggcatctgaaaaacaggcatasgtatgatttgaaaaaagtgttttctccacgttacacaaccgtaacatttcttcatatccttaccctttctttcattcctcaacttctgttatattaactatcaatacattctttaatcattgacttccttctccactcatcccctaattctgtttcactcatctctctcaccctgtggacacttctgattatcaagacactaaaggtttttcctgaattgtctggttttgtttgtttgtttgttttcttgttgcaggagcaattgacaacaatgtacccacacttgcttgaaactctggctttctcctgctggtctcttccacaatgctctagttgagattccttcctaacag

SEQ ID NO: 41326 - DNA, 618 bp, Homo sapiens
cacatttacatttttctgcctgttgtaaaaggccaaaatgtcacctctcccatgaagctgtgtcagattccccacctgggaagaaatggttcactctgagtttccacaactctcccatgaagctgtgtcagattccccacctgggaaggaatggtttactctgagtttccacaactcttttagattttaattttgttgttgttttaaatctttaagtcccttagcccttttgccctcatattatgttgattctcatacccattatctccataaagacatgacctttgattgagcttgtaactccccgcctctcatgacgccttgcacaaagcaggtgctcaatatatatcaaatgaatgaatatgactttattaggcaaagctacagaatttcacgtgtaagttaggttcaaaatttattgactttttcaaaatttgcagaaccgtaagtgtttcttttatggaatagatttctgtctactgaaaaaagaagtacagcttaaaacacttaaaatwcttaaactcttttagttcagtgaagagggagaaaaaaaacaatatttttgctaggatttgaaaactagcacccacatgaaacagatgccaatctaaactttaa

SEQ ID NO: 41327 - DNA, 240 bp, Homo sapiens
agatgtgggccccagggagagtataagatacattggagctgagacctgctggatgggagaggrataagaggtgaggaaactccacgtgcaaaggccctgccccattagagcattgtcctcaaattacacaatgtaagttggatgagcaataaaggctaggagtgagcagaagacttataagacataacactgggaaaatggcagtcatcaatgacgcaggccttgcaagtcagtaagaca

SEQ ID NO: 41328 - DNA, 731 bp, Homo sapiens
tgcaggcgcgcaccaccacgtccagctaatttttgtgttttttatagaggtggtgtctcactatgctgcccaggctgttctcaaactcctgagctcaagcgatccacccacgtcagcctcccaaagcactgggattacggacatgagccactgcacctggcatctactctatacatctttgaaattttctgtaataaaatgttagaaaagaaaaataaagaataaatgaaatcaggtatgtaaagtagctaccacagtgcctggcaaacagaaggcattcagcaaatgacagacatcattcttacaactgagttcacatctatcttgagtatgagcttttggcatttaattgcacaccagtattcactacagtccacagatgttggatggcgctctgctggatactgcaggggacacccacacaagtcaaggagcttatgccctcaggacttgggtgatcacaagaacaaaaggcaraaacagcaaaggctcaggggtctgatgaactgagcttaaattaacgagccaacatcatctatttcctatgtaatcttagacaaaataacatactaaccaggaaaatctcttcatccatcattaaaaaattaaaaccaactatttctgatagatgagcctattatgagaataaatgagatgctcaaaacgtggcactgtaaactcatattatataaacattagttctcattttattgtatgtggagccaacacag

SEQ ID NO: 41329 - DNA, 496 bp, Homo sapiens
tagtttagttcatttgtatatgggcacattaactggtctgtgatgatcttaacactccttaaatagaccatctcagattaatcacatctgaaattaaggataagattaatatgcagggttttggtttacagttttgtacacttaacctttctgagtaattgttaaagtgcctcatcctaagtattgctgaccttttcctatttatacttgatagtttgaaaacccagtgaaacaaatttcgtatttgtaaaggattggacatcagatttatattgtctatgtgactcttctataacaattagttgcagtatgcaagyattacataattcaaattgtaaatagtgaaaaatgaacgtttataggtaactataacgtttcacttaatgggaaatcttactattataaatgtgcataattggcatttaaaatatcaagctgaaatgctgttttctcctaaaacagtatatatatatacacatatgtatatgtaacattt

SEQ ID NO: 41330 - DNA, 642 bp, Homo sapiens
tccacctccttgtgctgtggtctaaaatagaacggcaacatctgcagccccgtgtcaggggygtgggacagtctggtgagggccaccagggggctgactggctgcaaggggcacaggcagccacatggcggccagcaggggaactgggcctgatctgtgggtgttcccaacggggtcaaattgcctggtgtcaagttaccctgcttctctaatccacgggtagcgggtagcggatagtcaagggttagaaataagcactgtgtgcagtctctggttttagcctgtaagattccactgcttagcttttaggaggggaaggaaaagcaattgaacagtgaagggataggggaatgtccgcaggcccccttcccatggcaaaatttcctcttggtggtactgtcccctgccaactcttttctgcccaaatatcatgcaagggggaggggctatgcaagagatgaacagaaactccgtttattgttttcaatctcagcttagcaaccatctccttctgagagacttccctgagtcctttagtctccgccacccttaggacttactgtaattgtctgctcactcgtctctaccccagactagattgtaagctccaggagggcaaggattgttcctttcttgctgaat

SEQ ID NO: 41331 - DNA, 515 bp, Homo sapiens
agcagccggctgagtgactgcagggggaggaygagccatgcatgctgggaggaatggtgtgagatgagccactcctttatgctgagagaaatcgggactcacaattcaacccataaatactgtagatagttttatgtagaaaatcctgtaattcattgtctatgatcaatttcactgctaagtacaatttagctagggacatatccttattgtgtaatataattaaagtccaatttcagaagtgtaactggttattttgtggagaggaaatgctaagaactgggcaatagccaataatcatagctaccattggttaacttcttttttttttttttttttttggagaaggaatctcgctctgtcacccaggctacagtggcagtggcgcaatcttggctcactgcaacctctgcctcccgggttcaagcgattctcctgcctcagcctctggagtagctgggattacaggtacgtaccatcatgcccggctaatttttgtatatttagtagagacg

SEQ ID NO: 41332 - DNA, 643 bp, Homo sapiens
ggccacacattcttttggatgggaggatgcaaagagagtccacccaagggaccaggtcttgccctcaaggggcttatttttatttttatttttcttatttatttatttatttattttaagacatggtctctctctgttgcccaggctggagtgcagtggcatgatctcagctcactgcaacctccgctcttgggttcaagtgattctcctgccttggcctcctgagtagctgggatcwccctgtgccaccacgtctggctaccttttgtatttttggtagagacggggtttcaccatgttggccaggctggtcttgaactcctgacctcaggtgatccacccatcttggtctcccaaagtgctgggattacaggcgaaagccactgtgcccagcccaaggggctatttttacatggggaaagacaaacaggcaagttgtgtcaaatatgtcactagagttttgaagccagggctacaggagagtgatcaattctgctggggccaagtgcagcagcagagagtaggggaggccaaagcttgcagggtgagtgagtaatcactgccaattatagttagaaaatattttgcttcttcagagaaaagaattgcaggtaactgcctacaggcagaaagcatgaagtaa

SEQ ID NO: 41333 - DNA, 643 bp, Homo sapiens
ggccacacattcttttggatgggaggatgcaaagagagtccacccaagggaccaggtcttgccctcaaggggcttatttttatttttatttttcttatttatttatttatttattttaagacatggtctctctctgttgcccaggctggagtgcagtggcatgatctcagctcactgcaacctccgctcttgggttcaagtgattctcctgccttggcctcctgagtagctgggatctcmctgtgccaccacgtctggctaccttttgtatttttggtagagacggggtttcaccatgttggccaggctggtcttgaactcctgacctcaggtgatccacccatcttggtctcccaaagtgctgggattacaggcgaaagccactgtgcccagcccaaggggctatttttacatggggaaagacaaacaggcaagttgtgtcaaatatgtcactagagttttgaagccagggctacaggagagtgatcaattctgctggggccaagtgcagcagcagagagtaggggaggccaaagcttgcagggtgagtgagtaatcactgccaattatagttagaaaatattttgcttcttcagagaaaagaattgcaggtaactgcctacaggcagaaagcatgaagtaa

SEQ ID NO: 41334 - DNA, 643 bp, Homo sapiens
ggccacacattcttttggatgggaggatgcaaagagagtccacccaagggaccaggtcttgccctcaaggggcttatttttatttttatttttcttatttatttatttatttattttaagacatggtctctctctgttgcccaggctggagtgcagtggcatgatctcagctcactgcaacctccgctcttgggttcaagtgattctcctgccttggcctcctgagtagctgggatctccstgtgccaccacgtctggctaccttttgtatttttggtagagacggggtttcaccatgttggccaggctggtcttgaactcctgacctcaggtgatccacccatcttggtctcccaaagtgctgggattacaggcgaaagccactgtgcccagcccaaggggctatttttacatggggaaagacaaacaggcaagttgtgtcaaatatgtcactagagttttgaagccagggctacaggagagtgatcaattctgctggggccaagtgcagcagcagagagtaggggaggccaaagcttgcagggtgagtgagtaatcactgccaattatagttagaaaatattttgcttcttcagagaaaagaattgcaggtaactgcctacaggcagaaagcatgaagtaa

SEQ ID NO: 41335 - DNA, 601 bp, Homo sapiens
tccaagaagtgaagcatacttccacctgtagtggccacccctctattataatatccctctgagagctatccccttccatctctctggtttccacccacatatctccttatttaagaaaactttctgtattattcttcataaagtttcactcctcacctccttcacaccccaataagtaattgttttgtacttctcttaagagcagcagaacataagacaatagtaatcctaaataaaaagaaactaccctagctaacaaaacatgctaaatttcaaaaaaaaaaaaaactgtacttttagaaacctacccttacataaaggcaatatggctgctagaaggggctgtaaagaaaaattcaggtttctgaattatggagacaagaacacattgaacaaaggccatataaagaatttccaagactgtttgtgaccagatggagacaagtggggtgagtgggcattgcgtatggttctgaattcctctgtgacttgctgtgttcatgagttactatattttatgttctgctgttcctatgagaaagcataatttacttygttgagaaaacacgtagatgaaccaaaacatcttccatctttaatg

SEQ ID NO: 41336 - DNA, 985 bp, Homo sapiens
agagaaagatatttcttggcagctattataagcagtcttgcccatacagccttatcatcctgtagagctcgtgatactagaagtatcagtggtttaaaacaaaacaaaaagataccatgtgcagtctgaaaaatatctaaaggagccatgcaatgaaaattcctagtgtcctgcagcaaggttatgccrtctgtagtagggaaccatgcacgctaaaaaagcagtttctggtatgcaccgagctctgctccagacagagcatgcaactgtagaacagtaagtggccctgtctctaaaactgaccaacatgagctggatacgctcagagcccttaagttatgagtttgggtacatagtgggaggaaagatgattttcaatgattaagagttggtgacttccaaagttaaaataacatagaaatctctcattctctctactctgctaataggtatagaagcatgccatgttttcatttaaagcatcagcagaaggcaagaaagaaagaatactttgtattgattgattgattatttgggtcaatgccgcttgacagattctgaagaacaagaggcgagaatgttttaatctaccgtgctttgtatattagggagaacaaaaatgaattcttatatgtatatgatatttgaagttctagtgagagaagtagacttttttgaaagtgtgatgttgtagaatgaaaggaggacattgttggaaataatttatgcaaagaaaaagaagcaatagttctaaactcaatatgatattaaactccatacttattctataacacttccaaaacagtaaggataattttgcaatggtcttcaaccgattttcagtttttttatccaaaggaatatagactgggtgataagcatctctcaatctaaggaagatagtaaatgatatgaactcctctgagaagactttggtaccaaaaagaatattcaagattaatttgcttccctttcctactgggga

SEQ ID NO: 41337 - DNA, 985 bp, Homo sapiens
agagaaagatatttcttggcagctattataagcagtcttgcccatacagccttatcatcctgtagagctcgtgatactagaagtatcagtggtttaaaacaaaacaaaaagataccatgtgcagtctgaaaaatatctaaaggagccatgcaatgaaaattcctagtgtcctgcagcaaggttatgccatctgtagtagggaaccatgcacgctaaaaaagcagtttctggtatgcaccgagctctgctccagacagagcatgcaactgtagaacagtaagtggccctgtctctaaaactgaccaacatgagctggatacgctcagagcccttaagttatgagtttgggtrcatagtgggaggaaagatgattttcaatgattaagagttggtgacttccaaagttaaaataacatagaaatctctcattctctctactctgctaataggtatagaagcatgccatgttttcatttaaagcatcagcagaaggcaagaaagaaagaatactttgtattgattgattgattatttgggtcaatgccgcttgacagattctgaagaacaagaggcgagaatgttttaatctaccgtgctttgtatattagggagaacaaaaatgaattcttatatgtatatgatatttgaagttctagtgagagaagtagacttttttgaaagtgtgatgttgtagaatgaaaggaggacattgttggaaataatttatgcaaagaaaaagaagcaatagttctaaactcaatatgatattaaactccatacttattctataacacttccaaaacagtaaggataattttgcaatggtcttcaaccgattttcagtttttttatccaaaggaatatagactgggtgataagcatctctcaatctaaggaagatagtaaatgatatgaactcctctgagaagactttggtaccaaaaagaatattcaagattaatttgcttccctttcctactgggga

SEQ ID NO: 41338 - DNA, 985 bp, Homo sapiens
agagaaagatatttcttggcagctattataagcagtcttgcccatacagccttatcatcctgtagagctcgtgatactagaagtatcagtggtttaaaacaaaacaaaaagataccatgtgcagtctgaaaaatatctaaaggagccatgcaatgaaaattcctagtgtcctgcagcaaggttatgccatctgtagtagggaaccatgcacgctaaaaaagcagtttctggtatgcaccgagctctgctccagacagagcatgcaactgtagaacagtaagtggccctgtctctaaaactgaccaacatgagctggatacgctcagagcccttaagttatgagtttgggtacatagtgggaggaaagatgattttcaatgattaagagttggtgacttccaaagttaaaataacatagaaatctctcattctctctactctgctaataggtatagaagcatgccatgttttcatttaaagcatcagcagaaggcaagaaagaaagaatactttgtattgattgattgattatttgggtcaatgccgcttgacagattctgaagaacaagaggcgagaatgttttaatctaccgtgctttgtatattagggagaacaaaaatgaattcttatatgtatatgatatttgaagttctagtgagagaagtagacttttttgaaagtgtgatgttgtagaatgaaaggaggacattgttggaaataatttatgsaaagaaaaagaagcaatagttctaaactcaatatgatattaaactccatacttattctataacacttccaaaacagtaaggataattttgcaatggtcttcaaccgattttcagtttttttatccaaaggaatatagactgggtgataagcatctctcaatctaaggaagatagtaaatgatatgaactcctctgagaagactttggtaccaaaaagaatattcaagattaatttgcttccctttcctactgggga

SEQ ID NO: 41339 - DNA, 985 bp, Homo sapiens
agagaaagatatttcttggcagctattataagcagtcttgcccatacagccttatcatcctgtagagctcgtgatactagaagtatcagtggtttaaaacaaaacaaaaagataccatgtgcagtctgaaaaatatctaaaggagccatgcaatgaaaattcctagtgtcctgcagcaaggttatgccatctgtagtagggaaccatgcacgctaaaaaagcagtttctggtatgcaccgagctctgctccagacagagcatgcaactgtagaacagtaagtggccctgtctctaaaactgaccaacatgagctggatacgctcagagcccttaagttatgagtttgggtacatagtgggaggaaagatgattttcaatgattaagagttggtgacttccaaagttaaaataacatagaaatctctcattctctctactctgctaataggtatagaagcatgccatgttttcatttaaagcatcagcagaaggcaagaaagaaagaatactttgtattgattgattgattatttgggtcaatgccgcttgacagattctgaagaacaagaggcgagaatgttttaatctaccgtgctttgtatattagggagaacaaaaatgaattcttatatgtatatgatatttgaagttctagtgagagaagtagacttttttgaaagtgtgatgttgtagaatgaaaggaggacattgttggaaataatttatgcaaagaaaaagaagcaatagttctaaactcaatatgatattaaactccatacttattctataacacttccaaaacagtaaggataattttgcaatggtcttcaaccgattttcagtttttttatccaaaggaatatagactgggtgataagcatctctcaatctaaggaagatagtaaatgatatgamctcctctgagaagactttggtaccaaaaagaatattcaagattaatttgcttccctttcctactgggga

SEQ ID NO: 41340 - DNA, 985 bp, Homo sapiens
agagaaagatatttcttggcagctattataagcagtcttgcccatacagccttatcatcctgtagagctcgtgatactagaagtatcagtggtttaaaacaaaacaaaaagataccatgtgcagtctgaaaaatatctaaaggagccatgcaatgaaaattcctagtgtcctgcagcaaggttatgccatctgtagtagggaaccatgcacgctaaaaaagcagtttctggtatgcaccgagctctgctccagacagagcatgcaactgtagaacagtaagtggccctgtctctaaaactgaccaacatgagctggatacgctcagagcccttaagttatgagtttgggtacatagtgggaggaaagatgattttcaatgattaagagttggtgacttccaaagttaaaataacatagaaatctctcattctctctactctgctaataggtatagaagcatgccatgttttcatttaaagcatcagcagaaggcaagaaagaaagaatactttgtattgattgattgattatttgggtcaatgccgcttgacagattctgaagaacaagaggcgagaatgttttaatctaccgtgctttgtatattagggagaacaaaaatgaattcttatatgtatatgatatttgaagttctagtgagagaagtagacttttttgaaagtgtgatgttgtagaatgaaaggaggacattgttggaaataatttatgcaaagaaaaagaagcaatagttctaaactcaatatgatattaaactccatacttattctataacacttccaaaacagtaaggataattttgcaatggtcttcaaccgattttcagtttttttatccaaaggaatatagactgggtgataagcatctctcaatctaaggaagatagtaaatgatatgaactcctctgagaagaytttggtaccaaaaagaatattcaagattaatttgcttccctttcctactgggga

SEQ ID NO: 41341 - DNA, 619 bp, Homo sapiens
aagttggtaaattaggacaagcttggcctccagcaactcaatccagcctcctcctggagcatcagcacaaagtgggtccctctggccacacagaggaagcaacagttcaatcactgggtcctgaaccacttctaactccaaacaagaggcactgccatcaccaccttgtggtgcccaggaaatggagcagaaaacctggaacccagctgggaagcatcgggctccctctaagggtctacacggtgtctagcgagcgggcgggacagctgagaggaggggtgggcagtgtggggacaggaggctgggcctgtccagtagctttctccaggacaccagctctccacgtkctctgctgtctgggcaccgcagggggaatgaagactgagggagaccacgggaactgatgactagaaagaaggcacgatgcctgcatggggcccgcaggacacgtctgtgacccgactcgaccgcctccctcccagaaccaccgtgagccccaggcaagtgccgacgctgttccacctgtggctgagccaggtacctgtcccctctgcatgcacccgggccacccaccggggtggggaatggacagtgaagtccaaggatgacctgatgaaag

SEQ ID NO: 41342 - DNA, 1229 bp, Homo sapiens
tgggacagagaaaggacatgtttaacaaaaaggaaatctgaataaacatggacttcagttaataataaagtatcagtattggttcatttattttaacaagtgtaacttcctgaaggaaggtggtaaaactggggtagggtctatgggaactccatgcactatccttgcaagttttctgtagatctaaaatagttctaaaataaaaatttgattttaaaaatataattagtgaattaaacctgccactcctgggtattactgcttagaggggaccccaccatagcactcagggcacccagtccccccactgaaatggctcaccgggggcccagctctgccctcagggttctctccagaacatttctcatgaagttttcgggaagttactctctttctaccaaggttatgaggctggtagggtgtgagctctgggcagccagccaaccctgatactggccatacgggaggggaaggcctttgggggaggggaggggagagagggaaattgagtccctgattctacttggcgtctaaagccagatcaatctctggactatttagttatgagtcaaaacatagcctttgcttaagtttatttgacctgagcttccttcttctgtagctgaaagcattctcacacacctgagatacgagcaagatttgctagtcctgtgttttagacaggaaaagaaaaaagctttggagagccatgtatggtgtcatccaataatgaactgaaatttgtattgggcacctcatcagtgaaaagctcaaatctgtttgtttctgaagcaccgggcttccctgtgcacagtggccaaagctccttgttctttgtttattaggatggttgaggaccggcttgccttaaaataactaacgttttgctggtgggctattagatttgctcctaccactgtgctttgaaagggagtttatctgaaagcagcaatggccacgaccgcccgccccccgcccccmcccccgccgtccaccgatgtgtttcagaagcacagtcacagagctactcccgaacaaatgtcaaataaatgtagactgtggttgccaggaagacagccttggaacggtgctcgttctgtgcccacagggcagcccagtgcatgctttggctgtggggtgagcaggacccatgaaggctgcaaggaatgacacggggggagggtgctccaggcctctgcaattcttcggagatttcagctgcccccgga

SEQ ID NO: 41343 - DNA, 1229 bp, Homo sapiens
tgggacagagaaaggacatgtttaacaaaaaggaaatctgaataaacatggacttcagttaataataaagtatcagtattggttcatttattttaacaagtgtaacttcctgaaggaaggtggtaaaactggggtagggtctatgggaactccatgcactatccttgcaagttttctgtagatctaaaatagttctaaaataaaaatttgattttaaaaatataattagtgaattaaacctgccactcctgggtattactgcttagaggggaccccaccatagcactcagggcacccagtccccccactgaaatggctcaccgggggcccagctctgccctcagggttctctccagaacatttctcatgaagttttcgggaagttactctctttctaccaaggttatgaggctggtagggtgtgagctctgggcagccagccaaccctgatactggccatacgggaggggaaggcctttgggggaggggaggggagagagggaaattgagtccctgattctacttggcgtctaaagccagatcaatctctggactatttagttatgagtcaaaacatagcctttgcttaagtttatttgacctgagcttccttcttctgtagctgaaagcattctcacacacctgagatacgagcaagatttgctagtcctgtgttttagacaggaaaagaaaaaagctttggagagccatgtatggtgtcatccaataatgaactgaaatttgtattgggcacctcatcagtgaaaagctcaaatctgtttgtttctgaagcaccgggcttccctgtgcacagtggccaaagctccttgttctttgtttattaggatggttgaggaccggcttgccttaaaataactaacgttttgctggtgggctattagatttgctcctaccactgtgctttgaaagggagtttatctgaaagcagcaatggccacgaccgcccgccccccgccccccccsccgccgtccaccgatgtgtttcagaagcacagtcacagagctactcccgaacaaatgtcaaataaatgtagactgtggttgccaggaagacagccttggaacggtgctcgttctgtgcccacagggcagcccagtgcatgctttggctgtggggtgagcaggacccatgaaggctgcaaggaatgacacggggggagggtgctccaggcctctgcaattcttcggagatttcagctgcccccgga

SEQ ID NO: 41344 - DNA, 1229 bp, Homo sapiens
tgggacagagaaaggacatgtttaacaaaaaggaaatctgaataaacatggacttcagttaataataaagtatcagtattggttcatttattttaacaagtgtaacttcctgaaggaaggtggtaaaactggggtagggtctatgggaactccatgcactatccttgcaagttttctgtagatctaaaatagttctaaaataaaaatttgattttaaaaatataattagtgaattaaacctgccactcctgggtattactgcttagaggggaccccaccatagcactcagggcacccagtccccccactgaaatggctcaccgggggcccagctctgccctcagggttctctccagaacatttctcatgaagttttcgggaagttactctctttctaccaaggttatgaggctggtagggtgtgagctctgggcagccagccaaccctgatactggccatacgggaggggaaggcctttgggggaggggaggggagagagggaaattgagtccctgattctacttggcgtctaaagccagatcaatctctggactatttagttatgagtcaaaacatagcctttgcttaagtttatttgacctgagcttccttcttctgtagctgaaagcattctcacacacctgagatacgagcaagatttgctagtcctgtgttttagacaggaaaagaaaaaagctttggagagccatgtatggtgtcatccaataatgaactgaaatttgtattgggcacctcatcagtgaaaagctcaaatctgtttgtttctgaagcaccgggcttccctgtgcacagtggccaaagctccttgttctttgtttattaggatggttgaggaccggcttgccttaaaataactaacgttttgctggtgggctattagatttgctcctaccactgtgctttgaaagggagtttatctgaaagcagcaatggccacgaccgcccgccccccgcccccccccccgccgtccaccgatgtgtttcagaagcacagtcacagagctactcccgaacaaatgtcaaataaatgtagactgtggttgccaggaagacagccttggaacggtgctcgttctgtgcccacagggcagcccagtgcatgctttggctgtggggtgagcaggacccatgaaggctgcaaggaatgacacggggggagggygctccaggcctctgcaattcttcggagatttcagctgcccccgga

SEQ ID NO: 41345 - DNA, 1229 bp, Homo sapiens
tgggacagagaaaggacatgtttaacaaaaaggaaatctgaataaacatggacttcagttaataataaagtatcagtattggttcatttattttaacaagtgtaacttcctgaaggaaggtggtaaaactggggtagggtctatgggaactccatgcactatccttgcaagttttctgtagatctaaaatagttctaaaataaaaatttgattttaaaaatataattagtgaattaaacctgccactcctgggtattactgcttagaggggaccccaccatagcactcagggcacccagtccccccactgaaatggctcaccgggggcccagctctgccctcagggttctctccagaacatttctcatgaagttttcgggaagttactctctttctaccaaggttatgaggctggtagggtgtgagctctgggcagccagccaaccctgatactggccatacgggaggggaaggcctttgggggaggggaggggagagagggaaattgagtccctgattctacttggcgtctaaagccagatcaatctctggactatttagttatgagtcaaaacatagcctttgcttaagtttatttgacctgagcttccttcttctgtagctgaaagcattctcacacacctgagatacgagcaagatttgctagtcctgtgttttagacaggaaaagaaaaaagctttggagagccatgtatggtgtcatccaataatgaactgaaatttgtattgggcacctcatcagtgaaaagctcaaatctgtttgtttctgaagcaccgggcttccctgtgcacagtggccaaagctccttgttctttgtttattaggatggttgaggaccggcttgccttaaaataactaacgttttgctggtgggctattagatttgctcctaccactgtgctttgaaagggagtttatctgaaagcagcaatggccacgaccgcccgccccccgcccccccccccgccgtccaccgatgtgtttcagaagcacagtcacagagctactcccgaacaaatgtcaaataaatgtagactgtggttgccaggaagacagccttggaacggtgctcgttctgtgcccacagggcagcccagtgcatgctttggctgtggggtgagcaggacccatgaaggctgcaaggaatgacacggggggagggtgctccaggcctctgcaattmttcggagatttcagctgcccccgga

SEQ ID NO: 41346 - DNA, 559 bp, Homo sapiens
cgtcatatctccttactgccggcccagcggtcgcttaaacaggcaagaggctggctaagtggataaaacaccaacgcttaggaccctaagttagataagcgactgaatactggcgaggctggtaccagagcttgctcgacaggacattcacagccgaaagttggaacaaacgtgtccacgtccaaaaggcccggatgctccaggcaactttcagcgcggctcgaggcggcttccgggagtcggcgactcggaggcccggacgtcgggcgatcagccagtccggaccccaaggccggagaaagctcggccgcggcgccccgaaaagagaccccattcattctscccgctccagttttccgccgcgcggcccacgaggcggcggctccggagggcgcgcaaggggccggaagggccaccgctccttcccgccgcgcgcccctcccccgccaccgccgcgccggcccgcctgggcctccccggtcgccctcccaccgcctcaaccaccctgcgccccgatcgcgcccaacccccggcggggggctcccactcacttgtcttt

SEQ ID NO: 41347 - DNA, 676 bp, Homo sapiens
aggtgaagcttgcagtgagcggagttgcgccactgcgctgcaggctgggtgacagagcaagactccgtctcaaaaaaaaaaaagaaaagaaaagaaaagaaaagaaaattccaagtagctgggaatgtctactagcaaaacagacacaacagtcttcaaacaacccattactagaacttcttaaactaagggtataaaggagggagcccagggagggttgcctgtccagaagctggaccttggtgggaggaccggcagaacggtggagcctgacttcccaattaggcctttgcgaaccggattcagctttctcaggaccactggcgatcacagaaggacgataggagcatcaggacacaatcagctcctgtgyagcaaggaggagagacacggaggagcgatttgggatagacggtgattttggagatgactcctaatttcctagctgacagcagctgtgagcaccagacaaagacagggcagggggaatgggaatagcacgtggactaagaaccaatttaaggagaatggaggaaaaaatgtgtagccaaaattgtgaggttagagacaagttaggatatagaaagaaaaacatgagtgaaagaaataaatgtaatgattctatagtggggaaaaagaacagaaagcaggattttcacagatctatatattaatg

SEQ ID NO: 41348 - DNA, 676 bp, Homo sapiens
aggtgaagcttgcagtgagcggagttgcgccactgcgctgcaggctgggtgacagagcaagactccgtctcaaaaaaaaaaaagaaaagaaaagaaaagaaaagaaaattccaagtagctgggaatgtctactagcaaaacagacacaacagtcttcaaacaacccattactagaacttcttaaactaagggtataaaggagggagcccagggagggttgcctgtccagaagctggaccttggtgggaggaccggcagaacggtggagcctgacttcccaattaggcctttgcgaaccggattcagctttctcaggaccactggcgatcacagaaggacgataggagcatcaggacacaatcagctcctgtgcagcaaggaggagagacacggaggagcgatttgggatagacggtgattttggagatgactcctaatttcctagcygacagcagctgtgagcaccagacaaagacagggcagggggaatgggaatagcacgtggactaagaaccaatttaaggagaatggaggaaaaaatgtgtagccaaaattgtgaggttagagacaagttaggatatagaaagaaaaacatgagtgaaagaaataaatgtaatgattctatagtggggaaaaagaacagaaagcaggattttcacagatctatatattaatg

SEQ ID NO: 41349 - DNA, 739 bp, Homo sapiens
aagcaagtcagcataacagctgacccgtattaaatgttcaacatatgttggttattgctgtagaatcagttacaatcaccattctagtagaatggtagaatcagtggaatcaccatttggctgcctggaagaatcttaggggattttagaagtatttaatcagaacccagacatcaatctgctgtggaaacacagtcttgcccaagcctcactcaaagtttccaaactttttcrtatttcctgccatttcagtttccctctcagtcccaggatgagctcatgatccttccagtatttcaaagcagccctagtgatataggagttaaaaagaaatgatttaggcaggtagtgagtgtagacgtgtccttggtaaggttttctttttaatgaaaagcagcccccaaatcatttcttttctaccaaagagcagcctctaaaatcgagctgcagacatagataagcaagctggaatcctgcccaggtgaatgccggcagctatgccaataggaaaagtctacctggggggcaggtatattcaacacgaaggctctatcttcccttttctttgtcaaccacgtgtacaataaggaacagacaacatggtgccagccagatagagaacacatctgcataataaaaattaaggtggggtggccagcttctttgcacactacataaatagcacacctggtccaaccaatttttgggccctttgtaaatcagacaccgcctcttcaag

SEQ ID NO: 41350 - DNA, 1208 bp, Homo sapiens
gtgagatggcagctgctcactgtaccacctgggataccagtcaaacctgcattttccaccttttgtgttattggaactttamaaattaatacctctgtatgattaatgcctctgtatgattgtgaatattgttctagaatatataaattataattaaatgtagttaagggtcttgcttttggaaagaaactgagatgaatctttggtgaatagaggaatccacctgtgttgcaaatcttttctccctaactggcacatttgtattttctacctaattggcacatttgtatttctttagagaagaacagtgaataaaagaggtaaacaaaggaaagtaaattgcccttttcaagtctgccagctgtaacacccagaagagcgttttcttcttattcttctaagaatcaaggctcataggtatgtgctaaagagtaatgaggcaagttaagaaggtcttccgaaatactgctggggaaatttagcccattgttaccaaagacttacaaaaacttaaagccgtttcccttcattaaaaaacatgagcagtgaaacctactacattggctttctggaaaccaaagaaaaggaccttgctaaattactgttaagacaaacaataccttgtagactgaccttattaagtcagatggcagctttaggggtgagcctggaacctttctttaagtggtggtgggcacagtaataatgtagggaaatggaaaggtcctagccccccaaaacctccctacccactggcttgtgccttctagatcacattctaagctcgtgtactttgtttgaagatctgaatttcccaaatacatacactatgggcttcttaaatggaactctcaataaactgtgacagaaagatggttaatgagtaaggtggaacttattaaagagaaagaggcataattacagtttgaagacaggtttaaaaattaaagcagataggttgtagtggaaataaaatagaaatttcaaacattttaattaaattgtttaaattaaattacttcatttccattttaattaactttaattaacataatgtgacattatgagctttaaaaaaaatgtttttcccgatttccttgggaaatgtggcctaaggagaatggatggcactgcctctccgggtcctgtgtgctcccactgcctgagtcatgattctctccagcaccattctccacccctccagacag

SEQ ID NO: 41351 - DNA, 1208 bp, Homo sapiens
gtgagatggcagctgctcactgtaccacctgggataccagtcaaacctgcattttccaccttttgtgttattggaactttaaaaattaatacctctgtatgattaatgcctctgtatgattgtgaatattgttctagamtatataaattataattaaatgtagttaagggtcttgcttttggaaagaaactgagatgaatctttggtgaatagaggaatccacctgtgttgcaaatcttttctccctaactggcacatttgtattttctacctaattggcacatttgtatttctttagagaagaacagtgaataaaagaggtaaacaaaggaaagtaaattgcccttttcaagtctgccagctgtaacacccagaagagcgttttcttcttattcttctaagaatcaaggctcataggtatgtgctaaagagtaatgaggcaagttaagaaggtcttccgaaatactgctggggaaatttagcccattgttaccaaagacttacaaaaacttaaagccgtttcccttcattaaaaaacatgagcagtgaaacctactacattggctttctggaaaccaaagaaaaggaccttgctaaattactgttaagacaaacaataccttgtagactgaccttattaagtcagatggcagctttaggggtgagcctggaacctttctttaagtggtggtgggcacagtaataatgtagggaaatggaaaggtcctagccccccaaaacctccctacccactggcttgtgccttctagatcacattctaagctcgtgtactttgtttgaagatctgaatttcccaaatacatacactatgggcttcttaaatggaactctcaataaactgtgacagaaagatggttaatgagtaaggtggaacttattaaagagaaagaggcataattacagtttgaagacaggtttaaaaattaaagcagataggttgtagtggaaataaaatagaaatttcaaacattttaattaaattgtttaaattaaattacttcatttccattttaattaactttaattaacataatgtgacattatgagctttaaaaaaaatgtttttcccgatttccttgggaaatgtggcctaaggagaatggatggcactgcctctccgggtcctgtgtgctcccactgcctgagtcatgattctctccagcaccattctccacccctccagacag

SEQ ID NO: 41352 - DNA, 1208 bp, Homo sapiens
gtgagatggcagctgctcactgtaccacctgggataccagtcaaacctgcattttccaccttttgtgttattggaactttaaaaattaatacctctgtatgattaatgcctctgtatgattgtgaatattgttctagaatatataaattataattaaatgtagttaagggtcttgcttttggaaagaaactgagatgaatctttggtgaatagaggaatccacctgtgttgcaaatcttttctccctaactggcacatttgtattttctmcctaattggcacatttgtatttctttagagaagaacagtgaataaaagaggtaaacaaaggaaagtaaattgcccttttcaagtctgccagctgtaacacccagaagagcgttttcttcttattcttctaagaatcaaggctcataggtatgtgctaaagagtaatgaggcaagttaagaaggtcttccgaaatactgctggggaaatttagcccattgttaccaaagacttacaaaaacttaaagccgtttcccttcattaaaaaacatgagcagtgaaacctactacattggctttctggaaaccaaagaaaaggaccttgctaaattactgttaagacaaacaataccttgtagactgaccttattaagtcagatggcagctttaggggtgagcctggaacctttctttaagtggtggtgggcacagtaataatgtagggaaatggaaaggtcctagccccccaaaacctccctacccactggcttgtgccttctagatcacattctaagctcgtgtactttgtttgaagatctgaatttcccaaatacatacactatgggcttcttaaatggaactctcaataaactgtgacagaaagatggttaatgagtaaggtggaacttattaaagagaaagaggcataattacagtttgaagacaggtttaaaaattaaagcagataggttgtagtggaaataaaatagaaatttcaaacattttaattaaattgtttaaattaaattacttcatttccattttaattaactttaattaacataatgtgacattatgagctttaaaaaaaatgtttttcccgatttccttgggaaatgtggcctaaggagaatggatggcactgcctctccgggtcctgtgtgctcccactgcctgagtcatgattctctccagcaccattctccacccctccagacag

SEQ ID NO: 41353 - DNA, 1208 bp, Homo sapiens
gtgagatggcagctgctcactgtaccacctgggataccagtcaaacctgcattttccaccttttgtgttattggaactttaaaaattaatacctctgtatgattaatgcctctgtatgattgtgaatattgttctagaatatataaattataattaaatgtagttaagggtcttgcttttggaaagaaactgagatgaatctttggtgaatagaggaatccacctgtgttgcaaatcttttctccctaactggcacatttgtattttctacctaaytggcacatttgtatttctttagagaagaacagtgaataaaagaggtaaacaaaggaaagtaaattgcccttttcaagtctgccagctgtaacacccagaagagcgttttcttcttattcttctaagaatcaaggctcataggtatgtgctaaagagtaatgaggcaagttaagaaggtcttccgaaatactgctggggaaatttagcccattgttaccaaagacttacaaaaacttaaagccgtttcccttcattaaaaaacatgagcagtgaaacctactacattggctttctggaaaccaaagaaaaggaccttgctaaattactgttaagacaaacaataccttgtagactgaccttattaagtcagatggcagctttaggggtgagcctggaacctttctttaagtggtggtgggcacagtaataatgtagggaaatggaaaggtcctagccccccaaaacctccctacccactggcttgtgccttctagatcacattctaagctcgtgtactttgtttgaagatctgaatttcccaaatacatacactatgggcttcttaaatggaactctcaataaactgtgacagaaagatggttaatgagtaaggtggaacttattaaagagaaagaggcataattacagtttgaagacaggtttaaaaattaaagcagataggttgtagtggaaataaaatagaaatttcaaacattttaattaaattgtttaaattaaattacttcatttccattttaattaactttaattaacataatgtgacattatgagctttaaaaaaaatgtttttcccgatttccttgggaaatgtggcctaaggagaatggatggcactgcctctccgggtcctgtgtgctcccactgcctgagtcatgattctctccagcaccattctccacccctccagacag

SEQ ID NO: 41354 - DNA, 1208 bp, Homo sapiens
gtgagatggcagctgctcactgtaccacctgggataccagtcaaacctgcattttccaccttttgtgttattggaactttaaaaattaatacctctgtatgattaatgcctctgtatgattgtgaatattgttctagaatatataaattataattaaatgtagttaagggtcttgcttttggaaagaaactgagatgaatctttggtgaatagaggaatccacctgtgttgcaaatcttttctccctaactggcacatttgtattttctacctaattggcacatttgtatttctttagagaagaacagtgaataaaagaggtaaacaaaggaaagtaaattgcccttttcaagtctgccagctgtaacacccagaagagcgttttcttcttattcttctaagaatcaaggctcataggtatgtgctaaagagtaatgaggcaagttaagaaggtcttccgaaatactgctggggaaatttagcccatygttaccaaagacttacaaaaacttaaagccgtttcccttcattaaaaaacatgagcagtgaaacctactacattggctttctggaaaccaaagaaaaggaccttgctaaattactgttaagacaaacaataccttgtagactgaccttattaagtcagatggcagctttaggggtgagcctggaacctttctttaagtggtggtgggcacagtaataatgtagggaaatggaaaggtcctagccccccaaaacctccctacccactggcttgtgccttctagatcacattctaagctcgtgtactttgtttgaagatctgaatttcccaaatacatacactatgggcttcttaaatggaactctcaataaactgtgacagaaagatggttaatgagtaaggtggaacttattaaagagaaagaggcataattacagtttgaagacaggtttaaaaattaaagcagataggttgtagtggaaataaaatagaaatttcaaacattttaattaaattgtttaaattaaattacttcatttccattttaattaactttaattaacataatgtgacattatgagctttaaaaaaaatgtttttcccgatttccttgggaaatgtggcctaaggagaatggatggcactgcctctccgggtcctgtgtgctcccactgcctgagtcatgattctctccagcaccattctccacccctccagacag

SEQ ID NO: 41355 - DNA, 1208 bp, Homo sapiens
gtgagatggcagctgctcactgtaccacctgggataccagtcaaacctgcattttccaccttttgtgttattggaactttaaaaattaatacctctgtatgattaatgcctctgtatgattgtgaatattgttctagaatatataaattataattaaatgtagttaagggtcttgcttttggaaagaaactgagatgaatctttggtgaatagaggaatccacctgtgttgcaaatcttttctccctaactggcacatttgtattttctacctaattggcacatttgtatttctttagagaagaacagtgaataaaagaggtaaacaaaggaaagtaaattgcccttttcaagtctgccagctgtaacacccagaagagcgttttcttcttattcttctaagaatcaaggctcataggtatgtgctaaagagtaatgaggcaagttaagaaggtcttccgaaatactgctggggaaatttagcccattgttaccaaagacttacaaaaacttaaagccgtttcccttcattaaaaaacatgagcagtgaaacctactacattggctttctggaaaccaaagaaaaggaccttgctaaattactgttaagacaaacaataccttgtagactgaccttattaagtcagatggcagctttaggggtgagcctggaacctttctttaagtggtggtgggcacagtaataatgtagggaaatggaaaggtcctagccccccaaaacctcccyacccactggcttgtgccttctagatcacattctaagctcgtgtactttgtttgaagatctgaatttcccaaatacatacactatgggcttcttaaatggaactctcaataaactgtgacagaaagatggttaatgagtaaggtggaacttattaaagagaaagaggcataattacagtttgaagacaggtttaaaaattaaagcagataggttgtagtggaaataaaatagaaatttcaaacattttaattaaattgtttaaattaaattacttcatttccattttaattaactttaattaacataatgtgacattatgagctttaaaaaaaatgtttttcccgatttccttgggaaatgtggcctaaggagaatggatggcactgcctctccgggtcctgtgtgctcccactgcctgagtcatgattctctccagcaccattctccacccctccagacag

SEQ ID NO: 41356 - DNA, 1431 bp, Homo sapiens
ttcagtactaaaatatacactcaaaaattgaggatagagactatattagatactactcacccagcatgtagtatagacctgccaccaaataaactatttaaaacaaatttgcttaaaggagggcatatttcagtcatctggtctctgtactggctaactattcaagtccaccgttgttaaaaacctagtcgaccacacccatgttaataaccttagtttgccacactcatgatctagaaaatgaactgtttttttcatcagtttatattccctatattcttcccttaaattgtttcttaatgctatcactctgtttttattatttattccaagtatatacaaaaagcttccttccattacctttggtttgaattgatttcctttcaatccgttttctcagagagtcagagatgtcagttctgcatcaaactttatcatcagttcataaatatcaggagttttaaagactttcactttatttacatacacataaatatttattaagaaaacaccaatatttagtctttgccttgcacagaagggggttaaaaacaattttatttttccttggatgaagagatacagtgtataaagaaacaggcctttttaatatggcttaagtttatggctctgattggagggtaagttgtctcaaatgagaggagaattttaaataaacacatctttgctctctactcttgacccttctcccagacccatggttctcccaaggtctcrctagacctggtgtgcagcagcagcaacatgtataaagagcttcccaaaggtaagggcaaaaatcatttccaactaccccaggacttcccttcccagagtttcgggggtgaggctgaaaatttcaacttttaatcatggcttggcctttctggtgatcagttctcatccaggagcccaagaaagtcaaaagtcacttcattagaacaaaagacaattttgtcacagagaacattttattaggagctctacatcaggaaccacggtcaaagagcaaaaattagaacaataggtgaacctagcatcctaattgctcaagaaattacagaggttttagtaggtctttgccaggaactggtagcagagaccaaatatacattttttattatgtcacaatgtaaaaaccaggattcctatacttcaagaaggcctagaagtttattggatttatgtgcttgagaacaaaaggttggagggttgaaggcactgctgagggaattcttaataaaactaagcaagaggtttatgtttggaatgaaagaaagtgaattcaggagaaagatacttactttgagataaaaactattagggtcaaaatattgccattgagaacagtgagcaagtgtgtgccagtgtcagatattgtatgcatccaaagacaatggctttcaaggagaaattctgaaggaagaggaa

SEQ ID NO: 41357 - DNA, 1288 bp, Homo sapiens
agattggaaaatagcaatggaattgtgagttgagcctagttacattgcaatgactgatattgtaaatagcaagaagtcaattaaattgactaaattatagttcagttatttcccccgtgtactaagctctgatgccattaagcatttaagtcatgagtaccatgcactcttgctccaggtgtgcattaaatcagctgcaaatcaaagagcacccaaataaagttgaattaaggagaggaaaaaagtgggggagataaattcattgagttaataaacaaaaattgcaagacatagatgagtttttttgtatagttggaaccaaggttaaatatatatcaacgagatttattttttccctatccattgctactttctatgttatggctccatcttcggatcagtttttccatcatgatgtcatgaaaactacaacagatccaaagtcctatccttccaagttcatggccagtaaaaaagaacacatttttcttctccagcagtctgccaaaatccttatgatgttttattagctatgactgggtcacattcccatctttcgacaaattactgagaccagtagaaggcagtactctgactggtcatgctggagtcaaataagtgcccctgaaatcatagctggaatcaatagtactataatgacataggccaagcacagaagaaagattgaaccattgaggaaaatcttgttaagaaaagaaacaggaatagattaaaagaacagaaatcagcaaacgtttaccacaaaaatggattaaaacaataagaattgaacgtgtcaacaaaatgtattcatattttctaagtctagtttagctttttaaaattaagatttaacaatcttagaaaaacagacttgttcaccaaaatacaatgaattgtataaaggaagtggaaaaataatgaaacaggtcagcgggacactaataggtagctctcaacaagctactgcaatgaagtaaatatttgggtacttgcaaaagttttattatgaaagcataatataatttcattagcataaaacagaaacagttactaaggttattgacaaaagaaggttaagtacccagtcacgtacagagtagtctgggatacaaactcattttccatatattgtaactaaatggcaaagcaaagaactgaagatacatatctaatttggtcaaggcagcactttaggatttgtctggggttggtgtagacagctgaaaacatatggaataaaaattgtgtaattaagaaaaaaaraaaattagattatcttatatga

SEQ ID NO: 41358 - DNA, 1288 bp, Homo sapiens
agattggaaaatagcaatggaattgtgagttgagcctagttacattgcaatgactgatattgtaaatagcaagaagtcaattaaattgactaaattatagttcagttatttcccccgtgtactaagctctgatgccattaagcatttaagtcatgagtaccatgcactcttgctccaggtgtgcattaaatcagctgcaaatcaaagagcacccaaataaagttgaattaaggagaggaaaaaagtgggggagataaattcattgagttaataaacaaaaattgcaagacatagatgagtttttttgtatagttggaaccaaggttaaatatatatcaacgagatttattttttccctatccattgctactttctatgttatggctccatcttcggatcagtttttccatcatgatgtcatgaaaactacaacagatccaaagtcctatccttccaagttcatggccagtaaaaaagaacacatttttcttctccagcagtctgccaaaatccttatgatgttttattagctatgactgggtcacattcccatctttcgacaaattactgagaccagtagaaggcagtactctgactggtcatgctggagtcaaataagtgcccctgaaatcatagctggaatcaatagtactataatgacataggccaagcacagaagaaagattgaaccattgaggaaaatcttgttaagaaaagaaacaggaatagattaaaagaacagaaatcagcaaacgtttaccacaaaaatggattaaaacaataagaattgaacgtgtcaacaaaatgtattcatattttctaagtctagtttagctttttaaaattaagatttaacaatcttagaaaaacagacttgttcaccaaaatacaatgaattgtataaaggaagtggaaaaataatgaaacaggtcagcgggacactaataggtagctctcaacaagctactgcaatgaagtaaatatttgggtacttgcaaaagttttattatgaaagcataatataatttcattagcataaaacagaaacagttactaaggttattgacaaaagaaggttaagtacccagtcacgtacagagtagtctgggatacaaactcattttccatatattgtaactaaatggcaaagcaaagaactgaagatacatatctaatttggtcaaggcagcactttaggatttgtctggggttggtgtagacagctgaaaacatatggaataaaaattgtgtaattaagaaaaaaagaaaattarattatcttatatga

SEQ ID NO: 41359 - DNA, 845 bp, Homo sapiens
aaataaatgcgacacttcattaagcaaggtaatcaaatttaagcagttcacttttgtgttaataactgagaccttcctgtttctattgctctagagatccacctactattatgaatgcagattctaagaataaagcacccgggtatttcctaaggggtgggagagagtacttttggaagcaaccaataatgacattaataacaacaagcaatttgctgtaatgaaacattttcatatctggacttttttcgggagaggagggggcatcagttatgtccattagaatgggaatgttggaacatcttggagtatctgttattaggctaacagaatactttcaaagactgaatttcrggaggaaattttttatgctatttttgtatttgccatctggaatgacactgcaagctggcaaatacaaaaacaatgtgagatatttccatcacatagcatttgttatggattcatcatggaatgtgagtctctgaacatcactccaataactgtaattatcccaacttgaccttcttgaccggttcaaacaacttcagtgctgttaatgtttgtgttcctgtggaggaaggagatgcctgttcccaattccaaggaagctagctgagatcctgactcaaagcttcaagcacatgcttcccccatggacacagctagctatcatgcctatttatgggcagcttatttccaattgacaaatgtctagtagagtatcagaaacaaataaccaaaatatatggaatggatcatgccataagttgtccaatatagaggggcaacctctctgttctgctgacaatactacacattttcaacacatgaaagtgttagct

SEQ ID NO: 41360 - DNA, 845 bp, Homo sapiens
aaataaatgcgacacttcattaagcaaggtaatcaaatttaagcagttcacttttgtgttaataactgagaccttcctgtttctattgctctagagatccacctactattatgaatgcagattctaagaataaagcacccgggtatttcctaaggggtgggagagagtacttttggaagcaaccaataatgacattaataacaacaagcaatttgctgtaatgaaacattttcatatctggacttttttcgggagaggagggggcatcagttatgtccattagaatgggaatgttggaacatcttggagtatctgttattaggctaacagaatactttcaaagactgaatttcgggaggaaattttttatgctatttttgtatttgccatctggaatgacactgcaagctggcaaatacaaaaacaatgtgagatatttccatcacatagcatttgttatggattcatcatggaatgtgagtctctgaacatcactccaataactgtaattatcccaacttgaccttcttgaccggttcaaacaacttcagtgctgtkaatgtttgtgttcctgtggaggaaggagatgcctgttcccaattccaaggaagctagctgagatcctgactcaaagcttcaagcacatgcttcccccatggacacagctagctatcatgcctatttatgggcagcttatttccaattgacaaatgtctagtagagtatcagaaacaaataaccaaaatatatggaatggatcatgccataagttgtccaatatagaggggcaacctctctgttctgctgacaatactacacattttcaacacatgaaagtgttagct

SEQ ID NO: 41361 - DNA, 586 bp, Homo sapiens
agaacacattataccataggccagccctggaaaaactcagtagaacatttatagtttaaatgtcatcatatttttttaaaaaagagataaataaaaccaaaacaggtatatataacacaaacttgggagcaaagaagagcaaataagactttttaaaaggatgaaaataataaaataaaactgaaattaatgaacttgaaaataaaaatagttgaaaggcttatccaaaaggtgtgtatgtaaaaatacagatgcaaatactttgtgagtcagattgtaaaaaagatgtaaaagtacaagacagtgagtgcttaaggatatataatggcaaagaagaagagatctggagaatcataaaagaagactttgtgcaactctrtgacaatataatcaaaatattagagaaaatgttttctgtcaaaatataacttatctaaattggcatatacagacattttaaaataggctgatcaccaaagaagatattagaaagatgattaaacccattaaagccagatagattatttcatagattaaatgactgactaaaaatactaactttcaccacagtgagataccacttatt

SEQ ID NO: 41362 - DNA, 1770 bp, Homo sapiens
tcaaatattacataacaaaatttttgagtaccaagaggaaactttaatttatgaagagctaagaatctaataaagtaatctatggggcattatrctgccttatattctatgagttatgtaaggctttttaacagtaaactttaccaatccctattatcacactatgtgctgactttagataataacctctttaaaatgccattaaaatatgtcttggggatgtcggaaagtagttatgaatttgtgaaatgtttttaacattgagtaaatgcaggtatatttcacaagagagagagaaatagcatttattctggatggagaggaaaagtatatcaggaaattcactaaattgaggttcaaaatttccattttcttctgacttatgtgatgaagtgcttgaagaaacctgagcaaataaccactaataccaagttctttcttagtaataatgattctttctttgtagttatatggccaactaccaaacaaatttctgagataggccttgattctaggattcttttgatgctttaaatacggattttagatgttccaagtcacgggactttttgagcagccactgctctaatactttttcaatgctaattttcacttgatgctgtgctagtctgtaactaaaatgatataaattgcttttccttctaaactgtagtgcatgatggagtttcaaaatttatagtcaatgcagtgttcattggtatactcaattaaaaaactgcaacttttaaaaagaagagctacagtagactttgggaactcaaagatattgttaattattttttctaacaaatatttattgaatacctgccttattccaggaactgttctggcactaagaacatacaaatttcttcaactcataaaatttttaaactttttgagagaaactagttcccctactcttgctggggaaaaaaaaaaagtcctgacaaattgggtgagtgctttgcaacgcatacattgcaatgcatacagaccaaaggtagttttcaagaatatataaagagttgctacaaataaacaagagaagactaataatgctttagataaatggataaaagacataatgagataattcatagaaaatgaaaccttaatatccgataaatatatgaaaaatatcctcacaagaagatgggtaaatgaaaatcaaaactacatgagacgttgtttttacacacatcacattggcaaagattaaaataaaatgtttgtgacagatgttggctagaaagaggagaaatgggaaatgctgatggaagtgtaaaatggtaacatggctcaaaatactttgaatagcactttgccaatatcttttcatttatttatttatttatgtatttattttttgaggcgcagtctcactctgttgcccaggctggaatgcaatggtgcaatcttggctcacagcaacctctgcctcccggttcaagtgattctcctgcctcagcctcccaagtagctgggactacaggtgtgccccagcacaaccggctaatttttctatttttagtagagatggggtttcatcatgctggtcaggctggtcttgaactcctgaactcaggtgatccacccaccctgacctcccaaagtgctgccaatatcttttcaagttgaaggtaaaaatagacttaagtaaggagttccacatttacagacatatcctgacttacatgcataaaaagtcatatatcatcagatgttacaatagaaacaaaaatcactctgaaacactgagatatggac

SEQ ID NO: 41363 - DNA, 1770 bp, Homo sapiens
tcaaatattacataacaaaatttttgagtaccaagaggaaactttaatttatgaagagctaagaatctaataaagtaatctatggggcattatactgccttatattctatgagttatgtaaggctttttaacagtaaactttaccaatccctattatcacactatgtgctgactttagataataacctctttaaaatgccattaaaatatgtcttggggatgtcggaaagtagttatgaatttgtgaaatgtttttaacattgagtaaatgcaggtatatttcacaagagagagagaaatagcatttattctggatggagaggaaaagtatatcaggaaattcactaaattgaggttcaaaatttccattttcttctgacttatgtgatgaagtgcttgaagaaacctgagcaaataaccactaataccaagttctttcttagtaataatgattctttctttgtagttatatggccaactaccaaacaaatttctgagayaggccttgattctaggattcttttgatgctttaaatacggattttagatgttccaagtcacgggactttttgagcagccactgctctaatactttttcaatgctaattttcacttgatgctgtgctagtctgtaactaaaatgatataaattgcttttccttctaaactgtagtgcatgatggagtttcaaaatttatagtcaatgcagtgttcattggtatactcaattaaaaaactgcaacttttaaaaagaagagctacagtagactttgggaactcaaagatattgttaattattttttctaacaaatatttattgaatacctgccttattccaggaactgttctggcactaagaacatacaaatttcttcaactcataaaatttttaaactttttgagagaaactagttcccctactcttgctggggaaaaaaaaaaagtcctgacaaattgggtgagtgctttgcaacgcatacattgcaatgcatacagaccaaaggtagttttcaagaatatataaagagttgctacaaataaacaagagaagactaataatgctttagataaatggataaaagacataatgagataattcatagaaaatgaaaccttaatatccgataaatatatgaaaaatatcctcacaagaagatgggtaaatgaaaatcaaaactacatgagacgttgtttttacacacatcacattggcaaagattaaaataaaatgtttgtgacagatgttggctagaaagaggagaaatgggaaatgctgatggaagtgtaaaatggtaacatggctcaaaatactttgaatagcactttgccaatatcttttcatttatttatttatttatgtatttattttttgaggcgcagtctcactctgttgcccaggctggaatgcaatggtgcaatcttggctcacagcaacctctgcctcccggttcaagtgattctcctgcctcagcctcccaagtagctgggactacaggtgtgccccagcacaaccggctaatttttctatttttagtagagatggggtttcatcatgctggtcaggctggtcttgaactcctgaactcaggtgatccacccaccctgacctcccaaagtgctgccaatatcttttcaagttgaaggtaaaaatagacttaagtaaggagttccacatttacagacatatcctgacttacatgcataaaaagtcatatatcatcagatgttacaatagaaacaaaaatcactctgaaacactgagatatggac

SEQ ID NO: 41364 - DNA, 1770 bp, Homo sapiens
tcaaatattacataacaaaatttttgagtaccaagaggaaactttaatttatgaagagctaagaatctaataaagtaatctatggggcattatactgccttatattctatgagttatgtaaggctttttaacagtaaactttaccaatccctattatcacactatgtgctgactttagataataacctctttaaaatgccattaaaatatgtcttggggatgtcggaaagtagttatgaatttgtgaaatgtttttaacattgagtaaatgcaggtatatttcacaagagagagagaaatagcatttattctggatggagaggaaaagtatatcaggaaattcactaaattgaggttcaaaatttccattttcttctgacttatgtgatgaagtgcttgaagaaacctgagcaaataaccactaataccaagttctttcttagtaataatgattctttctttgtagttatatggccaactaccaaacaaatttctgagataggccttgattctaggattcttttgatgctttaaatacggattttagatgttccaagtcacgggactttttgagcagccactgctctaatactttttcaatgctaattttcacttgatgctgtgctagtctgtaactaaaatgatataaattgcttttccttctaaactgtagtgyatgatggagtttcaaaatttatagtcaatgcagtgttcattggtatactcaattaaaaaactgcaacttttaaaaagaagagctacagtagactttgggaactcaaagatattgttaattattttttctaacaaatatttattgaatacctgccttattccaggaactgttctggcactaagaacatacaaatttcttcaactcataaaatttttaaactttttgagagaaactagttcccctactcttgctggggaaaaaaaaaaagtcctgacaaattgggtgagtgctttgcaacgcatacattgcaatgcatacagaccaaaggtagttttcaagaatatataaagagttgctacaaataaacaagagaagactaataatgctttagataaatggataaaagacataatgagataattcatagaaaatgaaaccttaatatccgataaatatatgaaaaatatcctcacaagaagatgggtaaatgaaaatcaaaactacatgagacgttgtttttacacacatcacattggcaaagattaaaataaaatgtttgtgacagatgttggctagaaagaggagaaatgggaaatgctgatggaagtgtaaaatggtaacatggctcaaaatactttgaatagcactttgccaatatcttttcatttatttatttatttatgtatttattttttgaggcgcagtctcactctgttgcccaggctggaatgcaatggtgcaatcttggctcacagcaacctctgcctcccggttcaagtgattctcctgcctcagcctcccaagtagctgggactacaggtgtgccccagcacaaccggctaatttttctatttttagtagagatggggtttcatcatgctggtcaggctggtcttgaactcctgaactcaggtgatccacccaccctgacctcccaaagtgctgccaatatcttttcaagttgaaggtaaaaatagacttaagtaaggagttccacatttacagacatatcctgacttacatgcataaaaagtcatatatcatcagatgttacaatagaaacaaaaatcactctgaaacactgagatatggac

SEQ ID NO: 41365 - DNA, 1770 bp, Homo sapiens
tcaaatattacataacaaaatttttgagtaccaagaggaaactttaatttatgaagagctaagaatctaataaagtaatctatggggcattatactgccttatattctatgagttatgtaaggctttttaacagtaaactttaccaatccctattatcacactatgtgctgactttagataataacctctttaaaatgccattaaaatatgtcttggggatgtcggaaagtagttatgaatttgtgaaatgtttttaacattgagtaaatgcaggtatatttcacaagagagagagaaatagcatttattctggatggagaggaaaagtatatcaggaaattcactaaattgaggttcaaaatttccattttcttctgacttatgtgatgaagtgcttgaagaaacctgagcaaataaccactaataccaagttctttcttagtaataatgattctttctttgtagttatatggccaactaccaaacaaatttctgagataggccttgattctaggattcttttgatgctttaaatacggattttagatgttccaagtcacgggactttttgagcagccactgctctaatactttttcaatgctaattttcacttgatgctgtgctagtctgtaactaaaatgatataaattgcttttccttctaaactgtagtgcatgatggagtttcaaaatttatagtcaatgcagtgttcattggtatactcaattaaaaaactgcaacttttaaaaagaagagctacagtagactttgggaactcaaagatattgttaattattttttctaacaaatatttattgaatacctgccttattccaggaactgttctggcactaagaacatacaaatttcttcaactcataaaatttttaaactttttgagagaaactagttcccctactcttgctggggaaaaaaaaaaagtcctgacaaattgggtgagtgctttgcaacgcatacattgcaatgcatacagaccaaaggtagttttcaagaatatataaagagttgctacaaataaacaagagaagactaataatgctttagataaatggataaaagacataatgagataattcatagaaaatgaaaccttaatatccgataaatatatgaaaaatatcctcacaagaagatgggtaaatgaaaatcaaaactacatgagacgttgtttttacacacatcacattggcaaagattaaaataaaatgtttgtgacaratgttggctagaaagaggagaaatgggaaatgctgatggaagtgtaaaatggtaacatggctcaaaatactttgaatagcactttgccaatatcttttcatttatttatttatttatgtatttattttttgaggcgcagtctcactctgttgcccaggctggaatgcaatggtgcaatcttggctcacagcaacctctgcctcccggttcaagtgattctcctgcctcagcctcccaagtagctgggactacaggtgtgccccagcacaaccggctaatttttctatttttagtagagatggggtttcatcatgctggtcaggctggtcttgaactcctgaactcaggtgatccacccaccctgacctcccaaagtgctgccaatatcttttcaagttgaaggtaaaaatagacttaagtaaggagttccacatttacagacatatcctgacttacatgcataaaaagtcatatatcatcagatgttacaatagaaacaaaaatcactctgaaacactgagatatggac

SEQ ID NO: 41366 - DNA, 684 bp, Homo sapiens
tgaaaccaggagtttggaccagcctcagcaacggagtgagacctgatctccgcaaaaaaattttaaaaaattatttgagaagttgaggtgggagaattgcttgagcccaggaatttgagaccaggctagaaaacatagcaatactgtgtctctacaaaaagttaaaaaattagctgagtgtgctagtgcacacctgtggtcccacctactcaggtaattatggtgaaaggatcgattgaggccaggaggtagaggctgcagcgagccatgtttatgccgctgtgctccagcttgagtgacagagtaagaccctgtctcaaacaaactctagaaagaaaatgtctattcccaatagcaaaaagcaaaacaaaacgaaaaacaaacaaaraactggaaaagtgtaagaagggatttaacaagacaaaatcagttttatgaagctactaaattggatggatgaatacaaaatattgtctgaacaaaggtaaaggcatcgtatgttctttaatgaaaggttttttttaaaaaaaatattaatactccaaaataaagatatgaaataatgtaataatgtaattgggattctaataagaatctcaatgtattttttcactggaaaaattaactttcatttcataataataaatgctttgaaatatccaagaaaattcaggaaacaaagtg

SEQ ID NO: 41367 - DNA, 684 bp, Homo sapiens
tgaaaccaggagtttggaccagcctcagcaacggagtgagacctgatctccgcaaaaaaattttaaaaaattatttgagaagttgaggtgggagaattgcttgagcccaggaatttgagaccaggctagaaaacatagcaatactgtgtctctacaaaaagttaaaaaattagctgagtgtgctagtgcacacctgtggtcccacctactcaggtaattatggtgaaaggatcgattgaggccaggaggtagaggctgcagcgagccatgtttatgccgctgtgctccagcttgagtgacagagtaagaccctgtctcaaacaaactctagaaagaaaatgtctattcccaatagcaaaaagcaaaacaaaacgaaaaacaaacaaaaaactggaaaagtgtaagaagggatttaacaagacaaaatcagttttatgaagctactaaattggatggatgaatacaaaatattgtctgaacaaaggtaaaggcatcgtatgttctttaatgaaaggttttttttwaaaaaaatattaatactccaaaataaagatatgaaataatgtaataatgtaattgggattctaataagaatctcaatgtattttttcactggaaaaattaactttcatttcataataataaatgctttgaaatatccaagaaaattcaggaaacaaagtg

SEQ ID NO: 41368 - DNA, 570 bp, Homo sapiens
atacattcaccatgcatttatcaagggcttattgtctgctaatcactgtgccaagttttggagacataaatatgctaaggcaaaaatcccttctctcaagaaactcactgtctgtggaagayagaactatgtaaacaggtgtgtaacactgtaataaatatcatagtaggaaaatagaatcagttacgagttcacacatttccttttggaacgtgagcctgctacctcttttgtttgtttgtttgttttacagcccacatactcagaggtaagaatggctttcatattttaattgtttaaaagaattcaaaagaagaataatagtttatgacaagtgaaactgatatgaagctaacatttcaatgttcataaataaaattttattgggacacagttcttcccattcttggtgtattatctatggcttttttcatgctatatttagatagtagaatacttacgacagagatgctatggtccttgaagcctaaaatgcttattatttagccctttataaataaatttatcaacccttgtataaggtgcttttggaataatgaagaaagggtg

SEQ ID NO: 41369 - DNA, 707 bp, Homo sapiens
ccatcggggccaggggtgacctgccgtttcctgagctctcagccactgtccctcggggcaggtagtgtcactgccaggggcccacccccagcctccggggcatctgtgaggccgtgaaagcagggaggcaggcctcccccagggaaaagcagctgcaggaagagacaaatgcccaagaggggcatggactacctgcctttgaatccttggagggaatcctctgcaaagggtatggctgtcagctcaggatgatgggcagccttggtgagagtctgcctcactttgccgaggcctgaagtgcgtggaggggcccgggagtggctctggtattgagggctggcctggtctatggccacrtgcatacccgagtttgctttgaaaactagtgcctagcagacatttagtactcactaaacatgggttgaattgagctctaaacgatgagtgtccttgggacgtctggtctctctgggctctgtcctcacctgagctcagctgggctctgcataggaagtgggctatcgctgtggcctgtcctcttctccttgtgtggctgccacggcttctcaaagcacataggtgccaggagcactcacaaagaagaggacagccaggaggagaaggggaaggggacaagcccagagctggcactgccgtcaccgtgagcagggctgccgtttgcacactaggagcggtcaccacaaacc

SEQ ID NO: 41370 - DNA, 579 bp, Homo sapiens
tacttgtgtgcagtacctgtgtgcctactgtgtgccatacctgtgtttggtatatgtgcgcagtaatgtgtgtggcccccgtggccagtgcccgtgtgggcccagccctgaggccatacctgtgtgcaggcgaatgtgcaccttgaggctgccagaggtggagaagctcttcatgcagtactggcacttgaacgccttgatgccggtgtgcgtcttgatgtgcgctgtcagcgtgctcttcacggcgaaggcgcggaagcactgcgggcacttgaagggcttctcgtgggtgtggatgcggatgtggcggaccaggtcgctgggcttgcggaactccttggcgcagtagggacacacatgccagcgcacgccgttctcctcgcggatggagcctgtgaagggagaggacacgtcccgcttggcctggacaccccgcctagggtcaggtccaggaccccctgtggtccccacagaaagctgcacgcatgatcagttatgggaaagcytggaattcccaggatcactgacattatcgagggctaggagttaatctcgctgaaacccctaacagtcggggaa

SEQ ID NO: 41371 - DNA, 1083 bp, Homo sapiens
atgctgctggagagacaacctgggtttaatttagaactcttcagcacacagatggcaatgaagccatccaagaggtgaaaytgcatgtgtaaaaaatgcattgcagagaaagcagccctgactgccatttactgggagtgggtcaggcattgagggccgaggcactctcttgttaccatagagagtttcacagacaccgcatcaggcaaggccactctgtgatgagcataggaaagatgagcttgagaacactggccaggccatgcagatggccccatgccctccttcctgggctcgtctacacactgtggcttctttaacaccttggcccgttcacgctctctactctgtaaatgaaatcatagagagaacaatcatagttttcccagctattgacagtgcccagtctggagcaaacccattcttccttgaaccctaccccaaataccctaatatgaccccaagtcctctaataatccctatttcttcctcttaccaagacaccctgtgcccctccgggtgtgctcttgttgttgcagtgaaccagtaactcacctttacctaagacagggccacggggaggaggacggagaagttgccacaggtggaaagaattcagcagtgtgggttctttcccctaggacagagcttctcagactacaggtaatcttcagtgttgaaattatatttgtttagggaaatataagatgaatttggagcaggcggggaccagatcatgaaaggtatcttatttaatgccatgatattttgattgtatgagaggtttggagagtgaggaggtattgcagcgtcttatctagggaggtggcatggtcactttagagaccctcttctggaagcacctacatgtgcatcaaggtcacccaaagatattttaaaaaatgcagaagttgatccagtggagctgagatcctgtgtttcacaaagttccaggtggggctaggatggtggttcttgaggggtggtttctgcatcagcaatgtcagcatcacctggaaatttgtaggagttgcagattatcacctgacaccagaccacactgaatgagaaagttgggacctg

SEQ ID NO: 41372 - DNA, 1083 bp, Homo sapiens
atgctgctggagagacaacctgggtttaatttagaactcttcagcacacagatggcaatgaagccatccaagaggtgaaattgcatgtgtaaaaaatgcattgcagagaaagcagccctgactgccatttactgggagtgggtcaggcattgagggccgaggcactctcttgttaccatagagagtttcacagacaccgcatcaggcaaggccactctgtgatgagcataggaaagatgagcttgagaacactggccaggccatgcagatggccccatgccctccttccygggctcgtctacacactgtggcttctttaacaccttggcccgttcacgctctctactctgtaaatgaaatcatagagagaacaatcatagttttcccagctattgacagtgcccagtctggagcaaacccattcttccttgaaccctaccccaaataccctaatatgaccccaagtcctctaataatccctatttcttcctcttaccaagacaccctgtgcccctccgggtgtgctcttgttgttgcagtgaaccagtaactcacctttacctaagacagggccacggggaggaggacggagaagttgccacaggtggaaagaattcagcagtgtgggttctttcccctaggacagagcttctcagactacaggtaatcttcagtgttgaaattatatttgtttagggaaatataagatgaatttggagcaggcggggaccagatcatgaaaggtatcttatttaatgccatgatattttgattgtatgagaggtttggagagtgaggaggtattgcagcgtcttatctagggaggtggcatggtcactttagagaccctcttctggaagcacctacatgtgcatcaaggtcacccaaagatattttaaaaaatgcagaagttgatccagtggagctgagatcctgtgtttcacaaagttccaggtggggctaggatggtggttcttgaggggtggtttctgcatcagcaatgtcagcatcacctggaaatttgtaggagttgcagattatcacctgacaccagaccacactgaatgagaaagttgggacctg

SEQ ID NO: 41373 - DNA, 1083 bp, Homo sapiens
atgctgctggagagacaacctgggtttaatttagaactcttcagcacacagatggcaatgaagccatccaagaggtgaaattgcatgtgtaaaaaatgcattgcagagaaagcagccctgactgccatttactgggagtgggtcaggcattgagggccgaggcactctcttgttaccatagagagtttcacagacaccgcatcaggcaaggccactctgtgatgagcataggaaagatgagcttgagaacactggccaggccatgcagatggccccatgccctccttcctgggctcgtctacacactgtggcttctttaacaccttggcccgttcacgctctctactctgtaaatgaaatcatrgagagaacaatcatagttttcccagctattgacagtgcccagtctggagcaaacccattcttccttgaaccctaccccaaataccctaatatgaccccaagtcctctaataatccctatttcttcctcttaccaagacaccctgtgcccctccgggtgtgctcttgttgttgcagtgaaccagtaactcacctttacctaagacagggccacggggaggaggacggagaagttgccacaggtggaaagaattcagcagtgtgggttctttcccctaggacagagcttctcagactacaggtaatcttcagtgttgaaattatatttgtttagggaaatataagatgaatttggagcaggcggggaccagatcatgaaaggtatcttatttaatgccatgatattttgattgtatgagaggtttggagagtgaggaggtattgcagcgtcttatctagggaggtggcatggtcactttagagaccctcttctggaagcacctacatgtgcatcaaggtcacccaaagatattttaaaaaatgcagaagttgatccagtggagctgagatcctgtgtttcacaaagttccaggtggggctaggatggtggttcttgaggggtggtttctgcatcagcaatgtcagcatcacctggaaatttgtaggagttgcagattatcacctgacaccagaccacactgaatgagaaagttgggacctg

SEQ ID NO: 41374 - DNA, 1083 bp, Homo sapiens
atgctgctggagagacaacctgggtttaatttagaactcttcagcacacagatggcaatgaagccatccaagaggtgaaattgcatgtgtaaaaaatgcattgcagagaaagcagccctgactgccatttactgggagtgggtcaggcattgagggccgaggcactctcttgttaccatagagagtttcacagacaccgcatcaggcaaggccactctgtgatgagcataggaaagatgagcttgagaacactggccaggccatgcagatggccccatgccctccttcctgggctcgtctacacactgtggcttctttaacaccttggcccgttcacgctctctactctgtaaatgaaatcatagagagaacaatcatagttttcccagctattgacagtgcccagtctggagcaaacccattcttccttgaaccctaccccaaataccctaatatgaccccaagtcctctaataatccctatttcttcctcttaccaagacaccctgtgcccctccgggtgtgctcttgttgttgcagtgaaccagtaactcacctttacctaagacagggccacggggaggaggacggagaagttgccacaggtggaaagaattcagcagtgtgggttctttcccctaggacagagcttctcagactacaggtaatcttcagtgttgaaattatatttgtttrgggaaatataagatgaatttggagcaggcggggaccagatcatgaaaggtatcttatttaatgccatgatattttgattgtatgagaggtttggagagtgaggaggtattgcagcgtcttatctagggaggtggcatggtcactttagagaccctcttctggaagcacctacatgtgcatcaaggtcacccaaagatattttaaaaaatgcagaagttgatccagtggagctgagatcctgtgtttcacaaagttccaggtggggctaggatggtggttcttgaggggtggtttctgcatcagcaatgtcagcatcacctggaaatttgtaggagttgcagattatcacctgacaccagaccacactgaatgagaaagttgggacctg

SEQ ID NO: 41375 - DNA, 771 bp, Homo sapiens
caaattgrcccaaaaaaaaaaaaaaaaaaagcaatggggaaaggattccctatttaataaatggtgctgggaaaactggctagccatatgcagaaaactaaaactaggccccttccttacaccttatacaaaagattttctttaataatcccctatgctattataagctctcttccctaaaatctgtgtgagattccttggatgaacatactgtaatatatagaactgatttcctacttggactatctataacttttgctatgtaaagtttgcccatatactctctcataaactgtgcataaattaatacccatttccctacactttcctaatacatggcatcatcattttaaggaactgtgccttaaacacatataacactgtcattttcaaaatacacaaatgctaaccactaacgactatgttgcaagattacagctcagattcagaatcattgattaaagacagaggatacaaaaacattttgaaaataaaaactagcccaatttcttacttccttaatatactcaaacatagttctaaaaactaaattaagaaggatcagaaaggatattttttaacagttatattgtagtttagatacagtgtatttggaagaaaaggaaatttccagaaaaatattttggtgaaatattttctatattaagatgttgacaacaatcaccatctaaaactgatttttcctctgtgtttccattagctgctgggtaaacgtctagtcactaatcttaggtaaccacgaactatata

SEQ ID NO: 41376 - DNA, 771 bp, Homo sapiens
caaattggccmaaaaaaaaaaaaaaaaaaagcaatggggaaaggattccctatttaataaatggtgctgggaaaactggctagccatatgcagaaaactaaaactaggccccttccttacaccttatacaaaagattttctttaataatcccctatgctattataagctctcttccctaaaatctgtgtgagattccttggatgaacatactgtaatatatagaactgatttcctacttggactatctataacttttgctatgtaaagtttgcccatatactctctcataaactgtgcataaattaatacccatttccctacactttcctaatacatggcatcatcattttaaggaactgtgccttaaacacatataacactgtcattttcaaaatacacaaatgctaaccactaacgactatgttgcaagattacagctcagattcagaatcattgattaaagacagaggatacaaaaacattttgaaaataaaaactagcccaatttcttacttccttaatatactcaaacatagttctaaaaactaaattaagaaggatcagaaaggatattttttaacagttatattgtagtttagatacagtgtatttggaagaaaaggaaatttccagaaaaatattttggtgaaatattttctatattaagatgttgacaacaatcaccatctaaaactgatttttcctctgtgtttccattagctgctgggtaaacgtctagtcactaatcttaggtaaccacgaactatata

SEQ ID NO: 41377 - DNA, 411 bp, Homo sapiens
aaaaaaaaaaaaaaaaaaaaaaatgatggattaaaaggctaactactctaaataataaatctcagtaaaggtttaagtaaaaatgaaaaataaattaaaatgaaaatgcccttcctagacatatcttagaattctcagataggtgaataactaagaatcacaaagagaataagtgatttttcataatagtagtagtcattcagtttacacattctaagaatttaaaaacaaacaagcaaacaacacaacaatgcaatgatcagtggtggacaggggttaggaacagaaggagcagaggatgagggagggtgtagtgtcttggctgcaggggtggatacagcaacctacacatgcamtaaaattgtatagaactagtattacatcgcattgatggttgcacaatattgtgaa

SEQ ID NO: 41378 - DNA, 701 bp, Homo sapiens
attccccacacattcaccattgtaagacagaaaacttacttctctgccatttttacgaggctacaacactatatttgggaagtttagtattaacagtaaaataaaaatatatgtcatcatatatttgggcacatatattctagtcccacgctgatctttttgtaaaattagactggctttccaagaragcctacttatttttcagaacatatttcaaatagctaagttcaaacagcgcgtgtctctttatagacattccagcatcacacaggcaaaaccaaaccaaacagaaagcagcagagacttcagcgtctattgttcatcacgcagtgggggtgcaggaagtagtgttggcagaaggaactgtgcttgctgtcctatgttaatactacaaaatgcccttactcctgggtctaactagattcccttgtaaactgattgatttgttaaattacatgggaacagactagtttaatttaaagatgttgctcaaaataacttttctatgatgattaacgtcatctttcataaaagttctttaaaagaaattagcagttagaaataggtctggttgagaactatagtatatcacactggtgtcattctttccaagaatttactgcagaaatatgccccaaacacacggtattgtatgtagtattcaagaatgcctaaaacattaatcctgctctattgaagcc

SEQ ID NO: 41379 - DNA, 673 bp, Homo sapiens
acagaccaaagaaagaagttcctgtgtaaaatgtcaacacttgattttctaggtaggtccgtgcaatgtgcttctcaaaatacatttaaaaatacaacatgtggtttaattttgttgttttagttcagtcctacgtaaagagaggaagagtataaataagtaacctttctaagttcttggatccctgtgtcaagagaaaattgttacggtttctggtccctgactgcattgacaagtaaaacctccctgcaattccttgagtttccataaggtggcattgggagtcctttagcacagaagtggaygacctgtaagaggcctttgaagaaacttgttcctgggaggaatttccagactggctgtccttacttctatctttggaaaatgtcgaagttaaaagttcgccctggcccacaaaaagccatcattacagaaatactgatttaaagagactggcttggagaggctctcaagttaaaaatggtgtgcaagggacaatttatcttatcccttcccacccacgatgatgtcttgtcttttaaaccgtacagaaaaagtaaacagttttcaggagctaaattgagcagagctgtcataaaatcctcacagttttaagtacccttacttctaagagtacacatcccacattaaaaataattcatcaaactttaag

SEQ ID NO: 41380 - DNA, 673 bp, Homo sapiens
acagaccaaagaaagaagttcctgtgtaaaatgtcaacacttgattttctaggtaggtccgtgcaatgtgcttctcaaaatacatttaaaaatacaacatgtggtttaattttgttgttttagttcagtcctacgtaaagagaggaagagtataaataagtaacctttctaagttcttggatccctgtgtcaagagaaaattgttacggtttctggtccctgactgcattgacaagtaaaacctccctgcaattccttgagtttccataaggtggcattgggagtcctttagcacagaagtggatgacctgtaagaggcctttgaagaaacttgttcctgggaggaatttccagactggctgtccttacttctatctttggaaaatgtcgaagttaaaagttcrccctggcccacaaaaagccatcattacagaaatactgatttaaagagactggcttggagaggctctcaagttaaaaatggtgtgcaagggacaatttatcttatcccttcccacccacgatgatgtcttgtcttttaaaccgtacagaaaaagtaaacagttttcaggagctaaattgagcagagctgtcataaaatcctcacagttttaagtacccttacttctaagagtacacatcccacattaaaaataattcatcaaactttaag

SEQ ID NO: 41381 - DNA, 584 bp, Homo sapiens
tcaggatgtgattatgctggggacttagacacacataagggaagacttttgcagagtcctgccatagcatcaaaaaacaagatataacaaaaccaggaggcacagggactagaatgcaggaggctcatcaccttttgtttcccagtccagttcccacccaggagtactcaaaactctgcccagattcaaaatgcaaaattaaacagaccatatattaacagttgtatatatattttgcacatgaagaaaatcattatagtattacaattgtgtgtgtatatatatatakgtcataatttttcaaatgcttggaaatgacaaatattaaattatacttgattgtattaaatatatatatatatgataaaataaaattctatgataggggatgtggcatcttgaaggcctagttgggctgcgtgtgccattaagatatacagggctgcagaaaagtaaaccccaaatagaatattcctttatcccttgaatgttggaaggataattagatcagatatgatcacgttaaattgatcagattggagccagtgctaactcaatcaacttccaattcctaaggcagcaga

SEQ ID NO: 41382 - DNA, 787 bp, Homo sapiens
ggggggggtaggttgggggcactatcctgggctgtattgccagcagcagtagggctggttgggggccctattgggtgctacactgcccgcgacagggggcgggttagggccgctactgtggttacactgccggcggcgccggggtggggggactggtctgggtgctgactggtctggcttcattgcccatagtggggtggggggtggtatgggggctgcaccgcctgcggcggggggcttgttgggggcgctatctggggctgcagtgccccccgcaggggataggttagggggagtatcccgtgatacactgcaggtggagtggggmgggaaaggggggtacagggaggtgattggagggggtggtttcaggcgctatcgcgggccagactgctcatgatagaggggggcgttgggtgcgctattggctacactgccagcggcaagggacagtttgggggcgatacccctccagtggtgggtgggcaggtgtgatgggttgtgggcaccattagggggctgtactgtggtcagtgggagcgagttaggggagctatcagctgctgcactgcctgtggcgggagtcaggtttggtgcgctatcgggaccatattctcggtagtggcatacgggttaggggagctgtcgggggctaagccgtccacggggggtgcgggttgggtgcgctatccagggcatcacaccccgcagctggggtatggttgggggtgctcttcgctatctgggactgcattgcccatcgtggggagcgggttgggggccttaa

SEQ ID NO: 41383 - DNA, 708 bp, Homo sapiens
atcacagccgacaaacctgcagcctcagttcaagaccagtggacaagtcagcaagatccagatcatccaactcgactgatcttgcggaggaaccaaggcacagcagaaaaagatgactgccctgccccaaccacaccagaggctggttggtaaatgcactgatgaagcttgaggaaacgtcaagccctgctctagtcacacaacaggaagctgactagtctacgcatggctgaagcctgaggaagttggtgctagataagtaaatgtggattaaatttgcaagtgtagttatactattgcttatactgattgttttgctgtcatgctatctttgcaattgctatcaaacttgttgcccaggaggatgcctgtgcatagtgtaaacttgatcacagtagtgamaataatgctaacaggcacgggaggaaaccaagataattgtcatcattatatgatagaagcttggtttggtaaaggtataacaaaaaccctgttatatcaaacttattattagtgtacaggaatcccctggggacatgtgtttataatcaaaccagctactctgtctatgacccaagtcatgggcaacctcaagtatgttatgatctaggcctcctaccctacaacttttggtttgaaattcaaatagggaaacctttgttacccacatatgccaatcctaataacgttggaactgggaaactcata

SEQ ID NO: 41384 - DNA, 549 bp, Homo sapiens
attatctaaaccctccttgtatatagctttttcagcctttgaggctggttccccactgattattatttgctatctggagctttcagaggcacatctcaaaactcgccaagttccttgtttcatctagtaaagtcagtgtaatattacatctataatcttgcctctcttctgttattggagatcttccaggaatatttcttaytatttccccatctttgaaagaagttaggtcaaattaaacagaaaaaggaatttattggaggtacacttggttgtccacatcttcaggaagactagagaactacattcagaataggcattaaaaagaggaggctacgccaccaaaaccacagccaaaaccaagccacagaacaaatccagtgaggataccactgcatcacagagccactgtggagaccatccatactgccagcattgaccctggccctaccactgtcttggttgccagcatgcagcccaacaccccacagccagaaagatgtccccactgcttttgacccttggtttctgtctccaggtctgagactc

SEQ ID NO: 41385 - DNA, 525 bp, Homo sapiens
tttttccacaagctattaaaataattggagaaagagcatctatttcatttttggcatttcttctgatggtgaaaattgagtggtaacaaaataacttcaggtgacataaaactctattcagaattttaaacagaatgcttgaagtgggatawgacaacatatttacttacatttatggttacactgtaaccgaatcaaggaatcctgtaaacactgttgactgtaatagaagaacaatcatatttttaaaattatgcatttaatattttcaagtcaaacatcatataggttatcctacttttgctttagtaaaatggacatcttaatgtctcatatatgaaatgtagggagactgaattgtaagccgaagaagccccagtttaatgtcaaatagaggtgagtttgcatccttattctaccatttctatgtgacttcagggaagttactcaatatccctgagacccagtttcttcttccataaaatgggggtaataatactttattggagtgttgtgagaataaaa

SEQ ID NO: 41386 - DNA, 573 bp, Homo sapiens
tcttgaattagatcatacaaaaaatgaattactgtgatttaaatataaatgacactgagctcataatgtgtcataaaacctttttctcttagttatttttatgagaacaactttctcttcagttactcaatacagagtaacaaattcttcactatttctcacctcccttatataaatattcaccacgttkttctattcagtctagtaaatatctctctcctttgctcctccatcaaccctaattcagtttcttgttgctttttcctcgaactaaagcaatgcttttaactgtcatccaacttccttctggcctctggccttcattgttactaccaataagacttttctaaaatgcaaatcttaacacctgcttgtttgcaaaaaccaaccaattactctcaaaataaagtacaaataattatattaacatactttatcagtgggatggttaatttgatgtatcaacttgtccaggccatggctcccagatttgtaaacaaatatttgtcttggtgtttctatgaaggttttcagatgtgataaacatttaaacttgtgggctttgagtaaagc

SEQ ID NO: 41387 - DNA, 573 bp, Homo sapiens
tcttgaattagatcatacaaaaaatgaattactgtgatttaaatataaatgacactgagctcataatgtgtcataaaacctttttctcttagttatttttatgagaacaactttctcttcagttactcaatacagagtaacaaattcttcactatttctcacctcccttatataaatattcaccacgtttttctattcagtctagtaaatatctctctcctttgctcctccatcaaccctaattcagtttcttgttgctttttcctcgaactaaagcaatgcttttaactgtcatccaacttccttctggcctctggccttcaytgttactaccaataagacttttctaaaatgcaaatcttaacacctgcttgtttgcaaaaaccaaccaattactctcaaaataaagtacaaataattatattaacatactttatcagtgggatggttaatttgatgtatcaacttgtccaggccatggctcccagatttgtaaacaaatatttgtcttggtgtttctatgaaggttttcagatgtgataaacatttaaacttgtgggctttgagtaaagc

SEQ ID NO: 41388 - DNA, 573 bp, Homo sapiens
tcttgaattagatcatacaaaaaatgaattactgtgatttaaatataaatgacactgagctcataatgtgtcataaaacctttttctcttagttatttttatgagaacaactttctcttcagttactcaatacagagtaacaaattcttcactatttctcacctcccttatataaatattcaccacgtttttctattcagtctagtaaatatctctctcctttgctcctccatcaaccctaattcagtttcttgttgctttttcctcgaactaaagcaatgcttttaactgtcatccaacttccttctggcctctggccttcattgttactaccaayaagacttttctaaaatgcaaatcttaacacctgcttgtttgcaaaaaccaaccaattactctcaaaataaagtacaaataattatattaacatactttatcagtgggatggttaatttgatgtatcaacttgtccaggccatggctcccagatttgtaaacaaatatttgtcttggtgtttctatgaaggttttcagatgtgataaacatttaaacttgtgggctttgagtaaagc

SEQ ID NO: 41389 - DNA, 573 bp, Homo sapiens
tcttgaattagatcatacaaaaaatgaattactgtgatttaaatataaatgacactgagctcataatgtgtcataaaacctttttctcttagttatttttatgagaacaactttctcttcagttactcaatacagagtaacaaattcttcactatttctcacctcccttatataaatattcaccacgtttttctattcagtctagtaaatatctctctcctttgctcctccatcaaccctaattcagtttcttgttgctttttcctcgaactaaagcaatgcttttaactgtcatccaacttccttctggcctctggccttcattgttactaccaataagacttttctaaaatgcaaatcttaacacctgcttgtttgcaaaaaccaaccaattactctcaaaataaagtacraataattatattaacatactttatcagtgggatggttaatttgatgtatcaacttgtccaggccatggctcccagatttgtaaacaaatatttgtcttggtgtttctatgaaggttttcagatgtgataaacatttaaacttgtgggctttgagtaaagc

SEQ ID NO: 41390 - DNA, 573 bp, Homo sapiens
tcttgaattagatcatacaaaaaatgaattactgtgatttaaatataaatgacactgagctcataatgtgtcataaaacctttttctcttagttatttttatgagaacaactttctcttcagttactcaatacagagtaacaaattcttcactatttctcacctcccttatataaatattcaccacgtttttctattcagtctagtaaatatctctctcctttgctcctccatcaaccctaattcagtttcttgttgctttttcctcgaactaaagcaatgcttttaactgtcatccaacttccttctggcctctggccttcattgttactaccaataagacttttctaaaatgcaaatcttaacacctgcttgtttgcaaaaaccaaccaattactctcaaaataaagtacaaataattatattaacatactttatcagtgggatggttaatttgatgtatcaacttgtccaggccatggctcccagatttgtaaacaaatatttgtcttggtgtttctrtgaaggttttcagatgtgataaacatttaaacttgtgggctttgagtaaagc

SEQ ID NO: 41391 - DNA, 554 bp, Homo sapiens
tacaaatcttaaaagtgttatgaagtataacatctatgcagagtgaaaatgttgctgatcagtctcagaagttttatctgtgtgatttttaaaaatcacgtttttctggcctggcatggtggctcacacctgtaatcccagcactttgggaggccgaggcaggcagatcacgaggttaggagatcgagaccatcctgcctaacacggtgaaactccatctctactaaaaatacaaaaaattagccgggcatggtggtgggcacctgtagtcccagctactcgggaggctgaggcaggagaatggcttgaatccgggaggcagaggttgcagtgagccgagatcgggccactgcactccagcctgggcgacagagtgagactccatctcaaaaaataaatwaattaattaattaaaattaaaattaaaataaataaatcatgtttttctgactgtctactcccttgttgctactttacttattctggtccacccagcagaactgctttcaaaggttgttgagaactgaatgaaggcaaatataagtggtgcatgc

SEQ ID NO: 41392 - DNA, 462 bp, Homo sapiens
ctctctttgttgcatgtttttttaaatgaaaaatctgtttctttattttacttgttcctcaatattttatctttttcttttatttttggagctgcaatataatatcctggtgtagattttacagtattttttctgcttggtgctctgagagcttcctgtttgctgccagccattaattttkggaaatttctggccatgatgattttaaataattcttgtgctccatctttccctctccttctgatataccagttgtacaaacgctgccccccttttttttagaattttctcacagttcttggatttttttctctttgcatttaaatttgagaaatttctattgacatatattcaagttcagaaaagtttttctttgtagtgtcaagtttactaatgacttaccaaaggcattcttcatttctgttacaatgttattgatatcaaccattttctcaatatttc

SEQ ID NO: 41393 - DNA, 1161 bp, Homo sapiens
ccgtagtgaaggaattgtcctgtatcttcattgtatcgctgtycataccctggtggtgatactgtattttagtactgcaagatgctaccattgaggaaaccaagtaaaggtacatgggatctctctatgtcttataacccaattatctcaaaatcaaaaatttaaataaaaagattagcaaggggtgggagcaatgtggaaaatgtcaggcttcgggtcatgatggatcattaaaattagagggaagagcatgccaaatttaagcttaaaaggcattccaggaagtcttaccaatacgcactctaataccccctctgtcaatgtaccctcacctatgctaacttgaaatttttaaatgctatgtcaatttaattttttcaactaatgtttcttttgtaattgtatatttacaccctgggcaactttgtttttaatcataaacctgagtttataaaatattagtgtcacataacttaagaaaaattaaaagtttatattcttcaaactggtataaaatcaagtccggaattatatctatacccaaattggaagacctagaactttaagctttacttactcttaagtgaacaggtaaagacacgccctggaatcttcgtatgagacttggctgggtgggttgaagattgtgaactgctgatacttcatactggaaacaaatacttgttcttggaataagagggccctcactcacatcaatgaagtcacctattctgattgatttaaaaataaataaacaaaactgcaacatcaaataatttgtaagagcttgaaaaagaaatctcttccttctctttgctgctaacatccctaatcaagaacattatatatggttcaattcagtttctaatgacccctgacataatgatctcaagtaaagaggctaaaactttgaaaattaaatcaaatgaaccattttcttaattagcattgatataggttttaaggtctttaagagtcacgcaacacatcatgctatcaagctgatccaattgcctaaaaccgatcatctacaaccttacaataacccatgtaacgaagctgagaattcagtgtgtaggacagattgtgttcagaaacaaagggcagtttctagaggaaaaaagtgaagtccaattcataaaaacaggaggctgagaaaat

SEQ ID NO: 41394 - DNA, 1161 bp, Homo sapiens
ccgtagtgaaggaattgtcctgtatcttcattgtatcgctgtccataccctggtggtgatactgtattttagtactgcaagatgctaccattgaggaaaccaagtaaaggtacatgggatctctctmtgtcttataacccaattatctcaaaatcaaaaatttaaataaaaagattagcaaggggtgggagcaatgtggaaaatgtcaggcttcgggtcatgatggatcattaaaattagagggaagagcatgccaaatttaagcttaaaaggcattccaggaagtcttaccaatacgcactctaataccccctctgtcaatgtaccctcacctatgctaacttgaaatttttaaatgctatgtcaatttaattttttcaactaatgtttcttttgtaattgtatatttacaccctgggcaactttgtttttaatcataaacctgagtttataaaatattagtgtcacataacttaagaaaaattaaaagtttatattcttcaaactggtataaaatcaagtccggaattatatctatacccaaattggaagacctagaactttaagctttacttactcttaagtgaacaggtaaagacacgccctggaatcttcgtatgagacttggctgggtgggttgaagattgtgaactgctgatacttcatactggaaacaaatacttgttcttggaataagagggccctcactcacatcaatgaagtcacctattctgattgatttaaaaataaataaacaaaactgcaacatcaaataatttgtaagagcttgaaaaagaaatctcttccttctctttgctgctaacatccctaatcaagaacattatatatggttcaattcagtttctaatgacccctgacataatgatctcaagtaaagaggctaaaactttgaaaattaaatcaaatgaaccattttcttaattagcattgatataggttttaaggtctttaagagtcacgcaacacatcatgctatcaagctgatccaattgcctaaaaccgatcatctacaaccttacaataacccatgtaacgaagctgagaattcagtgtgtaggacagattgtgttcagaaacaaagggcagtttctagaggaaaaaagtgaagtccaattcataaaaacaggaggctgagaaaat

SEQ ID NO: 41395 - DNA, 1161 bp, Homo sapiens
ccgtagtgaaggaattgtcctgtatcttcattgtatcgctgtccataccctggtggtgatactgtattttagtactgcaagatgctaccattgaggaaaccaagtaaaggtacatgggatctctctatgtcttataacccaattatctcaaaatcaaaaatttaaataaaaagattagcaaggggtgggagcaatgtggaaaatgtcaggcttcgggtcatgatggatcattaaaattagagggaagagcatgccaaatttaagcttaaaaggcattccaggaagtcttaccaatacgcactctaatacccccyctgtcaatgtaccctcacctatgctaacttgaaatttttaaatgctatgtcaatttaattttttcaactaatgtttcttttgtaattgtatatttacaccctgggcaactttgtttttaatcataaacctgagtttataaaatattagtgtcacataacttaagaaaaattaaaagtttatattcttcaaactggtataaaatcaagtccggaattatatctatacccaaattggaagacctagaactttaagctttacttactcttaagtgaacaggtaaagacacgccctggaatcttcgtatgagacttggctgggtgggttgaagattgtgaactgctgatacttcatactggaaacaaatacttgttcttggaataagagggccctcactcacatcaatgaagtcacctattctgattgatttaaaaataaataaacaaaactgcaacatcaaataatttgtaagagcttgaaaaagaaatctcttccttctctttgctgctaacatccctaatcaagaacattatatatggttcaattcagtttctaatgacccctgacataatgatctcaagtaaagaggctaaaactttgaaaattaaatcaaatgaaccattttcttaattagcattgatataggttttaaggtctttaagagtcacgcaacacatcatgctatcaagctgatccaattgcctaaaaccgatcatctacaaccttacaataacccatgtaacgaagctgagaattcagtgtgtaggacagattgtgttcagaaacaaagggcagtttctagaggaaaaaagtgaagtccaattcataaaaacaggaggctgagaaaat

SEQ ID NO: 41396 - DNA, 1161 bp, Homo sapiens
ccgtagtgaaggaattgtcctgtatcttcattgtatcgctgtccataccctggtggtgatactgtattttagtactgcaagatgctaccattgaggaaaccaagtaaaggtacatgggatctctctatgtcttataacccaattatctcaaaatcaaaaatttaaataaaaagattagcaaggggtgggagcaatgtggaaaatgtcaggcttcgggtcatgatggatcattaaaattagagggaagagcatgccaaatttaagcttaaaaggcattccaggaagtcttaccaatacgcactctaataccccctctgtcaatgtaccctcacctatgctaacttgaaatttttaaatgctatgtcaatttaattttttcaactaatgtttcttttgtaattgtatattyacaccctgggcaactttgtttttaatcataaacctgagtttataaaatattagtgtcacataacttaagaaaaattaaaagtttatattcttcaaactggtataaaatcaagtccggaattatatctatacccaaattggaagacctagaactttaagctttacttactcttaagtgaacaggtaaagacacgccctggaatcttcgtatgagacttggctgggtgggttgaagattgtgaactgctgatacttcatactggaaacaaatacttgttcttggaataagagggccctcactcacatcaatgaagtcacctattctgattgatttaaaaataaataaacaaaactgcaacatcaaataatttgtaagagcttgaaaaagaaatctcttccttctctttgctgctaacatccctaatcaagaacattatatatggttcaattcagtttctaatgacccctgacataatgatctcaagtaaagaggctaaaactttgaaaattaaatcaaatgaaccattttcttaattagcattgatataggttttaaggtctttaagagtcacgcaacacatcatgctatcaagctgatccaattgcctaaaaccgatcatctacaaccttacaataacccatgtaacgaagctgagaattcagtgtgtaggacagattgtgttcagaaacaaagggcagtttctagaggaaaaaagtgaagtccaattcataaaaacaggaggctgagaaaat

SEQ ID NO: 41397 - DNA, 1161 bp, Homo sapiens
ccgtagtgaaggaattgtcctgtatcttcattgtatcgctgtccataccctggtggtgatactgtattttagtactgcaagatgctaccattgaggaaaccaagtaaaggtacatgggatctctctatgtcttataacccaattatctcaaaatcaaaaatttaaataaaaagattagcaaggggtgggagcaatgtggaaaatgtcaggcttcgggtcatgatggatcattaaaattagagggaagagcatgccaaatttaagcttaaaaggcattccaggaagtcttaccaatacgcactctaataccccctctgtcaatgtaccctcacctatgctaacttgaaatttttaaatgctatgtcaatttaattttttcaactaatgtttcttttgtaattgtatatttacaccctgggcaactttgtttttaatcrtaaacctgagtttataaaatattagtgtcacataacttaagaaaaattaaaagtttatattcttcaaactggtataaaatcaagtccggaattatatctatacccaaattggaagacctagaactttaagctttacttactcttaagtgaacaggtaaagacacgccctggaatcttcgtatgagacttggctgggtgggttgaagattgtgaactgctgatacttcatactggaaacaaatacttgttcttggaataagagggccctcactcacatcaatgaagtcacctattctgattgatttaaaaataaataaacaaaactgcaacatcaaataatttgtaagagcttgaaaaagaaatctcttccttctctttgctgctaacatccctaatcaagaacattatatatggttcaattcagtttctaatgacccctgacataatgatctcaagtaaagaggctaaaactttgaaaattaaatcaaatgaaccattttcttaattagcattgatataggttttaaggtctttaagagtcacgcaacacatcatgctatcaagctgatccaattgcctaaaaccgatcatctacaaccttacaataacccatgtaacgaagctgagaattcagtgtgtaggacagattgtgttcagaaacaaagggcagtttctagaggaaaaaagtgaagtccaattcataaaaacaggaggctgagaaaat

SEQ ID NO: 41398 - DNA, 1055 bp, Homo sapiens
cagtacatttttcaagtgatgtaaaaagttcttggaattaatttgtcatcagccttgctctaaggacggtgttgtttcagccatggccatttaggaactgatcattgctacctacaaccctgttgaaaaggcccacttcgtgcaaaagtcaaaagtaaaaaaaaaaaaaaawctttgtatacatttttttttccactggatgtattacatggttaaatttatttttttaaatttggaaaacaaacttacttttaagcactttcatgtcctaacaagtttaaaacacacatagaagcggaagcattccttcacctgatgtttcagcgttcaaggtactgaaagtcgcttgctcatacaatgatataaagttgatgagtaataaagacacctgattttatttttgctcatgtgtctcatgatgacaaaatttgagacaggtcaacaagaaatatttactagatctagtagttgttactacatttaaattgatagtttctaataatgatgttttgcataggtcataaggaattttctgtgagaaatattaggaataaaaggattttcttcactcttcacatgtgttctacagatgttcacagactagtcttccttttataggctctgaataaagataaaatatggtggaaatcaaccaattcgtcattgctgttttatgctgtagaaattacccttaattttcacttacctttgtgttcaaggtcaaagccacccccatgaaaactcccaaactacacaccaaaaaaacaaatcaaacgaaataaagcattgcaagaatgtgaaatttgtgttgaaaacatctggctgactattctcccaggctatgctcggcactcattattcatataaattgtgagaaaggtttggtgtctgaacgtacctctagcccctatgatgtgcgtatgtgatttttgcccaagtagtcatcaccacaatcctgtataagaaaaataaatttgaatttgctgtgagtcagcttcatcttttaaattaaatatgatgataatacctgctttaattatcttagggcttcttat

SEQ ID NO: 41399 - DNA, 716 bp, Homo sapiens
atccagagaaagatatttcttggcagctattataagcagtcttgcccatacagccttatcatcctgtagagctcgtgatactagaagtatcagtggtttaaaacaaaacaaaaagataccatgtgcagtctgaaaaatatctaaaggagccatgcaatgaaaattcctagtgtcctgcagcaaggttatgccrtctgtagtagggaaccatgcacgctaaaaaagcagtttctggtatgcaccgagctctgctccagacagagcatgcaactgtagaacagtaagtggccctgtctctaaaactgaccaacatgagctggatacgctcagagcccttaagttatgagtttgggtacatagtgggaggaaagatgattttcaatgattaagagttggtgacttccaaagttaaaataacatagaaatctctcattctctctactctgctaataggtatagaagcatgccatgttttcatttaaagcatcagcagaaggcaagaaagaaagaatactttgtattgattgattgattatttgggtcaatgccgcttgacagattctgaagaacaagaggcgagaatgttttaatctaccgtgctttgtatattagggagaacaaaaatgaattcttatatgtatatgatatttgaagttctagtgagagaagtagacttttttgaaagtgtgatgttgtagaatgaaaggaggacattg

SEQ ID NO: 41400 - DNA, 716 bp, Homo sapiens
atccagagaaagatatttcttggcagctattataagcagtcttgcccatacagccttatcatcctgtagagctcgtgatactagaagtatcagtggtttaaaacaaaacaaaaagataccatgtgcagtctgaaaaatatctaaaggagccatgcaatgaaaattcctagtgtcctgcagcaaggttatgccatctgtagtagggaaccatgcacgctaaaaaagcagtttctggtatgcaccgagctctgctccagacagagcatgcaactgtagaacagtaagtggccctgtctctaaaactgaccaacatgagctggatacgctcagagcccttaagttatgagtttgggtrcatagtgggaggaaagatgattttcaatgattaagagttggtgacttccaaagttaaaataacatagaaatctctcattctctctactctgctaataggtatagaagcatgccatgttttcatttaaagcatcagcagaaggcaagaaagaaagaatactttgtattgattgattgattatttgggtcaatgccgcttgacagattctgaagaacaagaggcgagaatgttttaatctaccgtgctttgtatattagggagaacaaaaatgaattcttatatgtatatgatatttgaagttctagtgagagaagtagacttttttgaaagtgtgatgttgtagaatgaaaggaggacattg

SEQ ID NO: 41401 - DNA, 573 bp, Homo sapiens
atctcctgacctcatgatccacccacctcggcctcccaaagtgctgggattacaagcatgagccaccgcgcccggccaggatatcttattagtacagccaccccaccttctcatataaagcatcattaactcaggctcttgttagtttccttcatattacttctcaattaatatttatttatttgcttctgtggttattgcctatttcatccatttgaatttaactttcaagcgggcagggatcttttctgtttttgtaccatttttcccagcacctaacactgtgtggcacacaatgggagttcaataaatcatctgttaatgaagtgattattataattattgatgtaactttatgcagggcttcttggtgagctgacccacttagtgagatggcctcgttcataagtcatgcctgatattctgtgggatgattgtaagttgtaawtcacaggagagttttcagcggggcagggtttttggaacacggtattagttactggtggcctccagtagaggtgggtgtaaccctaggaaacaaccattattcaaaggcagttttctgaaatcaaa

SEQ ID NO: 41402 - DNA, 1106 bp, Homo sapiens
ttaagtccccattgtaggaaaccctgtaaatttgtattgagtgttttgtgggtgcaaaaaaaataagcccttgtggctgtaagccattgagatcagggtgttctttgttacgggagcattattaaaccacactgacacatctgcctttaaattacttgccaaataaataaatccctattgttaagccacyttcatttgaattatttatattttttattgtaagagaatccaaaaggatgaaatatgttttttacataatttctaaagaaatataggtgatgcacccaaaagtatcatcaaaaaatgactgtcaattaattaatgaagactttagtgatagaaaattcttcatgtatatgtgctcattttcaatccatctattctgttaattcttttccacgctatatacatgaatccagaaacacacacacacacacacaaacacacaccttccttccttatgtgcaaccatagaggatcagcctatctgtgtccagtgctcagagctgactgaatacactagaacttgatctggcatatccaaccagaccttgtaagcaattaagattcacagttgctctaaacgtacaccaactatctagcggttaaatttaaatttgatacaactaaatcattaattcattcatccaatcattcatcaattatttattgagtgcctatcatgtaataggcacaacgctttagtatattttcacatatactgccctgctagtctagtttcaaacactaactctttctctcacaggaagggaacaatttctctggatttcaggatggctggtttggtgtgtgagtactgctgtcctatgacactgtttactgcgggaacatgttgtgatgtaaagttaacaacaacagaaataaaaacaaatgtcaccaccataggatctgagtctctgcctgagtttaaatcatggtacagttccacagaagcttataagcaagttacttaacctttctgaaatgcaatagtgttacccccagtggctctgtgacaattaaatgtgtcatatacatgaagtgcccagcccaaaaacctagcacaaaattgtggtttaatccagatcccctctttgtttacctgt

SEQ ID NO: 41403 - DNA, 1106 bp, Homo sapiens
ttaagtccccattgtaggaaaccctgtaaatttgtattgagtgttttgtgggtgcaaaaaaaataagcccttgtggctgtaagccattgagatcagggtgttctttgttacgggagcattattaaaccacactgacacatctgcctttaaattacttgccaaataaataaatccctattgttaagccaccttcatttgaattatttatattttttattgtaagagaatccaaaaggatgaaatatgttttttacataatttctaaagaaatataggtgatgcacccaaaagtatcatcaaaaaatgactgtcaattaattaatgaagactttagtgatagaaaattcttcatgtatatgtgctcattttcaatccatctattctgttaattcttttccacgctatatacatgaatccagaaacacacacacacacacacaaacacacaccttccttccttatgtgcaaccatagaggatcagcctatctgtgtccagtgctcagagctgactgaatacactagaacttgatctggcatatccaaccagaccttgtaagcaattaagattcacagttgctctaaacgtacaccaactatctagcggttaaatttaaatttgatacaactaaatcattaattcattcatccaatcattcatcaattatttattgagtgcctatcatgtaataggcacaacgctttagtatattttcacatatactgccctgctagtctagtttcaaacactaactctttctctcacaggaagggaacaatttctctggatttcaggatggctggtttggtgtgtgagtactgctgtcctatgacactgtttactgcgggaacatgttgtgatgtaaagttaacaacaacagaaataaaaacaaatgtcaccaccataggatctgagtctctgcctgagtttaaatcatggtacagttccacagaagcttataagcaagttacttaacctttctgaaatgcaatagtgttacccccagtggctctgtgacaattaaatgtgtcatatayatgaagtgcccagcccaaaaacctagcacaaaattgtggtttaatccagatcccctctttgtttacctgt

SEQ ID NO: 41404 - DNA, 1106 bp, Homo sapiens
ttaagtccccattgtaggaaaccctgtaaatttgtattgagtgttttgtgggtgcaaaaaaaataagcccttgtggctgtaagccattgagatcagggtgttctttgttacgggagcattattaaaccacactgacacatctgcctttaaattacttgccaaataaataaatccctattgttaagccaccttcatttgaattatttatattttttattgtaagagaatccaaaaggatgaaatatgttttttacataatttctaaagaaatataggtgatgcacccaaaagtatcatcaaaaaatgactgtcaattaattaatgaagactttagtgatagaaaattcttcatgtatatgtgctcattttcaatccatctattctgttaattcttttccacgctatatacatgaatccagaaacacacacacacacacacaaacacacaccttccttccttatgtgcaaccatagaggatcagcctatctgtgtccagtgctcagagctgactgaatacactagaacttgatctggcatatccaaccagaccttgtaagcaattaagattcacagttgctctaaacgtacaccaactatctagcggttaaatttaaatttgatacaactaaatcattaattcattcatccaatcattcatcaattatttattgagtgcctatcatgtaataggcacaacgctttagtatattttcacatatactgccctgctagtctagtttcaaacactaactctttctctcacaggaagggaacaatttctctggatttcaggatggctggtttggtgtgtgagtactgctgtcctatgacactgtttactgcgggaacatgttgtgatgtaaagttaacaacaacagaaataaaaacaaatgtcaccaccataggatctgagtctctgcctgagtttaaatcatggtacagttccacagaagcttataagcaagttacttaacctttctgaaatgcaatagtgttacccccagtggctctgtgacaattaaatgtgtcatatacatgaagtgcccagcccaaaaacctagcacaaaattgtggtttaatccagatcccctctttgtttayctgt

SEQ ID NO: 41405 - DNA, 596 bp, Homo sapiens
cgtgtgtaggttacaggatgctgggcccctccccagatgatctaattgaataaatccaggatggggcacagagatatgcatttcaacaagtattccaggttgtttctgatacagtcgttatagggaaacaatagcagtcagtaagatttaagaaatctacagggtaaatgtatttttttcccaaaacacttcctttattagcccacagatgcttgaaaattcttcaaggttggacagatcctatcaactcttaattagagatgaaggaccatccagtaatttccagatctaatgagatataaatgtcttaggggttgtgaagaatgtgtgtgctctaaaagwaaagaggctgcctttgttaataattggcactaaaatccctgaaaccataatgactagaatacgggaagaaaagggttgtcttttctctacaccattgccaacacttgttagctttcatcttttttataatggccattctaacaggtgtgaggtgtatctcattgtgtttttaatttgcgtttttctgatgattagtgatgttgagcatcttttcatgtctgtgttggccatttgtatgtcttctttggaaaagt

SEQ ID NO: 41406 - DNA, 1021 bp, Homo sapiens
ccagattctgctacccaaactacttggcttctggagcctggcagtcttcttgttacagaccaatctgtggatctcgcttctatcaattcacctgctaaatttctagatccttttgagtattgggatcaaagtctctactgaatgcagccattattttcattcttgccagatcccaatatcyttttattcttccaccaccagcttcttgcatgaccaacttctggcagactgcgaaattaatgagtaacctaatattaacttctaatatctttaccattgatcgaatatatgctatctgattttcatccaaaaactgttgaaaatggaaattttaatctaataaatgtatgtaatctggtacccaaatatattgttcacattgttattattttattattattattttgcttacatttttgcattcaagaatttgggagatttaagtaaaaatcaatatgactgtgtaactggatttggggcccatataatctgacagatctgagaacatttctcttgaaattaggtatgttgtctattaagagtaatcatttctggaagaacatagtttgcatctgcagacttgtctcaacagcagtgagaattgtctaagaatgaaggacatgcatttctactgatataggaaagcagaaaatttgatgcataaactagaaatgcagacaacaagactaggatgtaatttataaggtaaactgtatgcttgcactaaaggttacttaaagtctagtatctgaatgtggattttcaaccaagagaaaagtgaagcttaagcactgctaggacagacgctttgctctttgttagtagacttaagtgccaggtttcctgcctcccactggtaaggagagtcaggatcattcaccaatgatcttaagtgggaattattgggtccaggaggcttcggtaacctaccgatgcttcttcaaggctcaaccttaatcaagctgacagcaacacacctgagccatgctgaacaagcatttatatccattagtcttactct

SEQ ID NO: 41407 - DNA, 1021 bp, Homo sapiens
ccagattctgctacccaaactacttggcttctggagcctggcagtcttcttgttacagaccaatctgtggatctcgcttctatcaattcacctgctaaatttctagatccttttgagtattgggatcaaagtctctactgaatgcagccattattttcattcttgccagatcccaatatctttttattcttccaccaccagcttcttgcatgaccaacttctggcagactgygaaattaatgagtaacctaatattaacttctaatatctttaccattgatcgaatatatgctatctgattttcatccaaaaactgttgaaaatggaaattttaatctaataaatgtatgtaatctggtacccaaatatattgttcacattgttattattttattattattattttgcttacatttttgcattcaagaatttgggagatttaagtaaaaatcaatatgactgtgtaactggatttggggcccatataatctgacagatctgagaacatttctcttgaaattaggtatgttgtctattaagagtaatcatttctggaagaacatagtttgcatctgcagacttgtctcaacagcagtgagaattgtctaagaatgaaggacatgcatttctactgatataggaaagcagaaaatttgatgcataaactagaaatgcagacaacaagactaggatgtaatttataaggtaaactgtatgcttgcactaaaggttacttaaagtctagtatctgaatgtggattttcaaccaagagaaaagtgaagcttaagcactgctaggacagacgctttgctctttgttagtagacttaagtgccaggtttcctgcctcccactggtaaggagagtcaggatcattcaccaatgatcttaagtgggaattattgggtccaggaggcttcggtaacctaccgatgcttcttcaaggctcaaccttaatcaagctgacagcaacacacctgagccatgctgaacaagcatttatatccattagtcttactct

SEQ ID NO: 41408 - DNA, 596 bp, Homo sapiens
tttcaaaataataggtgataaaaattagaaggtgacattccactgaatttcatcagcactccttttttcccctcttccgaaccagccatgtgatcttaagcaaattatctcatctctctaggtcacagtttttcaacttaggaaaaaaaaagagggacacaagccagatcatctctaacttcccctccatctctcaaattctgtggtcctcgtacatttacaatatgatgcaatctacaaacatttgatattggkgctctcttattcaccttcatatccctggtatttagcattgtgcctatacatagtaggtgctcactgaaagtttttgcaactacctcaaaaactgaggttcatacctcagtttgtaaagtgacgtagaactgctagctcttttacctagttgaccactagagagcgaagcggtcacaaattttttctctgttaaaagcaaatttatcttcgtccagcagaggggagtggtcctttatatttcaggcatgtaaaaatcaggtcctggttgggcgaagggagaaatctgtgagcagtttcctgcctatcagacaggccctccagaggggtgatcagtaccataa

SEQ ID NO: 41409 - DNA, 592 bp, Homo sapiens
ctagtaaatgctgaatgacagttttcctgtaatggttttggattagaattatattgtctaatggttgtattattttaaagatttctttagcaggcattagtcatgaccagccagagacatgactgcatatctgagtcaatgtgaagattccaccagaggaggataatcaacacagaggagctgtcacacctgtttgttaaaataagtatttctcacactgcttcaggtgagccaggttgaactgaactgcaacctgaagctactattctcaggtgagctagcttcccagagttgctgtttggagagacagatgtaataacaatctggctgcacgtggaggatgacaggtcccttgtcatgctaggagctggggagtggcttgcagacaccayttcacaatgaagagtgggtcgtggtttgataggcacctgttgtctatggccataccactctgaacatgcccaatctcctctgataggcacccattcctcgtggatggggaaggtgggggtgctgccagggctgtgcccaagtgcctggttccattttttcccccaacaccagacagcagccaatatcccaggacagctct

SEQ ID NO: 41410 - DNA, 592 bp, Homo sapiens
ctagtaaatgctgaatgacagttttcctgtaatggttttggattagaattatattgtctaatggttgtattattttaaagatttctttagcaggcattagtcatgaccagccagagacatgactgcatatctgagtcaatgtgaagattccaccagaggaggataatcaacacagaggagctgtcacacctgtttgttaaaataagtatttctcacactgcttcaggtgagccaggttgaactgaactgcaacctgaagctactattctcaggtgagctagcttcccagagttgctgtttggagagacagatgtaataacaatctggctgcacgtggaggatgacaggtcccttgtcatgctaggagctggggagtggcttgcagacaccatttcacaatgaagagtgggtcgtggtttgataggcacctgttgtctatggccataccactctgaacatgcccaatctcctctgataggcacccattcctcrtggatggggaaggtgggggtgctgccagggctgtgcccaagtgcctggttccattttttcccccaacaccagacagcagccaatatcccaggacagctct

SEQ ID NO: 41411 - DNA, 592 bp, Homo sapiens
ctagtaaatgctgaatgacagttttcctgtaatggttttggattagaattatattgtctaatggttgtattattttaaagatttctttagcaggcattagtcatgaccagccagagacatgactgcatatctgagtcaatgtgaagattccaccagaggaggataatcaacacagaggagctgtcacacctgtttgttaaaataagtatttctcacactgcttcaggtgagccaggttgaactgaactgcaacctgaagctactattctcaggtgagctagcttcccagagttgctgtttggagagacagatgtaataacaatctggctgcacgtggaggatgacaggtcccttgtcatgctaggagctggggagtggcttgcagacaccatttcacaatgaagagtgggtcgtggtttgataggcacctgttgtctatggccataccactctgaacatgcccaatctcctctgataggcacccattcctcgtggatggggaaggtgggggtgctgccagggctgtgcccaagtgcctgsttccattttttcccccaacaccagacagcagccaatatcccaggacagctct

SEQ ID NO: 41412 - DNA, 652 bp, Homo sapiens
gtggagagaatcagataaagttcctttttttgtgtgctattgcaactctctgtgagtcacctcctatagccaccctggacaacaagcaattattaacctactggatcttgtctgctttcagcagaagtgaagctcctgctccgcattcccaagcttacatagttctcctgctaggacgttacctaccttccctcttagaaatacagttcagagtccagttccaaattccaggtcatccttggtgatcttaagccagatgcaaatatttaggcagtctcagcccccagcacctatgccaagtgatgggttaaggcaagaattttctgctatatcattttatctgaaaaatggtgttgtagatagtgttctttgggaagcagactctgagatgaagttttgtgtgcttaatgtttattagggacgtttstaaaggatgtaatgtttgtgtgatcaacacctatggaagggatagaaatgaagtaggactgggcacaggacccttgccttggctgatctcactgggagctctgagctaaaatggcccattggagttgtcctgatttggttccaaatggcctccaccagctcagtcactggatgtccctcagttgggcaagggcatgactttgggccaggcagctctttgcacctg

SEQ ID NO: 41413 - DNA, 560 bp, Homo sapiens
tttcaaatgaacatgtgggaacttttgctgaatgctgacatcaagtgaaaataagggtttcctattttttaaaagtcattctatatatgcctgttttctttcctatttcctagagagacagcttttcccccccgagtatgttttgcaggggtaataattactgcaataatgttatccttaaaagggagcacatataagacaaaagcaggtayaaaaatctcattcccactaaaacaattcaaaatcataggttaggctttaaaaggaagcaactacaaatctaggttttaaaaacctttagacacactaaagatttgtcccagatcacatctgatgtctatttctctgggataataacaaaaaaaaagaggtgataaattaattcaaatggcctattttacatacttgaaggatatttccattgtctcatatagccattctgaataggacagagtcacataatgaaacttcctttgcacattctcctgaacacgcactgagtcaagatagccaaaccccttactttcattgtaaaattactgtttctcatacgcaatcag

SEQ ID NO: 41414 - DNA, 560 bp, Homo sapiens
tttcaaatgaacatgtgggaacttttgctgaatgctgacatcaagtgaaaataagggtttcctattttttaaaagtcattctatatatgcctgttttctttcctatttcctagagagacagcttttcccccccgagtatgttttgcaggggtaataattactgcaataatgttatccttaaaagggagcacatataagacaaaagcaggtacaaaaatctcattcccactaaaacaattcaaaatcataggttaggctttaaaaggaagcaactacaaatctaggttttaaaaacctttagacacactaaagatttgtcccagatcacatctgatgtctatttctctgggataataacaaaaaaaaagaggtgataaattaattcaaatggcctattttacayacttgaaggatatttccattgtctcatatagccattctgaataggacagagtcacataatgaaacttcctttgcacattctcctgaacacgcactgagtcaagatagccaaaccccttactttcattgtaaaattactgtttctcatacgcaatcag

SEQ ID NO: 41415 - DNA, 1452 bp, Homo sapiens
tggagcacagtgtgggaagctggytccttaggcctgggaacaagcccaggcaaccgggctgggactcgctctgcctggctgcctctcctacagcgtgcgtgaacgggaggccaggatggccacaggccccaggaaacgcagatctcatgggaagaggttgcagtttcagcttctggctgtggatgctccgggcaatttcatgcatttccatgagttcagagaatggaagctcccctggcccctccctaccactctttgtaaatcagctcgctccttctgttcattcatccgctcattcatccattccgcacacgtgccttattgaatccctgctatgaccaggcacagggttagatactccatggagaccagaccagtcttagcctctgcactgatgaactcaacccagaagacacacgaaaagataagccacggtgtgacgggcggacgacagagcctgcgccgagacacgggcacttcagcttgatatgtggagagtgtcggctgcaaacctccctggtctctgccgccagacgcatgccaagatggcctgattacactggggaaatttcgaatgggccattgaaatgcgtggtgtgattgttgccatggattttacggtctggtggcctgttccgtgctggtcaggctgacgtctgtgcttggcacagcatggtgagagacaggcaggtgtggttgatgcctctgggagggagcacataatccaggaaagggggcagtaaaccaggcgatgggaactgcaacggagcagaggccacgggagaagccccagcggggagcacacctgagagggacagtgggaggagcgaggcctgaaaccggaggaggagcagcagagcccccacagaggacagcggaaaggagacctgagtggggaagagctcggctccttccagtcccccagggacccaggttggggcagaggggccatcgggcctgtaaccttgcagtgccatcatggccctgggtagagtttgggtcttattctaggaagcgtgggggcttggaatgtcctggatgccacctgtttcctgtgtggcaggcagagtgaagaccccaccattccaccaagatgcctccaccctagccctattcgccgtgagtgcatcatatcacatgcagaggggagttggggttgcaggtggaactggattggtgaacaccacccttaacctaaggaggagatcctgggggatcccgcaggcccagagtcctcacagtgttcttaaaagggaactagcagccagaagtgtggcagtgaggacctgatccaacgtcattggctttgaagagggaggaagggcccatgggcctagaaatgaggacagcccctggaagctgagaaaggcgaggaacagattctgccctggatcctccaggaggagccggccctaggtcttagcccagtgagacccgtcacagactcccgac

SEQ ID NO: 41416 - DNA, 547 bp, Homo sapiens
gagagactttcagcaagcccttctgttaatacaggaaggtattactggtacctagtttgtagaattattgcaagggttaatatatgaacagagctggggaacagtgccaggcatatgtaggtcttttaaatgatagctgctgtgacgttcttatttactggaggtataatcaaatattgtcctaattcaccgtaagccttttcctgcctacatgygcttcccactcctctactccttgtaggatcacatcttgttaaaaatcaagtaatattattgagtccttagtatgtgccaggaaattttgtatgtcatttgctttgcttaattacaatagtcaaagtttctttgccaccataagtgtacaaggtctcagggattttaaataactttctcagtcacaccactatcaagagttggagtgtggttttaagccacctaaagaacattccaaaacatcccatcccactactttcttagaaggaaatctgctctaagagaaggcacacggaaactcacttcattgttgttagacgagtgggaaggctgc

SEQ ID NO: 41417 - DNA, 547 bp, Homo sapiens
gagagactttcagcaagcccttctgttaatacaggaaggtattactggtacctagtttgtagaattattgcaagggttaatatatgaacagagctggggaacagtgccaggcatatgtaggtcttttaaatgatagctgctgtgacgttcttatttactggaggtataatcaaatattgtcctaattcaccgtaagccttttcctgcctacatgcgcttcccactcctctactccttgtaggatcacatcttgttaaaaatcaagtaatattattgagtccttagtatgtgccaggaaattttgkatgtcatttgctttgcttaattacaatagtcaaagtttctttgccaccataagtgtacaaggtctcagggattttaaataactttctcagtcacaccactatcaagagttggagtgtggttttaagccacctaaagaacattccaaaacatcccatcccactactttcttagaaggaaatctgctctaagagaaggcacacggaaactcacttcattgttgttagacgagtgggaaggctgc

SEQ ID NO: 41418 - DNA, 531 bp, Homo sapiens
tgcagattgrttatccagctgttgcctccgtaccccattctaccatcagtgggtacaaatgagtcctggctttgtctgtggagactgattacaccttcccacttgctggaaagttcaaggtgttcttggttgatccatatgcctttgcggctgctacccctgtggccactgccaccacagctgctccttctgctgctgcagcctcagctaagattgaagccaaggaagagttagaggaattggatgaggatacaggatttggtctctttgactaatcaccaaaaagcaactaaatcagccagctttatttgcaaaacaagaaaataaaggcttacttctttaaaaaaaaaagtatatttaaaaaaaaaaaaaatatatatatatatagccaattcgtgaaataattatatttcattttaatgaaaaaaattggggggatgttgttccactttatctattttttattttactttttattttagactcaagggcacatatgtaggtttgtcacatgggcctattgcatgatgc

SEQ ID NO: 41419 - DNA, 993 bp, Homo sapiens
atccaaactgggctgtgggaaaagcagatggaaaagagtggatatttgaaactgcagctgctatctccacggagatcgcgcacacatttcacaggcgctctctttcccatggttagcaagaataacagcacaacagtcacaacagccagtttttctggagtcttttacactagccccttgagggttaggtattattattatctccactttacaaatgagattaaagcttagagagctcgagtcttgcccaggatttcaagcttgtcaggagtgggagctgcgaggccaagcatttagatttcaggagtcctgctcttaatctctaagctgtgttgatgccgtgacttctaaaaagaaagagtgaaatcccgggattgctggtcccacaggagaagaataagagggtggtgaagatggcaatgagtggaatccacctcagtatcttccctgaccctcataaggtgtaatcagatccttcagttatcatattttatattgattagaagagtgcattaaaaamcaataaatagaaaaaagagaagaaaataaggaaccaatgtagagaacataaaaatagaaattaaatacatgtccttatgaggatatatgggtgtgtatgtctacatataaaacaatagaaaattctatctcctatatacctatcgacattctgattacctgtatgtgttcttagaatctagagctttgggccgggcatggtggctcacgcctgtaatcccagcactttgggaggccaaggcaggcggatcatgaggtcaagagatcgagaccatcctggccaacatggtgaaatacaaaattagccagggtggtggcaggcgcttgtagtcccagctacttgggaggctgaggcaggagaatggcgtgaactcgggaggaggtggagcttgcagtgcgctgagattgcgccactgcactccagcctgggcgacagagtgagactccatctcaaaaaaaaaaaaaaaaaaaaaa

SEQ ID NO: 41420 - DNA, 1244 bp, Homo sapiens
agcaacctctgcctcctgggttcatgcaattctcgtgcctcagcttcccaagtagctgggattacaggcatgcaccaccacccttggctaatttttgtatttttagtagagatggggtttcactatgttgaccaggctggtcttgaactcctgacctcaggtgatccacccgtcttggcctcccaaagtgctgggattacaggcattagccaccgtgcccaggctctcctgagtttttatactgcagcataaagagctttgcctcagagatgagattatcagccacactgacaacatctctcatcccatggccttcattctaaaggattctggttcagagtccaaaccctggagcagacagatgcctgtgtgaccttgggcaggcttcttaaattttccctctgggttccctcatccatatcatagggacataacaatagtacatacctcaaagagttgttcaaagactatacagtgtaggtaagatgcttagaacagtgcctggcatgtagtgagcatgatataaagtgctggtttttactactatcatacgaaaatcagggattctagttcttgttttggtggccaacttaacgttttctcccactggtgtttagagtgtttgctctcatgcatatgagcaactcctcactgtctcaagttaagcttttcatgtgacagtcactccttccttactcagcacagggataagggatgagggggagtactagttcattttcacactgctgataaacacatacctgagactgggcaatttacaatggaaagaggtttaatggagaactcacagttccatgtgactggggaagcctcataatcatggtggaaggctaggaggagcaagtcacatcttacctggatggcagcaggcaaagagagcttgtgcatggcaactccccyttataaatccatcagatatcgtgagacttattcactatcatgagaacagcacaggaaagacctgctcccatgattcaattacctcccaccaggtcccaccaacatatggaaattcaagatgatatttgagtgggacacagccaagccatattggggggaaagtggaactggggctcctgggggagtcttcccttgagagtgagtggctaacatgcaacctgagtttttagtaggccctgtaaatcccacgtgaatggaaaccctatatatcatgaaaaggatagaaatgtggggacctgttaatactacattaacgtatataa

SEQ ID NO: 41421 - DNA, 1244 bp, Homo sapiens
agcaacctctgcctcctgggttcatgcaattctcgtgcctcagcttcccaagtagctgggattacaggcatgcaccaccacccttggctaatttttgtatttttagtagagatggggtttcactatgttgaccaggctggtcttgaactcctgacctcaggtgatccacccgtcttggcctcccaaagtgctgggattacaggcattagccaccgtgcccaggctctcctgagtttttatactgcagcataaagagctttgcctcagagatgagattatcagccacactgacaacatctctcatcccatggccttcattctaaaggattctggttcagagtccaaaccctggagcagacagatgcctgtgtgaccttgggcaggcttcttaaattttccctctgggttccctcatccatatcatagggacataacaatagtacatacctcaaagagttgttcaaagactatacagtgtaggtaagatgcttagaacagtgcctggcatgtagtgagcatgatataaagtgctggtttttactactatcatacgaaaatcagggattctagttcttgttttggtggccaacttaacgttttctcccactggtgtttagagtgtttgctctcatgcatatgagcaactcctcactgtctcaagttaagcttttcatgtgacagtcactccttccttactcagcacagggataagggatgagggggagtactagttcattttcacactgctgataaacacatacctgagactgggcaatttacaatggaaagaggtttaatggagaactcacagttccatgtgactggggaagcctcataatcatggtggaaggctaggaggagcaagtcacatcttacctggatggcagcaggcaaagagagcttgtgcatggcaactcccccttataaatccatcagatatcgtgagacttattcactatcatgagaacagcacaggaaagacctgctcccatgattcaattacctcccaccaggtcccaccaacatatggaaattcaagatgatatttgagtgggacacasccaagccatattggggggaaagtggaactggggctcctgggggagtcttcccttgagagtgagtggctaacatgcaacctgagtttttagtaggccctgtaaatcccacgtgaatggaaaccctatatatcatgaaaaggatagaaatgtggggacctgttaatactacattaacgtatataa

SEQ ID NO: 41422 - DNA, 435 bp, Homo sapiens
tttagttcaattccagaagcatatatagccatgaaggaagcttgagctatgagttaataggacccaggtgcctaagttgctgaccagtcctgtaactttgggcaaagcactctgccctctgtgcttcaatatccccatcttaggtgggcactatgctatgggagggtaakgcggaggatcacatgagaccaggagtgggagaccagcctaggcaacacagggagaccctgtttctagaaaacttttttttttttctgagacagagtttctctctgtcacccaggctgcagcacagtggtacaatcactgatcactgcagccttgaactcctgggctcaagccatcctcccacctcagcctcccgaatacctgggactacaatgccgggccaccatgccaggctaattttcttttttggggggtggtgggggtaga

SEQ ID NO: 41423 - DNA, 541 bp, Homo sapiens
aatatgatcacacrctatttcccctcccaatgagccaaagagaaacctggcatttccagcttaatcagtaattcctcctcactcatcatcgtcactcttaagaaagatttgttctgtgtctaaacgtcatggaaatttttttcaggcagcttcagtaagcagataaaaaggatggtaaggggtggaaggaggagaggaaaagcaagagtcgagcagatcttccaagagtagattaaatcagtctgcattaaaagagcacaaagtaggtgtctaagggcgagcagagaattggggcacaagagaagagggttagaaagacagttttgtgaggctgtttggtgaccaagatggtctgcaacacctgggcatgttgaaaaatgggaaaggaaaaaaaaggagggcttgtgaattgcattttctttcattgcttccaggagatgttagaggagagtggagtttctatttaattatttttaacatctctgaactgtgcttctttaaatgctttctgcttcagaattgagtaccaaggatcacactt

SEQ ID NO: 41424 - DNA, 541 bp, Homo sapiens
aatatgatcacacactatttcccctcccaatgagccaaagagaaacctggcatttccagcttaatcagtaattcctcctcactcatcatcgtcactcttaagaaagatttgttctgtgtctaaacgtcatggaaatttttttcaggcagcttcagtaagcagataaaaaggatggtaaggggtggaaggaggagaggaaaagcaagagtcgagcagatcttccaagagtagattaaatcagtctgcattaaaagagcacaaagtaggtgtctaagggcgagcagagaattggggcacaagagaagagggttagaaagacagttttgtgagrctgtttggtgaccaagatggtctgcaacacctgggcatgttgaaaaatgggaaaggaaaaaaaaggagggcttgtgaattgcattttctttcattgcttccaggagatgttagaggagagtggagtttctatttaattatttttaacatctctgaactgtgcttctttaaatgctttctgcttcagaattgagtaccaaggatcacactt

SEQ ID NO: 41425 - DNA, 618 bp, Homo sapiens
cttccagtttattccatgataacttgaaagatcatttaagacttaatgcaatgatttcctcctttatgtcagggtagcctaaaccatttctgttctcataatacctgtggttacttctctcctagcaattgcactaggttgtaatttatgatttacttctatgttccttttattaccctatgaatgatttaaagacagggatagtgttttttattatggwgttttgatgcctaggaatacctgggatacagtaatgacacaaaaatgatttatataaggaatgcttatgtcttatgtaaagtgcaccaatgatagagagtaaaattgcttctattttatcctttttaaaaggatgatgatatatattattaatacctcactaaagatgaaactgaagaccagtttaatatattttggggtctcttttatcattaataatgcaattctgaagccatgtgatctcacatacaataaaaaaagaaatcatacctcaatcaaacccttcattggcagttatagactttaaaagttaaaatcaggtgaaattgccttaagttaaccttaatgctgcattagcttaaatgtattatctgacaatatgcgataaatttgtttctt

SEQ ID NO: 41426 - DNA, 554 bp, Homo sapiens
agctgggcacacaccacagaagagtattgaagagaagggaatataggaagctcggaactctcattgagaaagatacttggccagggaagagaattgcttgagaccaggtgttcaagaccagcctgggccacacagtgagaccctgtgtctaccaagaaaaaaaaaaaaagaaagaaagaaaacaaaaagaaagaatattcctggcctctcatgtggaggaaccttcccagactctctgtgttctcatatctctggtttgggataaaggaaaagcccactttttcccattctgcactttttgccctacgcagcaagcttccgaagggccgggtctgtccttttgggaggcctctatggtgtgtggtttttcaacactgcctggggmtggtgcattcatctgtctctatcaaaggggaaggcttattagtcagtgaagtcagctgcaaatccaaggccatattttctgatcagctttattggtaataaagcagatattgtgataccaaaacatgtaatttctgcctttatcactcaggagatcatgaccctagaaa

SEQ ID NO: 41427 - DNA, 759 bp, Homo sapiens
aagccacaaaatataacccgcatgtaaggagttgaaagttgtatattacctcttgaggatagaaaatctgcacaaattatttgtgctgtgccagtaacaattttccagaatttctcacctgcccaataagttaaggagatgttcgataatgattgaaaagaaggctactttatttttaattacaaataaataaaaaatcatgtcaaggatgctaggactatgaacttttccatgtaccagtaatgaagtcaaattatatgatgaatgctatatattagcaatagcataaaaactataaaacatctagataaataaataaacatgagaaatatttataatatataaataaacrtaaaatatttataatatataataggaaaactagtatgaagatactataaaatgttactgaatgtcatacaactatgtttctgaattagatgaagtaatattgtagtagctaactctgtattaattacttaaaaatttaacaaacttttacacaattctgcttaaaagtctcagtgatatttttagaataaattctaatattagaagtaagtctaaatttaacaccaagaaattggtgataaaccgtcaaattggcaagtgattttaaaggcaccattattttttagcataaaaggaaataaacaattataaaaattattgagtgaggatcttctttcagtgaacaatttcacattaactattaaaatcttttcagaaattaatagccttagaatgttatctatcttt

SEQ ID NO: 41428 - DNA, 759 bp, Homo sapiens
aagccacaaaatataacccgcatgtaaggagttgaaagttgtatattacctcttgaggatagaaaatctgcacaaattatttgtgctgtgccagtaacaattttccagaatttctcacctgcccaataagttaaggagatgttcgataatgattgaaaagaaggctactttatttttaattacaaataaataaaaaatcatgtcaaggatgctaggactatgaacttttccatgtaccagtaatgaagtcaaattatatgatgaatgctatatattagcaatagcataaaaactataaaacatctagataaataaataaacatgagaaatatttataatatataaataaacataaaatatttataatatataataggaaaactagtatgaagatactataaaatgttactgaatgtcatacaactatgtttctgaattagatgaagtaatattgtagtagctaactctgtattaattacttaaaaatttaacaaacttttacacaattctgcttaaaagtctcagtgatatttttagaataaattctaatattagaagtaagtctaaatttaacaccaagaaattgrtgataaaccgtcaaattggcaagtgattttaaaggcaccattattttttagcataaaaggaaataaacaattataaaaattattgagtgaggatcttctttcagtgaacaatttcacattaactattaaaatcttttcagaaattaatagccttagaatgttatctatcttt

SEQ ID NO: 41429 - DNA, 759 bp, Homo sapiens
aagccacaaaatataacccgcatgtaaggagttgaaagttgtatattacctcttgaggatagaaaatctgcacaaattatttgtgctgtgccagtaacaattttccagaatttctcacctgcccaataagttaaggagatgttcgataatgattgaaaagaaggctactttatttttaattacaaataaataaaaaatcatgtcaaggatgctaggactatgaacttttccatgtaccagtaatgaagtcaaattatatgatgaatgctatatattagcaatagcataaaaactataaaacatctagataaataaataaacatgagaaatatttataatatataaataaacataaaatatttataatatataataggaaaactagtatgaagatactataaaatgttactgaatgtcatacaactatgtttctgaattagatgaagtaatattgtagtagctaactctgtattaattacttaaaaatttaacaaacttttacacaattctgcttaaaagtctcagtgatatttttagaataaattctaatattagaagtaagtctaaatttaacaccaagaaattggtgataaaccgtcaamttggcaagtgattttaaaggcaccattattttttagcataaaaggaaataaacaattataaaaattattgagtgaggatcttctttcagtgaacaatttcacattaactattaaaatcttttcagaaattaatagccttagaatgttatctatcttt

SEQ ID NO: 41430 - DNA, 759 bp, Homo sapiens
aagccacaaaatataacccgcatgtaaggagttgaaagttgtatattacctcttgaggatagaaaatctgcacaaattatttgtgctgtgccagtaacaattttccagaatttctcacctgcccaataagttaaggagatgttcgataatgattgaaaagaaggctactttatttttaattacaaataaataaaaaatcatgtcaaggatgctaggactatgaacttttccatgtaccagtaatgaagtcaaattatatgatgaatgctatatattagcaatagcataaaaactataaaacatctagataaataaataaacatgagaaatatttataatatataaataaacataaaatatttataatatataataggaaaactagtatgaagatactataaaatgttactgaatgtcatacaactatgtttctgaattagatgaagtaatattgtagtagctaactctgtattaattacttaaaaatttaacaaacttttacacaattctgcttaaaagtctcagtgatatttttagaataaattctaatattagaagtaagtctaaatttaacaccaagaaattggtgataaaccgtcaaattggcaagtgattttaaaggcaccattattttttagcataaaaggaaataaamaattataaaaattattgagtgaggatcttctttcagtgaacaatttcacattaactattaaaatcttttcagaaattaatagccttagaatgttatctatcttt

SEQ ID NO: 41431 - DNA, 604 bp, Homo sapiens
tgcatggctggtaaaaggaacaaataatgtactcatgccctttgtttcttagaaatagctacagctgggcaaagcccttggatgtcagaaaaaaaatgaagttgtatttttcatgccttctgattaacttccaatgcctcccaagcaccagtaaagcaaatgaagagtgctatcttaagctaaacattttgttagtaaaaaaaaatctaataattgtcagaggacacaaatcaaaagctaatcatgaaaagagtttccatattctgttttcaccctaattcagtacattaagcataaggtgagaaaaataattgcaagaatgaattttttgaatgtattatttctataaccaagaatgactctgacttcagtgtttgtgtgatgtgtatgtatgtgcgtgtgtgtgtgttgtgtaacttcaatgycacaatattttatgtcaggttgtttggattcagacctcataaattacttgctgtggggccttgagaaagtcaacccctgtgagctgagtttactcttatgtaaaatcgggacagtgatacctatctcagaaactgcagacatatctgtgatgttgaagccctgcataaatgatagtttt

SEQ ID NO: 41432 - DNA, 636 bp, Homo sapiens
ccaagtgataaacagataatggggaactctgatgatgatataaccggagtaaaataagccagacaactgcacctgcttcttttttaggtcttaagccagagaggcaaatgagtacctgcatttcacaagtatctgggatagcagatgatgcttggctccagtgttaggagataagcaagcaacgactcagcaggtctgctcagccgtggacacccccaggaacctctagccgttttgggcagttggtggagaatttgtgatcctttgcatccttaaaatagatttttcaaatttccttattttatctacttcttgataaatctcttcccaaggccwtgtgtctcggttgccggacaagcaattagttgttataaaataatgaatattaatgtaaccttaaaatcttgactaagagactgtgcaaaaactgaatttatgttattgaatcagattaatatgttcagaaacaaatttctatagaaatcagaaagtttcaaatattcttatcaaatgggagaattttcaactaaaattataataaaactagttttctttttacttgttagatggatctttctgtaattacttgtaattatattaatatgagtatcattttattggctcagtggctcattt

SEQ ID NO: 41433 - DNA, 636 bp, Homo sapiens
ccaagtgataaacagataatggggaactctgatgatgatataaccggagtaaaataagccagacaactgcacctgcttcttttttaggtcttaagccagagaggcaaatgagtacctgcatttcacaagtatctgggatagcagatgatgcttggctccagtgttaggagataagcaagcaacgactcagcaggtctgctcagccgtggacacccccaggaacctctagccgttttgggcagttggtggagaatttgtgatcctttgcatccttaaaatagatttttcaaatttccttattttatctacttcttgataaatctcttcccaaggccttgtgtctcggttgccrgacaagcaattagttgttataaaataatgaatattaatgtaaccttaaaatcttgactaagagactgtgcaaaaactgaatttatgttattgaatcagattaatatgttcagaaacaaatttctatagaaatcagaaagtttcaaatattcttatcaaatgggagaattttcaactaaaattataataaaactagttttctttttacttgttagatggatctttctgtaattacttgtaattatattaatatgagtatcattttattggctcagtggctcattt

SEQ ID NO: 41434 - DNA, 1151 bp, Homo sapiens
attcagatggttgggggacttagaattttatttatggcttacagtagaatgagaacttaaagacacttgcaaaggaatctgagttcagaatccctttaaaaatatatttttgattagttgtagagagtgggattaacctgattcttcaggtcataatggacttgtaatgggcccctgcaagggtcctttctttgttatgctgtattatgagtgagattacatcaagtcatgttacattatgccacattgtggaatttctactcttcctcagctgtcttgactcctgctgccctcccctagattcccattcttgttgattacccttaaacagatgtgtacccttgtagatggtgagttttctgttttcaattcacctaaatggtgttaatttatgaatctcattcttactccttttttctcttcacttttttttggtagactattcatactgctgagtatatacctagtttgggtcttttttgaccacagcatcataatccacagtctatatttttccacacgtttcttattcatttcccataatgatagcacaattgtttcttgctgcatcacaaaacgccccaaaggtttgtgcctgaagatgacactttacttgctcatgattctgtgggactacggtttgagagctgagcagttcttccagcctggcccagggtctctcatatgcctgtggccatctggttgctcggcaggggttggatcatctcaggcagctcctcagtaacatgtctggaggcaagtgctggctatcttctggactctcttctggactgtgtgtcaccagtgtctagcaagtagctttggctcctttacacacccccatgtacaagaactttcaagcctctgctatatcatgtttgctaatatcttatcggcaaaagcaattcaagtggccaacctgagagtgtgtaaagatgggtatgcatacagggaggtgcaattcatcaggagctgttgctgtaacaacctaccacagacattgggataccttwacatcctgctacccaaacagatggataggctagtacgtgagtcttacaaatctgtttgagttgtgtgtgtgtgtgtgtgtgtgtgtgtgtgtgtgtgtgtgttttctgggaattatagctaggagtgagactactgga

SEQ ID NO: 41435 - DNA, 1151 bp, Homo sapiens
attcagatggttgggggacttagaattttatttatggcttacagtagaatgagaacttaaagacacttgcaaaggaatctgagttcagaatccctttaaaaatatatttttgattagttgtagagagtgggattaacctgattcttcaggtcataatggacttgtaatgggcccctgcaagggtcctttctttgttatgctgtattatgagtgagattacatcaagtcatgttacattatgccacattgtggaatttctactcttcctcagctgtcttgactcctgctgccctcccctagattcccattcttgttgattacccttaaacagatgtgtacccttgtagatggtgagttttctgttttcaattcacctaaatggtgttaatttatgaatctcattcttactccttttttctcttcacttttttttggtagactattcatactgctgagtatatacctagtttgggtcttttttgaccacagcatcataatccacagtctatatttttccacacgtttcttattcatttcccataatgatagcacaattgtttcttgctgcatcacaaaacgccccaaaggtttgtgcctgaagatgacactttacttgctcatgattctgtgggactacggtttgagagctgagcagttcttccagcctggcccagggtctctcatatgcctgtggccatctggttgctcggcaggggttggatcatctcaggcagctcctcagtaacatgtctggaggcaagtgctggctatcttctggactctcttctggactgtgtgtcaccagtgtctagcaagtagctttggctcctttacacacccccatgtacaagaactttcaagcctctgctatatcatgtttgctaatatcttatcggcaaaagcaattcaagtggccaacctgagagtgtgtaaagatgggtatgcatacagggaggtgcaattcatcaggagctgttgctgtaacaacctaccacagacattgggatacctttacatcctgctacccaaacagatggataggctmgtacgtgagtcttacaaatctgtttgagttgtgtgtgtgtgtgtgtgtgtgtgtgtgtgtgtgtgtgtgttttctgggaattatagctaggagtgagactactgga

SEQ ID NO: 41436 - DNA, 1151 bp, Homo sapiens
attcagatggttgggggacttagaattttatttatggcttacagtagaatgagaacttaaagacacttgcaaaggaatctgagttcagaatccctttaaaaatatatttttgattagttgtagagagtgggattaacctgattcttcaggtcataatggacttgtaatgggcccctgcaagggtcctttctttgttatgctgtattatgagtgagattacatcaagtcatgttacattatgccacattgtggaatttctactcttcctcagctgtcttgactcctgctgccctcccctagattcccattcttgttgattacccttaaacagatgtgtacccttgtagatggtgagttttctgttttcaattcacctaaatggtgttaatttatgaatctcattcttactccttttttctcttcacttttttttggtagactattcatactgctgagtatatacctagtttgggtcttttttgaccacagcatcataatccacagtctatatttttccacacgtttcttattcatttcccataatgatagcacaattgtttcttgctgcatcacaaaacgccccaaaggtttgtgcctgaagatgacactttacttgctcatgattctgtgggactacggtttgagagctgagcagttcttccagcctggcccagggtctctcatatgcctgtggccatctggttgctcggcaggggttggatcatctcaggcagctcctcagtaacatgtctggaggcaagtgctggctatcttctggactctcttctggactgtgtgtcaccagtgtctagcaagtagctttggctcctttacacacccccatgtacaagaactttcaagcctctgctatatcatgtttgctaatatcttatcggcaaaagcaattcaagtggccaacctgagagtgtgtaaagatgggtatgcatacagggaggtgcaattcatcaggagctgttgctgtaacaacctaccacagacattgggatacctttacatcctgctacccaaacagatggataggctagtacgtgagtcttacaaatctgtttgagttgtgtgtgtgtgtgtgtgtgtgtgtgtgtgtgtgtgkgtgttttctgggaattatagctaggagtgagactactgga

SEQ ID NO: 41437 - DNA, 1151 bp, Homo sapiens
attcagatggttgggggacttagaattttatttatggcttacagtagaatgagaacttaaagacacttgcaaaggaatctgagttcagaatccctttaaaaatatatttttgattagttgtagagagtgggattaacctgattcttcaggtcataatggacttgtaatgggcccctgcaagggtcctttctttgttatgctgtattatgagtgagattacatcaagtcatgttacattatgccacattgtggaatttctactcttcctcagctgtcttgactcctgctgccctcccctagattcccattcttgttgattacccttaaacagatgtgtacccttgtagatggtgagttttctgttttcaattcacctaaatggtgttaatttatgaatctcattcttactccttttttctcttcacttttttttggtagactattcatactgctgagtatatacctagtttgggtcttttttgaccacagcatcataatccacagtctatatttttccacacgtttcttattcatttcccataatgatagcacaattgtttcttgctgcatcacaaaacgccccaaaggtttgtgcctgaagatgacactttacttgctcatgattctgtgggactacggtttgagagctgagcagttcttccagcctggcccagggtctctcatatgcctgtggccatctggttgctcggcaggggttggatcatctcaggcagctcctcagtaacatgtctggaggcaagtgctggctatcttctggactctcttctggactgtgtgtcaccagtgtctagcaagtagctttggctcctttacacacccccatgtacaagaactttcaagcctctgctatatcatgtttgctaatatcttatcggcaaaagcaattcaagtggccaacctgagagtgtgtaaagatgggtatgcatacagggaggtgcaattcatcaggagctgttgctgtaacaacctaccacagacattgggatacctttacatcctgctacccaaacagatggataggctagtacgtgagtcttacaaatctgtttgagttgtgtgtgtgtgtgtgtgtgtgtgtgtgtgtgtgtgtktgttttctgggaattatagctaggagtgagactactgga

SEQ ID NO: 41438 - DNA, 1151 bp, Homo sapiens
attcagatggttgggggacttagaattttatttatggcttacagtagaatgagaacttaaagacacttgcaaaggaatctgagttcagaatccctttaaaaatatatttttgattagttgtagagagtgggattaacctgattcttcaggtcataatggacttgtaatgggcccctgcaagggtcctttctttgttatgctgtattatgagtgagattacatcaagtcatgttacattatgccacattgtggaatttctactcttcctcagctgtcttgactcctgctgccctcccctagattcccattcttgttgattacccttaaacagatgtgtacccttgtagatggtgagttttctgttttcaattcacctaaatggtgttaatttatgaatctcattcttactccttttttctcttcacttttttttggtagactattcatactgctgagtatatacctagtttgggtcttttttgaccacagcatcataatccacagtctatatttttccacacgtttcttattcatttcccataatgatagcacaattgtttcttgctgcatcacaaaacgccccaaaggtttgtgcctgaagatgacactttacttgctcatgattctgtgggactacggtttgagagctgagcagttcttccagcctggcccagggtctctcatatgcctgtggccatctggttgctcggcaggggttggatcatctcaggcagctcctcagtaacatgtctggaggcaagtgctggctatcttctggactctcttctggactgtgtgtcaccagtgtctagcaagtagctttggctcctttacacacccccatgtacaagaactttcaagcctctgctatatcatgtttgctaatatcttatcggcaaaagcaattcaagtggccaacctgagagtgtgtaaagatgggtatgcatacagggaggtgcaattcatcaggagctgttgctgtaacaacctaccacagacattgggatacctttacatcctgctacccaaacagatggataggctagtacgtgagtcttacaaatctgtttgagttgtgtgtgtgtgtgtgtgtgtgtgtgtgtgtgtgtgtgkgttttctgggaattatagctaggagtgagactactgga

SEQ ID NO: 41439 - DNA, 1151 bp, Homo sapiens
attcagatggttgggggacttagaattttatttatggcttacagtagaatgagaacttaaagacacttgcaaaggaatctgagttcagaatccctttaaaaatatatttttgattagttgtagagagtgggattaacctgattcttcaggtcataatggacttgtaatgggcccctgcaagggtcctttctttgttatgctgtattatgagtgagattacatcaagtcatgttacattatgccacattgtggaatttctactcttcctcagctgtcttgactcctgctgccctcccctagattcccattcttgttgattacccttaaacagatgtgtacccttgtagatggtgagttttctgttttcaattcacctaaatggtgttaatttatgaatctcattcttactccttttttctcttcacttttttttggtagactattcatactgctgagtatatacctagtttgggtcttttttgaccacagcatcataatccacagtctatatttttccacacgtttcttattcatttcccataatgatagcacaattgtttcttgctgcatcacaaaacgccccaaaggtttgtgcctgaagatgacactttacttgctcatgattctgtgggactacggtttgagagctgagcagttcttccagcctggcccagggtctctcatatgcctgtggccatctggttgctcggcaggggttggatcatctcaggcagctcctcagtaacatgtctggaggcaagtgctggctatcttctggactctcttctggactgtgtgtcaccagtgtctagcaagtagctttggctcctttacacacccccatgtacaagaactttcaagcctctgctatatcatgtttgctaatatcttatcggcaaaagcaattcaagtggccaacctgagagtgtgtaaagatgggtatgcatacagggaggtgcaattcatcaggagctgttgctgtaacaacctaccacagacattgggatacctttacatcctgctacccaaacagatggataggctagtacgtgagtcttacaaatctgtttgagttgtgtgtgtgtgtgtgtgtgtgtgtgtgtgtgtgtgtgtkttttctgggaattatagctaggagtgagactactgga

SEQ ID NO: 41440 - DNA, 1951 bp, Homo sapiens
ctccccagcagcgctgggaataggcagcagcagggtgaggatggaagcaggaggagcaatcaggatgcttccacggtgtcccaagcaagagctgatggtggtctgcaccaggatggcagaaacaggcagtgaggtggggtataagagagtcaagaaggactccaaagtgtttggcctgaacacctgtaagagtggcgttgccgcttactgaaggaaatggttaattggaaaaaaccaaaagtttgttttatgacttgactaaacaggaggagaacaaagatgatgcaaaaggagaagtcagggacagcatctagattcctgaaggagaaaggggtctgcttctggccttggcagaggtggcttttcctcacaactgtgttcttgatcctttggaacatgggacaaccattggggtccctgaggctgctatagtcacatgtcttcttccactggagatactttctttaccttgtggtctcttcgttttgatgcctcaggtaacacaggccaggactgccctggaaatgagaaaactgaagggtcaatgcctcatcacaagtgacagccatgattgagaacacagggctgtcatatcttccatttcatcgagagggactagaaattcagatttttatgcaaaatcttccagtcttcaaatactgtcatgcaatagtgcagtggcataatcatggctcactgcagcctcaactgccccagctcaagtgattcttccacctcggcctcccaagtagctaggaccacaggtgggcatcatcacacccggctactttttttttattatttgtagagaccaagtcttgccatgttgcccaggctagtcttgaactcctgggctcagcctcccaaagtactggggttacaggtgtgagtcaccaattcaattttgtttaaaaaaattatatagaccacaaaacacaacagtggcctggaggtggcctgagggccgccactatgcaatcacagctttagatcatgagcttgtgttcctttctgactcactctccctgcctgtgaagcggcgttgaatatctcacacatctgctgggaggcagaagaattagaccgtgtgagggatwaggcttatcaacttcaggatctaccgaaacagagtggcgttactgctgtgggttattaaagccatcaagcctgcggtgcaatatcccttcatgaatctttgttgacaccgccaacagtgcaagtctctacactagagtgcaattcagttactcacattactcagttatttagctgaaactcacttatttatttcccacagcacctaacagtgcctgactcacaatacataatctgaaagtagttgctgtaggtgacgttagtcatttattcactcattaactccactaggattttttttcctttggtaccaattatgtgcctactgttgcccgggggccactatggaaaatacccagcctcaaccgcacccaggtgaccatccaggtgtgaagaacacacggacccctgagcgctcagtggaaagaggactgtcactgccaaggaagtaaatccagctgtccaggtttgcctggaactgaggagtgtctcagaatatgggacttcaagtgctggaaccaggacagtccaaagtaaagcaggattgccggtcaccctgagtagaataactaatagtcacaaacatagactcaaaatcagacatcgcgcagtcacccctttcccactgtcctggctgtgtgatcttagacaagttacttaacctgtccaagcctttgttttcttagttataaaatgagaatctatcttgtgaagtgctttgaaggactaaatgagaaaatactcactgtaaacattcaataaatggcagccaccatcatcggcatgattcctggtaaagggggaaaactgtggttctccgacattcccaacacattgtgtttgtccttttgtggcg

SEQ ID NO: 41441 - DNA, 1951 bp, Homo sapiens
ctccccagcagcgctgggaataggcagcagcagggtgaggatggaagcaggaggagcaatcaggatgcttccacggtgtcccaagcaagagctgatggtggtctgcaccaggatggcagaaacaggcagtgaggtggggtataagagagtcaagaaggactccaaagtgtttggcctgaacacctgtaagagtggcgttgccgcttactgaaggaaatggttaattggaaaaaaccaaaagtttgttttatgacttgactaaacaggaggagaacaaagatgatgcaaaaggagaagtcagggacagcatctagattcctgaaggagaaaggggtctgcttctggccttggcagaggtggcttttcctcacaactgtgttcttgatcctttggaacatgggacaaccattggggtccctgaggctgctatagtcacatgtcttcttccactggagatactttctttaccttgtggtctcttcgttttgatgcctcaggtaacacaggccaggactgccctggaaatgagaaaactgaagggtcaatgcctcatcacaagtgacagccatgattgagaacacagggctgtcatatcttccatttcatcgagagggactagaaattcagatttttatgcaaaatcttccagtcttcaaatactgtcatgcaatagtgcagtggcataatcatggctcactgcagcctcaactgccccagctcaagtgattcttccacctcggcctcccaagtagctaggaccacaggtgggcatcatcacacccggctactttttttttattatttgtagagaccaagtcttgccatgttgcccaggctagtcttgaactcctgggctcagcctcccaaagtactggggttacaggtgtgagtcaccaattcaattttgtttaaaaaaattatatagaccacaaaacacaacagtggcctggaggtggcctgagggccgccactatgcaatcacagctttagatcatgagcttgtgttcctttctgactcactctccctgcctgtgaagcggcgttgaatatctcacacatctgctgggaggcagaagaattagaccgtgtgagggattaggcttatcaactycaggatctaccgaaacagagtggcgttactgctgtgggttattaaagccatcaagcctgcggtgcaatatcccttcatgaatctttgttgacaccgccaacagtgcaagtctctacactagagtgcaattcagttactcacattactcagttatttagctgaaactcacttatttatttcccacagcacctaacagtgcctgactcacaatacataatctgaaagtagttgctgtaggtgacgttagtcatttattcactcattaactccactaggattttttttcctttggtaccaattatgtgcctactgttgcccgggggccactatggaaaatacccagcctcaaccgcacccaggtgaccatccaggtgtgaagaacacacggacccctgagcgctcagtggaaagaggactgtcactgccaaggaagtaaatccagctgtccaggtttgcctggaactgaggagtgtctcagaatatgggacttcaagtgctggaaccaggacagtccaaagtaaagcaggattgccggtcaccctgagtagaataactaatagtcacaaacatagactcaaaatcagacatcgcgcagtcacccctttcccactgtcctggctgtgtgatcttagacaagttacttaacctgtccaagcctttgttttcttagttataaaatgagaatctatcttgtgaagtgctttgaaggactaaatgagaaaatactcactgtaaacattcaataaatggcagccaccatcatcggcatgattcctggtaaagggggaaaactgtggttctccgacattcccaacacattgtgtttgtccttttgtggcg

SEQ ID NO: 41442 - DNA, 1951 bp, Homo sapiens
ctccccagcagcgctgggaataggcagcagcagggtgaggatggaagcaggaggagcaatcaggatgcttccacggtgtcccaagcaagagctgatggtggtctgcaccaggatggcagaaacaggcagtgaggtggggtataagagagtcaagaaggactccaaagtgtttggcctgaacacctgtaagagtggcgttgccgcttactgaaggaaatggttaattggaaaaaaccaaaagtttgttttatgacttgactaaacaggaggagaacaaagatgatgcaaaaggagaagtcagggacagcatctagattcctgaaggagaaaggggtctgcttctggccttggcagaggtggcttttcctcacaactgtgttcttgatcctttggaacatgggacaaccattggggtccctgaggctgctatagtcacatgtcttcttccactggagatactttctttaccttgtggtctcttcgttttgatgcctcaggtaacacaggccaggactgccctggaaatgagaaaactgaagggtcaatgcctcatcacaagtgacagccatgattgagaacacagggctgtcatatcttccatttcatcgagagggactagaaattcagatttttatgcaaaatcttccagtcttcaaatactgtcatgcaatagtgcagtggcataatcatggctcactgcagcctcaactgccccagctcaagtgattcttccacctcggcctcccaagtagctaggaccacaggtgggcatcatcacacccggctactttttttttattatttgtagagaccaagtcttgccatgttgcccaggctagtcttgaactcctgggctcagcctcccaaagtactggggttacaggtgtgagtcaccaattcaattttgtttaaaaaaattatatagaccacaaaacacaacagtggcctggaggtggcctgagggccgccactatgcaatcacagctttagatcatgagcttgtgttcctttctgactcactctccctgcctgtgaagcggcgttgaatatctcacacatctgctgggaggcagaagaattagaccgtgtgagggattaggcttatcaacttcaggatctaccgaaacagagtggcgttactgctgtgggttattaaagccatcaagcctgcggtgcaatatcccttcatgaatctttgttgacacygccaacagtgcaagtctctacactagagtgcaattcagttactcacattactcagttatttagctgaaactcacttatttatttcccacagcacctaacagtgcctgactcacaatacataatctgaaagtagttgctgtaggtgacgttagtcatttattcactcattaactccactaggattttttttcctttggtaccaattatgtgcctactgttgcccgggggccactatggaaaatacccagcctcaaccgcacccaggtgaccatccaggtgtgaagaacacacggacccctgagcgctcagtggaaagaggactgtcactgccaaggaagtaaatccagctgtccaggtttgcctggaactgaggagtgtctcagaatatgggacttcaagtgctggaaccaggacagtccaaagtaaagcaggattgccggtcaccctgagtagaataactaatagtcacaaacatagactcaaaatcagacatcgcgcagtcacccctttcccactgtcctggctgtgtgatcttagacaagttacttaacctgtccaagcctttgttttcttagttataaaatgagaatctatcttgtgaagtgctttgaaggactaaatgagaaaatactcactgtaaacattcaataaatggcagccaccatcatcggcatgattcctggtaaagggggaaaactgtggttctccgacattcccaacacattgtgtttgtccttttgtggcg

SEQ ID NO: 41443 - DNA, 654 bp, Homo sapiens
tgtctgtagtcccagctactcgggaggctgaggcaggagaatcacttgaacccgggaggcggaggttgcagtgagccgaaatcgcrccactgcgctccagcctgggcgacaagagcaaaactctgtctccaaaaaaaaaaaaaaaaaagcaatatcattagtttatgttgtccatgaccagcacactgtttcatgcagtagagtatgccctcttactgaaagtttcctggcagaggtttagagagaaccttttgtcaggaatttttagaggtagttcttatagagtgagtggttgacctcagacaaccctaaggcaccttctagtttggagattcttttattctaatactaggcaatatactccagcacatagaagaaggattttagttctcaacatatgtttctagcattgtgaagcatcagagaacaagaaagttgtctaaccagaatggctttacatcacagtgtagcaggacgagccacagtcaaaactcctcagacactggattaaagaaggaagaggctttatttggcttggagcatccaccaacttgcgtcttaagagccgagctccctcaaaaagaaattcttggcccttttaagggcttacaactctaaggggtccacctgaaaggatggtgatagatcaagcaa

SEQ ID NO: 41444 - DNA, 1029 bp, Homo sapiens
gttggaggtgaaggacatatggtgactctggtgtaaccgagaaaaatggtgcaagagcaaagggatctgaggttgctctgatcattgacctaaggccaatgtcttgtgaatagatgcttaagtgcgagctcaagcacattcccctcaggtacatagacccagaatagcttacttatttgttcccataactggtgttgtgggtggcaagggtgtgctgagtcttgtccttaccgggccatgaagaatcttaaaagggaagcagaagttaccagtgttgatttcacaaataggtgctaaccactcacaaataatatttccctcctcactgatgcctagaattttcctggtctctgtaagtgtgagttgcaggggcggggacacatcttaagtgctgtaataatctcagtctcctcatctggaaaatcaaggtgtcattccagctttcggtggctctgattctgctttcaggtccgttcttgagagtgggttttcatcagaagggcctggaagaatgttaagcaactgagagggaaggagggattctttggagggcaaagggctctgcctccctccctgcccccaggccacttgccatcccattgaggagtgaggatgaccacagcaagtcttaggtgattagaggtttaggtagagccatgtatatgtgctccaatgagaagtggttgtttggactagaccagttcagacctgccctgaaagtagcccataggccaatgaggtgggctgagaactctctggttctaccctgtgctgtaaccaacctttcaaggtaatctagcaccagagcagacccaaaactgcagggagaaaaggcagcctcctgggtgcccttcctggtgcatccttctctctgttctayagcaaagcattgaaggagcttctgcctgcaattggcaccgtgaagagcttaacccacgaaggcctggttttgagtcttggtgggtggagcagagattctgataaaactctgttctctcttttctttagccttgaagtttcaggcaggaa

SEQ ID NO: 41445 - DNA, 1193 bp, Homo sapiens
ttttttttgagacggagtctcgctctgttgcccaggctggagtgcagtggctcgatctcggctcactgcaagccccgcctcctgggttcaygccattctcctgcctcagcgtcccgagtagctgggactacaggcgcatgccaccaagcccagctaactttttgtatttttttttttttagtagagatggggtttcactgtgtttgccaggatggtcttgatctcccgacctcgtgatccacctcggcctcccaaagtgctgggattacaggcgtgaccacgcccagccccatatgaacaatttaagtgtacagttaggaagcattaagtgcaatcacattgctgtgcaaccatcaccaccatccatctgcagaactttttcatcttcccaaactgaaactctgcctccatgaaacaacagctccccattttccctcccccagctctggcaatgaccattctgctttctctccttatgaatttgattattctaggtatctcatataagtggagtcatatagtatttgtcctttggagtcttgcctgtcttatggttggttttaatttcattgagacagtcttggtctcatccaacaaattagtctattaagcacctcctgaaataaccacagctaatgttcactgggcacctaccttgtgctggcctgggcgccatgtaagcactgcacaggtattatcctctactccttatgggcactttgggcagcgagtgtttgaggaatgtgaggcacaactaggataacagggctgcagggggaacccaggccgtctgactcccgagtccagcatttcccactctctggccaagtcctgggttctgggatgtctgcttcatggccccctcaccaagccatggggcccccagttaatcacatccctgagtgacctcattttcttctgcacaactgctctgcctttcgcatatccagggagacagaacacccagtctcttccgccacttgcccaaatcaggaaaaagagagatccctgacccctgcttcaactagcatctagttcctaggatgttatctcaactacctgcaaattggtcccactaagactcatttctttcctttggtctgaattattatggtggcatccgaactgactttgttgccctgggctgacccccttccagtctaccctgatgaagaagctgggagcagccaggc

SEQ ID NO: 41446 - DNA, 1193 bp, Homo sapiens
ttttttttgagacggagtctcgctctgttgcccaggctggagtgcagtggctcgatctcggctcactgcaagccccgcctcctgggttcatgccattctcctgcctcagcgtcccgagtagctgggactacaggcgcatgccaccaagcccagctaactttttgtatttttttttttttagtagagatggggtttcactgtgtttgccaggatggtcttgatctcccgacctcgtgatccacctcggcctcccaaagtgctgggattacaggcgtgaccacgcccagccccatatgaacaatttaagtgtacagttaggaagcattaagtgcaatcacattgctgtgcaaccatcaccaccatccatctgcagaactttttcatcttcccaaactgaaactctgcctccatgaaacaacagctccccattttccctcccccagctctggcaatgaccattctgctttctctccttatgaatttgattattctaggtatctcatataagtggagtcatatagtatttgtcctttggagtcttgcctgtcttatggttggttttaatttcattgagacagtcttggtctcatccaacaaattagtctattaagcacctcctgaaataaccacagctaatgttcactgggcacctaccttgtgctggcctgggcgccatgtaagcactgcacaggtattatcctctactccttatgggcactttgggcagcgagtgtttgaggaatgtgaggcacaactaggataacagggctgcagggggaacccaggccgtctgactcccgagtccagcatttcccactctctggccaagtcctgggttctgggatgtctgcttcatggccccctcaccaagccatggggcccccagttaatcacatccctgagtgacctcattttcttctgcacaactgctctgcctttcgcatatccagggagacagaacacccagtctcttccgccacttgcccaaatcaggaaaaagagagatccctgacccctgcttcaactagcrtctagttcctaggatgttatctcaactacctgcaaattggtcccactaagactcatttctttcctttggtctgaattattatggtggcatccgaactgactttgttgccctgggctgacccccttccagtctaccctgatgaagaagctgggagcagccaggc

SEQ ID NO: 41447 - DNA, 543 bp, Homo sapiens
gggggacaccatctcttgctcactttacacagtaagtgccatttccttcacctccatggaaaacatttcgtaaattactaagttgaataacttaaaatataggaygggaacatacattttaaaggaatgcctttgtaaatgagaaattgtttttataaagtgattgatgacttttctttcccattctctctattctattttttattttaaattttaaatgtgagtactagaacttcattgactgggtgacttgcagtagtccagcaataagcccgggcacaccttgtaccctaggtggcgcctcaggcttgggctccctcggtcaccttctcatcagcatctcaaagaagcatctcagcgaaattggcctaactccttccctttcacttcctgggacttgaggaagagagagaaggagccaggagtaaagaaacctacggtagcaggtgggacgcaaatgccccacctcctggccactgccccagtactgttggccaaagtcactgccttttgtttctcgtcagtgaaaatgtgcagtcacaa

SEQ ID NO: 41448 - DNA, 624 bp, Homo sapiens
tggttgtgttaggggggcgggcgcgggagggcaccatctggtagagaacttactgcggtttggctgagttgtataggtgaagctttcattctcaaataaattttaaaagattcttgctcaatataaggatatgggatatagagacaaatgttccagaaaaaaaaaaaaaaaagattaaaaatccacataggcaacaatccttcatcttcttaggrcagtctagtccaggaagcttctcctgcttttgaaggtttttctttgatcttaaaataaatgaggccaggtgcagtggctcatgcctgtaatctcagcattttgggaagtcaaggtgggaggatcacttgaggccaggagcttgagaccagcctgggcaatatagagagatgccatctctacaaaaaaataaaaaaacaaaattagcggccaggcacagtggctcactcctgtaatcccagcactttgggagaccaaggtgggtggatcacttgaggtcaggagttcaagaccagcctggccaacatggtgaaaccccctcttcaccaaaaatacaaaaattagccaggtgtggtggtgcatgcctgtagtcccagctacttgggaggctgaggcaggagagtcacttga

SEQ ID NO: 41449 - DNA, 561 bp, Homo sapiens
attaaaaaatattgtttwaaggatactattttttttttttttttttttttgaggcagagtctcgctgtgtgccccaggctggagtgcagtagtgcagtcttggctcactgtaacctccgtctccctggttcaagtgattgtcctacctcagcctcccaagtagctggggctaccggcatgtgccaccacgcccggctaatttttgtatttttagtagagatggggttttgccatgttggccaggctggtcttgaactcctgacctcaaatgatccaccctgggatcacttgaggtgattacaggcctgagccactgcacccggccagtgactatgtgtttttttttttttaccaagtctcttcagtgtattcaatttagtgctgatagacacaggattcattttcagtgcactcacttttatagatttagtcaatattggattggctacataattaattacattaacaagtacttggggttacacctgcatggcctgacagctctcaactctcctggctccttcttcatttttcctcagtccttttctgtaacagaatgca

SEQ ID NO: 41450 - DNA, 561 bp, Homo sapiens
attaaaaaatattgtttaaakgatactattttttttttttttttttttttgaggcagagtctcgctgtgtgccccaggctggagtgcagtagtgcagtcttggctcactgtaacctccgtctccctggttcaagtgattgtcctacctcagcctcccaagtagctggggctaccggcatgtgccaccacgcccggctaatttttgtatttttagtagagatggggttttgccatgttggccaggctggtcttgaactcctgacctcaaatgatccaccctgggatcacttgaggtgattacaggcctgagccactgcacccggccagtgactatgtgtttttttttttttaccaagtctcttcagtgtattcaatttagtgctgatagacacaggattcattttcagtgcactcacttttatagatttagtcaatattggattggctacataattaattacattaacaagtacttggggttacacctgcatggcctgacagctctcaactctcctggctccttcttcatttttcctcagtccttttctgtaacagaatgca

SEQ ID NO: 41451 - DNA, 561 bp, Homo sapiens
attaaaaaatattgtttaaaggatactwttttttttttttttttttttttgaggcagagtctcgctgtgtgccccaggctggagtgcagtagtgcagtcttggctcactgtaacctccgtctccctggttcaagtgattgtcctacctcagcctcccaagtagctggggctaccggcatgtgccaccacgcccggctaatttttgtatttttagtagagatggggttttgccatgttggccaggctggtcttgaactcctgacctcaaatgatccaccctgggatcacttgaggtgattacaggcctgagccactgcacccggccagtgactatgtgtttttttttttttaccaagtctcttcagtgtattcaatttagtgctgatagacacaggattcattttcagtgcactcacttttatagatttagtcaatattggattggctacataattaattacattaacaagtacttggggttacacctgcatggcctgacagctctcaactctcctggctccttcttcatttttcctcagtccttttctgtaacagaatgca

SEQ ID NO: 41452 - DNA, 324 bp, Homo sapiens
tctgcttcagtttctgatagaaattcacggaactgactgtgggtcagtccgtaagagctagtgaagtttgccactaacactactgcttgagtaacacgtggtagattcarataaatagagttgagaacattgggaacagcatctatagtcaactgaaaaacaagtcaaatgattttgagtgatttttctgtggctcttggtaatttttaccaatactgcccagttgtggtttattcatggatgaatatttgccccatggttatatttccattgtatagtaaataattttcatctaataatttgcttattgaaaattcagctttt

SEQ ID NO: 41453 - DNA, 623 bp, Homo sapiens
aagaaacgtgtccatactgtttccagctgttggttctggataactctcgagtgcgtctcaaacccaaagccaggttgacacccaaaatacagaaacttcttaatcgagaagcgagaaactatacactcagttttaaagaagcaaaaatggtgaaaaagttcaaagactccaaaagtgtattggtaagatttcagttccagtatgtatgagtaaactagaattttcttttctttcacttaaaatcagtttaagaatcagcctcagtataactcagagatttatagtagtatatttggattatcaaaatatatacataaacacttctctaatgattagtgtttcattataaggacagcttayttttatttttcatgattacctaaaccaaacatggtgagctctcaattgttttgagatcccattgttgagcattatttttcacaaatgtgcggatttcttgaactgaccgttatggctccacctaaattgcagttaccactacattattttttcagttaatgctcctttgcttcagatagtactatgttatgtatgtaggtatcatgtcacttcttcagctgtcctcccactccatgtcagagtggatttacaggtatgcccaa

SEQ ID NO: 41454 - DNA, 635 bp, Homo sapiens
atcattttgacaaagtgtaagccttaaaaaatttttttggttaaggtatctggccaggtgcagtggctcacgcctttaatcccagcacttcgggaggccggggcaaggggatcacctgaggtcagaagttcaaaaccaccctggtcaacatggtgaaaccccgtctctactaaaagtaaaaaaattatccaggtgtggtggcatgcacttgtagtcctagctacccaggaggctgaggcacaggaatggcttgaacccaggaagcagaggttgcaatgagccaagatcggtgccactgcactccagcctgggtgacagagcaagatactgtctcaaaaaaaaraaaaaaaaaaaaagtttgtacatcaagttgaatgatgaagaataaaaaggaaaaacaatagtttctacagctgttagggtgatttactaacactgctttaaccctaggtcattcttaattttgttttcttttccccctctcaaaaacactggaaaattttcttaaatctgggaagtatcttggtatgtgtcttaaaaatgatttctcaatgactttttcctccttttttgttttctgttaaaggtgactttgctgttctactaaaggctggcatgaccgttaagcaggctgt

SEQ ID NO: 41455 - DNA, 635 bp, Homo sapiens
atcattttgacaaagtgtaagccttaaaaaatttttttggttaaggtatctggccaggtgcagtggctcacgcctttaatcccagcacttcgggaggccggggcaaggggatcacctgaggtcagaagttcaaaaccaccctggtcaacatggtgaaaccccgtctctactaaaagtaaaaaaattatccaggtgtggtggcatgcacttgtagtcctagctacccaggaggctgaggcacaggaatggcttgaacccaggaagcagaggttgcaatgagccaagatcggtgccactgcactccagcctgggtgacagagcaagatactgtctcaaaaaaaagaaaaaaaaaaaaagtttgtacatcaagttgaatgatgaagaataaaaaggaaaaacaatagtttctacagctgttagggtgatttactaacactgctttaaccctaggtcattcttaattttgttttcttttccccctctcamaaacactggaaaattttcttaaatctgggaagtatcttggtatgtgtcttaaaaatgatttctcaatgactttttcctccttttttgttttctgttaaaggtgactttgctgttctactaaaggctggcatgaccgttaagcaggctgt

SEQ ID NO: 41456 - DNA, 638 bp, Homo sapiens
attaaacaataactccccatttcttcttttcccagccaaacaccattctactttgtctttctgattttgactacacatttaagtggaacatacaatatgtgtccttttgtaactggcttatttcacttaatataatcttatcaaagwtttttcatttatgttgaagcatgtgtcagaatatcacttttttaaagctaaatactattccattgaatgcatataacacatttaggatgttatttaaacccatgcagtaagcccaacttagtagaaccagtctgccaccttgtggaattttaacacaacttcaaattttacaaattgagaagatgactaatttagaaatgatgctactagtgttcaattactagctatttttttggtgtaaatttaaagaactagttttatttaacataactgtgcaagaagtatgtgaagagaaactcaaatgctgctgatgggccaaaatatttgagtacatgtaaagttatttcctattcttggataggaggaatggactacaaacatgaattaagtggtcatggagaaagacgcaaatggctttttatcatataaaagcttacatattacaggatttcaatctcactcatacaagaaaatgcaatttaaaaattgtc

SEQ ID NO: 41457 - DNA, 413 bp, Homo sapiens
ctgattgagtgattaaaagtgtctgctagatctggcaggttgtttggacacagtggctcatgcctgtagtcccagcactttgggaggccaaggtgggaagattacttcagcccaggagtttgagacgagcatcgtcaattatagtgagacattgtctctatagaaaatgaaaaacgtagccaggcacggtggtgcgtgcctgtagtcccacttactcgagaggctgaggcaggaggatcgcttgagcccaggagattgaggctggggtaagctgtgttcacatcactgtactccagcctggrcaacagagcaagaccctgtctcaaaaaaaaataaaaaaaaagcaggtctctgaaagtggtgggtaagggacctggtgtgtgtgtgtgtgtgtgtgtggtgtgtgagtgggg

SEQ ID NO: 41458 - DNA, 641 bp, Homo sapiens
agctgtataatctgatttacattattaggatgctttgtacagaatagagtaaaagagtagaggctgggagagcgtgagaagactttacaaaattctaagcaagagatagtagtgtttctgtctacagtgatagcaatgaaggaggtaggaaacagttgggagtagtctgtttttcatttccccatatgtctagtcttaagatctcaaattaaatatcatttccttaaatactcttccggatatctcttaaacagggccaggtctgtcttaagcactttgttctcttttgtgatacttataaataacaactgccataagctgcatttgcatctccatgtcaaagatagtaactggatcaataagtatttgttgaataaatttaaaaaaataacctatgagaaatcttccttagccccatgtccaggccccattaggataggaaatccctagcagccagtactaaaacttttacagtttaaactttttttggttgtgtaataatatgtttataaaatgtttactagaagcaagcagtgtgtctagatcacttcacttttgagctgctggccacatagtgatgctaagtagacatttggacagttttttccagggratgaatgtctgattatatttaaagttac

SEQ ID NO: 41459 - DNA, 1335 bp, Homo sapiens
gcattttgaaaaggaggcgtggaccctaatgaccaggagttcggcataagcatggccttgtgcaggagggacagtgctttagaagatcatatgttgttttataaatagcaggatttgtagaagtaagtgctctaccaggcccctcccctgaggctgctgagggaggtgaaatctccctcgaatgccttgttcaagagcccagtgttttgtgttctgatataaaatgagggccttggtcactatcaagaatgtctagaccttgaaagggataaggaatttctggtgagtcctgcatggtggcttcagaggggctygccagtgggtggggagagtaatgtggccacacaggtgcctcccgtggtcagagcatagtgtgtggcctggagggatgctgcagcctgtgacgtgtgtcaccactggaattgtgtccgttgagtatatttgaccaggggcatgtttacccattgaagacacatgaaccagtcactctgttggcacagaagcgaagatggaggtcactcacactctgcccaggtcttcagggcagaggtccttggatgtcctgaggtttcgtgggttgtctaggatgaggttggtggcatccgaggtgtactgtgtgtcagaaacatgacttggtttacctgtctgtatgctgaaacgagtttagaggtgcagagaccagtgagacctttctctgtatttggtaactgtggggcatgaaacacccagagtaccctagagggtcaactttgataagaaattgtcgttgccattggccaccagaatgaatggtccaggggttgttgaactctgcatagaagaccaaatgggggaatacattgaaggcctgaatagagcaaaggccaaaggaggatggatttggttcttttttccttgcctgactcctggagccgggaattctcatctttcttctgcttttggacagggattggcatcacaggcttccccgatgctcaggcctttggacttggactggaacttacactattggctttcctgagtctccagcttgcagatttggggacttctcaacctccataattatatgagccaattcttcataatgaatctttcttcctgtctctcattatctctctgtctctgtctgtctctcttatctcctattgtttctgtttctctggagaatcctaatataaaaggacattctagaaataatcaacctgttctatgggaacaaggcatccacaaaaacttagcactcaaatcactcccaatgctgaataagtgtttccccctaaggaagagaagaatgcaaggctgttggctctccccactcctgtttaatatcatgca

SEQ ID NO: 41460 - DNA, 1335 bp, Homo sapiens
gcattttgaaaaggaggcgtggaccctaatgaccaggagttcggcataagcatggccttgtgcaggagggacagtgctttagaagatcatatgttgttttataaatagcaggatttgtagaagtaagtgctctaccaggcccctcccctgaggctgctgagggaggtgaaatctccctcgaatgccttgttcaagagcccagtgttttgtgttctgatataaaatgagggccttggtcactatcaagaatgtctagaccttgaaagggataaggaatttctggtgagtcctgcatggtggcttcagaggggctcgccagtgggtggggagagtaatgtggccacacaggtgcctcccgtggtcagagcatagtgtgtggcctggagggatgctgcagcctgtgacgtgtgtcaccactggaattgtgyccgttgagtatatttgaccaggggcatgtttacccattgaagacacatgaaccagtcactctgttggcacagaagcgaagatggaggtcactcacactctgcccaggtcttcagggcagaggtccttggatgtcctgaggtttcgtgggttgtctaggatgaggttggtggcatccgaggtgtactgtgtgtcagaaacatgacttggtttacctgtctgtatgctgaaacgagtttagaggtgcagagaccagtgagacctttctctgtatttggtaactgtggggcatgaaacacccagagtaccctagagggtcaactttgataagaaattgtcgttgccattggccaccagaatgaatggtccaggggttgttgaactctgcatagaagaccaaatgggggaatacattgaaggcctgaatagagcaaaggccaaaggaggatggatttggttcttttttccttgcctgactcctggagccgggaattctcatctttcttctgcttttggacagggattggcatcacaggcttccccgatgctcaggcctttggacttggactggaacttacactattggctttcctgagtctccagcttgcagatttggggacttctcaacctccataattatatgagccaattcttcataatgaatctttcttcctgtctctcattatctctctgtctctgtctgtctctcttatctcctattgtttctgtttctctggagaatcctaatataaaaggacattctagaaataatcaacctgttctatgggaacaaggcatccacaaaaacttagcactcaaatcactcccaatgctgaataagtgtttccccctaaggaagagaagaatgcaaggctgttggctctccccactcctgtttaatatcatgca

SEQ ID NO: 41461 - DNA, 815 bp, Homo sapiens
agaatccaggtccttcccaccacacctagaacgatctgttgtctgggttcctgcaagcttactggttggtcttctgctcttttctttgctcttctaatctgtactccagaatcatcattctgaatcgcaggtcagagcataacatctctctgcttgaaactccctataggacttcctccgaagtccagaatgaagtcccaggccccttccttgctctccaaggtctgaggtcatccatccccattttcctgaaccaatgttttctgacctcgtggctgacaaatcttcttcccagctgtttccatgacagcaaaactgtactcctcgttcttcacacagcttcctctgctgcactgtttcccgggaatgtgtcatgccacgtgtttaaaaggtttccttctgtacttccttcaggttcctactcaaatgtcagtttttcagatgtttctccctattgccctgtatatagttatactctctaactgctctctatcccttatcctgcattcttctcttttagggttgtattaggccattcttgcattgctataaagaaacacctgrggctgggtactttataaagaaaagaggtttcattggctcacagttctgcaggctgtacaggaagcatggtgctggcatctgctcagcttctggggaggtctcaggaagcttctaatcatggcagaaggtgaagggggagcagatacatcttacatggcaggagcggaagcaagagagggaagggaggaggtgccacacactttcaaacaaccagatcttcagactcactgtcccgaggacagcaccaagcc

SEQ ID NO: 41462 - DNA, 815 bp, Homo sapiens
agaatccaggtccttcccaccacacctagaacgatctgttgtctgggttcctgcaagcttactggttggtcttctgctcttttctttgctcttctaatctgtactccagaatcatcattctgaatcgcaggtcagagcataacatctctctgcttgaaactccctataggacttcctccgaagtccagaatgaagtcccaggccccttccttgctctccaaggtctgaggtcatccatccccattttcctgaaccaatgttttctgacctcgtggctgacaaatcttcttcccagctgtttccatgacagcaaaactgtactcctcgttcttcacacagcttcctctgctgcactgtttcccgggaatgtgtcatgccacgtgtttaaaaggtttccttctgtacttccttcaggttcctactcaaatgtcagtttttcagatgtttctccctattgccctgtatatagttatactctctaactgctctctatcccttatcctgcattcttctcttttagggttgtattaggccattcttgcattgctataaagaaacacctgaggctgggtactttataaagaaaagaggtttcattggctcacagttctgcaggctgtacaggaagcatggtgctggcatctgctcagcttctggggaggtctcaggaagcttctaatcatggcagaaggtgaagggggagcagatacatcttacatggcaggagcrgaagcaagagagggaagggaggaggtgccacacactttcaaacaaccagatcttcagactcactgtcccgaggacagcaccaagcc

SEQ ID NO: 41463 - DNA, 1133 bp, Homo sapiens
atccaaagcaggcaaagcgctctgaccccgacactgactttgagtcttgagatttttttcattcaaatggaaagcagaaggcaagaaagaaagactcagaggagtgacttgtgaattaaggggaaaactcatgccattggccgttcaccaaccaccctggccgtctcactctttgtatgtccaccttagttcacaattgactttccagggaggacaggcaaagaattcaatgtgggagaaacactctcctattatcacaccaacacacagaaggagagattgcaaaaaaaaaaaaaaaaaggaaaatcccaacagcattttttwaaatagggtatttcacaggaactccgagtttttatgccaaaagttccatccataatgcaccatcgatagcacactggctctttacccatcctgtctagagcttctccatgaagtcattacaggggccttgagctattcgccctgcagtagtcagcagcatccatcaaccttctctcccactgaggagatcaaagatgcagcatccatcgaccttctctcccactggggagatcaaagattcagctcagtgccataaatgcaatggttctcaaaatctggtcccagaaccggcatcacctgagaacttgttagaaatacaaattcttgagctccaccccagccctactgaatcagaacttctggggctggggccccagcaatctgttttaccaagctctccaggtgatcctaagccacagtaggtgtcagcaccaggtttagaccagtgggcctcaagtgcttattacatccacctaggagagtgttcaaactcctaacacccaggccacagggcatgcgatgaagaagtcctatgatgagatccgagcctcaggaatgtctaaggctcccgaacagattccattgtgcagccagtcttgagaacagcattctagtggatgcgcttgtcagggaaacaggcttcacttgtgcagtgagactagcaaaggggaaccgaagcgctacttgggtaacaagcccattattgtcagcaaggaggttctgtgatcttggcaggaatgggattttttgcagaggccagagcagttgggaccactatgagccaagtgtgtactgtgtgtacggagtgt

SEQ ID NO: 41464 - DNA, 1134 bp, Homo sapiens
aaaaatgccaatcttttcctttcctcaagaatggaaactgaaaacatacaataaagttatgtacaacagcatttttaatgttcttggcattgttttkaaaataaacgataccttgtctgtagctttctaagtatactgtccacagtgtgctacccatcagttcctcctgctctcctgctccttttataaaaataaaattcctgtctcagcctttcactagggattgttttctatatgtggatacattttcctgttttctagtgcatttgtatggttacacaatgtttaccaattagtttgtttaattacactagtcagcaacggatagaccatccaagtgagtagctaacattgtttcatctcttcgtgtcaaacctcggactttcacttaataaagagccatgccttcaagccaacatgtctcaccatgaagaaccctttgtgtcaacactgtgcaaagggactgcatattgtttaaagtcattggaatacccggatgtttcctcattagaaatgagaaagcagagaatcagtgtggcagctagcattgctttgattaataggcactggttgataggcttcaggtacaggggaaaaaaagcaggattttttatttaaagcactcaattggtgctgaatagccctgctcacttcccagtgtcgcgcatcacaaagaaaggtcgtggcttcttcaaagcttcatctctgatggcagaaagacttgatgttcggcattcagccttctgaccacagaaaaagcttctgcatttggcgattatactgtaagtcaaaggcagactttctgctaagttgaacatttagtctgcctgtaattctctgacaaggtcactttgttctttaacgaagaatcacctccaaaccaatgaagagaagaagaaaaaaggcctcacccaggcaggtgcacatggtaggaacagacaaagaatcacctccaaaccagtgaagagaaggagaaaaaagtcctcctccaggcaggtgcatgtggtaggaaccgagaggcagctgctttcttgtctgagctgtcatgttggagaaagggaggggacggggggagattgggatcttgtccttcctatttgtagtcatgtttcgaattgaagaggatttcccagg

SEQ ID NO: 41465 - DNA, 1134 bp, Homo sapiens
aaaaatgccaatcttttcctttcctcaagaatggaaactgaaaacatacaataaagttatgtacaacagcatttttaatgttcttggcattgttttgaaaataaacgataccttgtctgtagctttctaagtatactgtccacagtgtgctacccatcagttcctcctgctctcctgctccttttataaaaataaaattcctgtctcagcctttcactagggattgttttctatatgtggatacattttcctgttttctagtgcatttgtatggttacacaatgtttaccaattagtttgtttaattacactagtcagcaacggatagaccatccmagtgagtagctaacattgtttcatctcttcgtgtcaaacctcggactttcacttaataaagagccatgccttcaagccaacatgtctcaccatgaagaaccctttgtgtcaacactgtgcaaagggactgcatattgtttaaagtcattggaatacccggatgtttcctcattagaaatgagaaagcagagaatcagtgtggcagctagcattgctttgattaataggcactggttgataggcttcaggtacaggggaaaaaaagcaggattttttatttaaagcactcaattggtgctgaatagccctgctcacttcccagtgtcgcgcatcacaaagaaaggtcgtggcttcttcaaagcttcatctctgatggcagaaagacttgatgttcggcattcagccttctgaccacagaaaaagcttctgcatttggcgattatactgtaagtcaaaggcagactttctgctaagttgaacatttagtctgcctgtaattctctgacaaggtcactttgttctttaacgaagaatcacctccaaaccaatgaagagaagaagaaaaaaggcctcacccaggcaggtgcacatggtaggaacagacaaagaatcacctccaaaccagtgaagagaaggagaaaaaagtcctcctccaggcaggtgcatgtggtaggaaccgagaggcagctgctttcttgtctgagctgtcatgttggagaaagggaggggacggggggagattgggatcttgtccttcctatttgtagtcatgtttcgaattgaagaggatttcccagg

SEQ ID NO: 41466 - DNA, 1134 bp, Homo sapiens
aaaaatgccaatcttttcctttcctcaagaatggaaactgaaaacatacaataaagttatgtacaacagcatttttaatgttcttggcattgttttgaaaataaacgataccttgtctgtagctttctaagtatactgtccacagtgtgctacccatcagttcctcctgctctcctgctccttttataaaaataaaattcctgtctcagcctttcactagggattgttttctatatgtggatacattttcctgttttctagtgcatttgtatggttacacaatgtttaccaattagtttgtttaattacactagtcagcaacggatagaccatccaagtgagtagctaacattgtttcatctcttcgtgtcaaacctcrgactttcacttaataaagagccatgccttcaagccaacatgtctcaccatgaagaaccctttgtgtcaacactgtgcaaagggactgcatattgtttaaagtcattggaatacccggatgtttcctcattagaaatgagaaagcagagaatcagtgtggcagctagcattgctttgattaataggcactggttgataggcttcaggtacaggggaaaaaaagcaggattttttatttaaagcactcaattggtgctgaatagccctgctcacttcccagtgtcgcgcatcacaaagaaaggtcgtggcttcttcaaagcttcatctctgatggcagaaagacttgatgttcggcattcagccttctgaccacagaaaaagcttctgcatttggcgattatactgtaagtcaaaggcagactttctgctaagttgaacatttagtctgcctgtaattctctgacaaggtcactttgttctttaacgaagaatcacctccaaaccaatgaagagaagaagaaaaaaggcctcacccaggcaggtgcacatggtaggaacagacaaagaatcacctccaaaccagtgaagagaaggagaaaaaagtcctcctccaggcaggtgcatgtggtaggaaccgagaggcagctgctttcttgtctgagctgtcatgttggagaaagggaggggacggggggagattgggatcttgtccttcctatttgtagtcatgtttcgaattgaagaggatttcccagg

SEQ ID NO: 41467 - DNA, 1006 bp, Homo sapiens
tggctctgtcacttatataccttacagcactgccacttagtcaaatattttaaacctaaataacctgggaaaaatactaccttatggggttgttgtgagcctgcttggaaccttgacatacaagtcttggtgaagaaggtaaactaaaggttggctagaggtctttgttcatgcaaatgtgggagaggatgtgctgggcaatgttttctcaatattattacaaggaattttattaaagaagcatctgctttcatccacctcccttaaaggaaagagctatgagtctactataactatgggtaacatgtagagaactctgggacctccaaaaaaaaaaccccaaaacttcaatttaaattatacttccatttgttaaaatccttctaccttatgtctcttgatgttaaagtgatgttatagcaaatgggagcagaaagtcagtgagtgtggaatcgatctaaagttgctacggaaacagtaggtgcaaccaatcagtcgagagagtgttcatccaggaagtcttcaaattgcccccaaaggccctctgactgtataattgaactgcaytaccatagctggtgcactgtgcccactgtgaaaccccaaataaaagtgagagtaagagaaaagttaccttgcatacccagctatgtggccctgaggatagcagaactcatctaagctgcagttctttcctctgcttttgcaaatagcaggacaaacggtggggatggtaataatacttacatgtttatagctcttacattcttacattttcaaggcattttatattaattggccaatttgatcctgtaagaaagacagccttggccttatactatcccagtatcacagaggagaatactgaggcacagagggatttgttcaaggacccacaaatagtaagtaattaaactgggactagattcctggaatgtttgcaaaacctttcccattctgctaagtcacagcccagagatatcctggaggggataaagaagctggg

SEQ ID NO: 41468 - DNA, 1012 bp, Homo sapiens
caaggactccccagttgcagccatgtcgagactgatgctgaagaggaccccaactgtcacragcaacacccatcgaacacagccaccaacctggggacagatcaagaagctgtcacagatggtggaagaaaacctgaggaaagtgggacaactggtcacaatgagtaatttaatggtagctatgatagtggtgatcaccattgccatgtgtattccttcaacaagggctgacacagagaacaattatacttattggtcatatttatctatcttagctggcaataatacctggatgtaatcactttatgacacagttacaaatgctttctgatctcaatatttatcataataaatctgctcctataattaatgcatactgctctcaaaaacctattggtgaacaaaattgaacctagccagaaaaaatgaacgtacttgttcaggaagactgcattgcaaaccttgtttaggcagaggtgctgcacaatgattcctaggaattattattgattggtcccctaagaggatgtttagcctgaattgcacctctcagtctgcgtgccatggccacactatgttcagctagtctgaacaaaacagtcagatggtagaaatggtaagaagtatggcaagagttcttattatctggaaccatggccatatagtagcaactcaacctcaaatgatatggcccgttgtaggaactaaacataaagatttgtggaaactattaatagctcttaataagatcaaaatttgggaaagaataaaaaaatctagaaggaaactctataaacttgtctttagatattgcaaaattaaaacaacaaatatttaaagcatcccaggcacacctggccttaatgccaggaactggagtgtttgaaggagctgcagacagattagcagctagcaacccattaaaatggataaaacacttggaagctctgtgatttcaatgataattgtgtttttaatgtgtgttgtttgtctttgtatagtctgcagatgt

SEQ ID NO: 41469 - DNA, 1012 bp, Homo sapiens
caaggactccccagttgcagccatgtcgagactgatgctgaagaggaccccaactgtcacaagcaacacccatcgaacacagccaccaacstggggacagatcaagaagctgtcacagatggtggaagaaaacctgaggaaagtgggacaactggtcacaatgagtaatttaatggtagctatgatagtggtgatcaccattgccatgtgtattccttcaacaagggctgacacagagaacaattatacttattggtcatatttatctatcttagctggcaataatacctggatgtaatcactttatgacacagttacaaatgctttctgatctcaatatttatcataataaatctgctcctataattaatgcatactgctctcaaaaacctattggtgaacaaaattgaacctagccagaaaaaatgaacgtacttgttcaggaagactgcattgcaaaccttgtttaggcagaggtgctgcacaatgattcctaggaattattattgattggtcccctaagaggatgtttagcctgaattgcacctctcagtctgcgtgccatggccacactatgttcagctagtctgaacaaaacagtcagatggtagaaatggtaagaagtatggcaagagttcttattatctggaaccatggccatatagtagcaactcaacctcaaatgatatggcccgttgtaggaactaaacataaagatttgtggaaactattaatagctcttaataagatcaaaatttgggaaagaataaaaaaatctagaaggaaactctataaacttgtctttagatattgcaaaattaaaacaacaaatatttaaagcatcccaggcacacctggccttaatgccaggaactggagtgtttgaaggagctgcagacagattagcagctagcaacccattaaaatggataaaacacttggaagctctgtgatttcaatgataattgtgtttttaatgtgtgttgtttgtctttgtatagtctgcagatgt

SEQ ID NO: 41470 - DNA, 594 bp, Homo sapiens
gcattctagtgaatttgttcatatatgccaagatctcagtcatattggagagtctgctataatttcttgtgcaaaagatggagtgaatttttctgcaaatggagaacttggacatggaaacattgccacaaacaagtaattacaataaagaagaggaggctgttgccataatgatgaatgggccagttcagctaacttttgcactaagttacttaaatttctttataacaggcactccactctctcttcccagtaacactcagtatgtctgcagatgcaccccttgctgtagagtataagattgccrgatatggaacatttaaagtattatttggctcccaaaattgaggatgaaaaaggattttagaaattcttagaatccaagaaaataaaactaagctctttgaaaattgcttctgagattccagcgtgtactgaagtcatttccatcaaaaaatttatgcctctgaatacacaggtagatgcggttttctgtaaataacatattttttcatctatcttctagaatctatttaaagtacaaaatccaaagtcaaatctggtctcattaacctagagagatatctgctttac

SEQ ID NO: 41471 - DNA, 628 bp, Homo sapiens
atttaaaaagtttctgccttcataaaatttacggtcttttaaagaaacacaccatacacmcacaatcaaggcaggttataaattatataataaaagaaaagcaaaaagacaggcattgatttctgattgaaaaatcaagaaaagtttcatagacagaatgtcttggaagtcaggcctaggagtataggttatactttaattaaagaaaataaggttaaaagtacatcagtctgagggagcagcgtcaactacggcatgagaagaaagtgcaacaatctgttcgcagttcttgtactgggaatatcatggggatgaagctggaaggtaaacagaggtcagacaataaaaatgctttcatgccatgcaaaacaaattggacttcattccaaactggtgatttggagtgatcaagtaaatcactgtaatattaatacaaccaaatgaggactattcgaaatatagatgtcaaattaatagtgatccaattttaaaaggaaagcaataaacccttcagaatgtgtgggttttcaaattttgttcagataacactgaagggaaaaagtaaaacaagggaattatttttacttgggtttgtttcttataatcttaatgaacactaaataattct

SEQ ID NO: 41472 - DNA, 536 bp, Homo sapiens
gccctcagctataggagatccgagaacagtgactattccaagactaaaacctgactccctccttggtacattctaattctcctcaacagcaccactgagtaacaaggacgctgcctaaggtaagtaagggtcctcaattccccccaagtttactagcacatgcataaaatattattaacaccatgaatggaagaggatgacgggataaaagaaattaggcttaataaagtgaatgtctataaaggaagaccagatcctgaaatgaaaaggcaaaacttatttgtgagctttggttaaatttatcatgaaaattacacttattaatgttttattgttattaacagcrtccgaacaatcctcatcttttgaagatgccaggagcaattcggaatactatctgattgaatgtgaacctgcctggttaatttattacctgatttgatgaaccaaggaaagccatgcgtttaaacaaatatttacatttaatatgggaacataaaagagctttaaatattatagactttgtacctgttata

SEQ ID NO: 41473 - DNA, 639 bp, Homo sapiens
tgaaagtgctgggattacaggcatgagccaccacacctggccaagaagtgtgtacctttcttaaaagaggacttactgtttgtgcaatgagtgatatactccaagacaatttgcttaactgacagtcttgtgaaaacttccgtgtgctgcctattcaagggagtgaggttgcagaaagatgtacaaccagccagatcatagactgtttgctgctgtttctgtacttacccatttttatgcttctgttttgaggttttgttggattgcctatctttttaagtagttacttcacagagatacgtacatactccacatcgtttgagtcttcatgtttaagtatctgcgaaagccggtrgtcatactctagggaggtgatcgagagtgaggctattgggaatttctgccctagcatggcttccggcccttcgctcagtggttgcagtattttctgttgtaaaatataggttttctctaaggcatcttagagttcgtgagaaatgcctcaactatttccatgtcttgagccctgcagtattttaaaataacaatagcaaaatgaagaaaagccaaaacaaattaaaaaattcatagtgctcgcaaatgatttggcctggaaaatataaagatacagggaacatg

SEQ ID NO: 41474 - DNA, 1238 bp, Homo sapiens
aaaatagcatgctgtataattttgccttcaaaatatttctttcttcatatagttttaaattattttagtttaacttataaatagttaaatccactaagacatcttttatttttatcagagggttatagtgcagacagaagtcaatccctttgcagagggcccaaatgataatatgtttaatcaatagatgtaaaaactccagaatgaaactatgagtagaaaagaggaaaagggaaagcaaatagactatgctgaaactgaaacaaaggttgaagaggaaataatttcactgaacccacaaattgtcaactacatcctagacttctcttcagctctgtttggagaaacttggaatatgggacccaaacaactaagaaaattgatcttttccaaaaactttttatttattcattttttagctacattttgttgtcaactggatttttttaagtgcgcctggaactgttacctatttatttgtttatttatttattcattcattcttgagatggggtcttactatattgcccagactgctcttgaactcctgttctccaaggattcccttgccttgtagctgagattacaggcacacaccactttgtggggccagaaaactgattttatttaggctactgcaatagggagaacacctcaggtctgaagaccagagtttcttggcagaatggtttcaccttagacttatatagggaggaataaacaagttatagatggggagattttacagttggaatcattttataatcaggaagagtctcagtcagcatagagggaaaatatttatctctgtgtctcgctgatttgggaaagacaaacagtttaatcatttatgaaacaaataatgggaatgtgaagggtctgtggctggtcttgtgatcgttaaaaagaggttcattagcaagttttatgtaagtcatgggggaagggttgttcatggtggccattttcccagatcacaaagagtgagagtcttcttaaccatccctattttccaggaatacatggctcagataaagttcagaattgtcattcttagcttggttgttaactagaactaaactgtcttgcctcttgrgagttcacctgctatgcaacctgacttatttatgcagttgttcatatattgatatatcactcattgaagacttcatgttgctacaaaagataattcttacaaaaagataaaatgacaactttcacacagatataaaaatgca

SEQ ID NO: 41475 - DNA, 1650 bp, Homo sapiens
aggggagggatgaggaggtgcaaggtctacatgacttgcttaggatgccttacctatggagtggtctgtcttgctgtatcatgggcagagctaggttgtaaactgagacaatctcctggtgtgagagagttctaggggcacctggtttgtctcaagacttggtctttggaacttctaaataaacacgtacacaagcttgacatggagggagtgttgggtgaagagaaggtaaagcttataattgccttcctaaagaggtaagtaggaggtgggtaaaaaggaataaagtaaaaaaataataattctgaaaaagcawaagaaaaataaataaataaatcaataaactattcttttttcccttttaaaatggggttttcagttacaagctgaagtccaaaatttttagagttatttcctaaccactagcttctcttaactttccaccctcttttgtgggtttcctccctctttgaattatgtccccttccaaatttttatggtgaagtcctaatcacagttacctcataatgtgaccttatttggaaataggatcattgcagatgtaattagttaggataaggtcatactgaagttgggtggatgcctaatccaatatggctggtttccttataaagagggaaaatttggacccaaggacacacagggagaacaccatgtgcagatgaaggcagagatcgggatgatgcatttataaacttgggaacacataagattgccagcaaaccacgagaggcaaagggagggacatgaaacagattcctcttcatagtctccagaaggaattgaccctgataatagcttgatcttagacttccagcctccagagtaatgtggcaatacatgtctattgctatggtactcagtttatggtactttgttatggcagtcctagctaactaatacattcccttttcactgtgttgtgtttcttttgagtcatcctctgttggtgtatccaggctattccttctgccttgaatgcttttctttcttcctccccatttatgtttctccccagtcatctagttaacttctactcatcttcagatcactgcttcatcctttctttatttgtaaagccttccttgttgcacctgcccccaacaaatgtaaagtaccattctgatgtgctcccacggaatattatatcaccttctacacttatcataactaattatagatggctttggttatttgtggtagttatgttctgaaaagcagttgtgaatactaaattagtgaatactgaaccattgctcctaggagaaatacacaatcaaattcctgcaagcctctggtcacaacattttcattaaacaatgaatatgtgaccttatttcatgtatgtttctgtttacatgcaccttacttaatatatattgttgacttattaacatcaatctcatggccaacagtaatataactcatgcctgaatgaaggttatcaaacacaagtattttctttgtaaggcacatcacagccttcttacccttaggaatgccagacagcatttcagtagtacatttgaaggttattttaaacagtgaaatcaccaacacaaagtacaaaaatgcaaagaaaaaaagtggcactacattgactgctgaaagtacacttaaagtgaaagg

SEQ ID NO: 41476 - DNA, 1650 bp, Homo sapiens
aggggagggatgaggaggtgcaaggtctacatgacttgcttaggatgccttacctatggagtggtctgtcttgctgtatcatgggcagagctaggttgtaaactgagacaatctcctggtgtgagagagttctaggggcacctggtttgtctcaagacttggtctttggaacttctaaataaacacgtacacaagcttgacatggagggagtgttgggtgaagagaaggtaaagcttataattgccttcctaaagaggtaagtaggaggtgggtaaaaaggaataaagtaaaaaaataataattctgaaaaagcataagaaaaataaataaataaatcaataaacwattcttttttcccttttaaaatggggttttcagttacaagctgaagtccaaaatttttagagttatttcctaaccactagcttctcttaactttccaccctcttttgtgggtttcctccctctttgaattatgtccccttccaaatttttatggtgaagtcctaatcacagttacctcataatgtgaccttatttggaaataggatcattgcagatgtaattagttaggataaggtcatactgaagttgggtggatgcctaatccaatatggctggtttccttataaagagggaaaatttggacccaaggacacacagggagaacaccatgtgcagatgaaggcagagatcgggatgatgcatttataaacttgggaacacataagattgccagcaaaccacgagaggcaaagggagggacatgaaacagattcctcttcatagtctccagaaggaattgaccctgataatagcttgatcttagacttccagcctccagagtaatgtggcaatacatgtctattgctatggtactcagtttatggtactttgttatggcagtcctagctaactaatacattcccttttcactgtgttgtgtttcttttgagtcatcctctgttggtgtatccaggctattccttctgccttgaatgcttttctttcttcctccccatttatgtttctccccagtcatctagttaacttctactcatcttcagatcactgcttcatcctttctttatttgtaaagccttccttgttgcacctgcccccaacaaatgtaaagtaccattctgatgtgctcccacggaatattatatcaccttctacacttatcataactaattatagatggctttggttatttgtggtagttatgttctgaaaagcagttgtgaatactaaattagtgaatactgaaccattgctcctaggagaaatacacaatcaaattcctgcaagcctctggtcacaacattttcattaaacaatgaatatgtgaccttatttcatgtatgtttctgtttacatgcaccttacttaatatatattgttgacttattaacatcaatctcatggccaacagtaatataactcatgcctgaatgaaggttatcaaacacaagtattttctttgtaaggcacatcacagccttcttacccttaggaatgccagacagcatttcagtagtacatttgaaggttattttaaacagtgaaatcaccaacacaaagtacaaaaatgcaaagaaaaaaagtggcactacattgactgctgaaagtacacttaaagtgaaagg

SEQ ID NO: 41477 - DNA, 1112 bp, Homo sapiens
tgataatgagttggaagacttgtattatacatatgttggttcttaaattcatctatagattgaataaaatcctaatagattgttttagcagaatttgatgctaaaatttacatagctcaaagggccaagaatagccaagattaacttttggtttttgaggtatagcctatatacaagtaaattctataattacattaatctgagtgtacagcctgattatttctgacatgtgtgcagaccacataaccaccacttggattaagaggtaaatattggctgggtgtggtggtgcatgcctgtaatcttagtacttgggaaggccgaaatgcgaggattgcttgagtccaggagtttgagaccagcttgggaaacttcgtgagaccccatctcattataaagaaagaaaaaaaagaggtaaatatttccagcactctgtgtggtttccttgtgccctttccagattataacctcctaatactgaacttttcccaccagtgattagctttgcttgattttgatcctcatataattggaaccacgcagtatgttttctttttgactggtttaactcttgtaggtaatttttctaccagatagcaagaagtatttctcttcttaattctagagggcccctcttgctgggctaatgcagcccctggtagctctagcaatgagagctagcaatggcagtatacagctcttctggcatctggttcatgcactgaaccagaagtgcttctcagaaccaacctccagcagtgccaagtgaccagcaatgcccagcatttttcagcttcccctagcatcctctcaagcagctgctcagtggaagaccacctgtgaggcacctcaaaggctcccctgatgccccctcgggaggctttgcagcaggctactgcaggtgaggaaccatcccatgcacaacttccccagtaaccccttgggtagcttcacagtgatttgtaaggtgtgatacttcctgacggatggctttcccagcatcccagagggaggatgtcctsaaagttccagtagcacagcatcttagcaatgtaaccacgcattaaagcacagccatgcccttccaggaaggtctggaactcaacccttgg

SEQ ID NO: 41478 - DNA, 1071 bp, Homo sapiens
agacagaaaatgtacaggctgtgaattccaggctacgcagctctagatctggggccagaagttctccttctggaaccaaacaatctagatggagcctcattctctacagtggacatcagaaatgacctggacagcttgtgaaaacacagcctgctggccccacctccagagttcctgatctcataggtcttgggtggagccaaaacttttgcatttctaacaagtttccagatgatgctgatgctagagaccacactgtgagaatcactgctttgaagcaatgtacccaaaagtaggggaggcactggaccaggaagcccctctcagacrgaggatcaaattcagatgcaggttgttatgtaatattacagcccaaaggcctggctggttaggtgtatggctgacttctatattcttcatgcttttaataatatcccacttattttaaagtcagcatgtgttttaaaatattaaggacaagacaaaaacctcagggccttacagatttgggattcaatacatttttactttgattttcaacttttaaaattctagcaaaggttttagtacatgataccgaagttataggtgtgttattttgaggtcggtagacttctaggaatgtatgactaaccaaactatttctaagatagagtcaaacattcatttatcattagccaacattatcattagccaacatcttagtaatctatagtcttccatgtatagatcactaaggcggaatcgaacacttttgaaaaggaggaacagggtggttatggggattctccaagtcaatttttttctttggaatctctcaatgaaatgggtcatctcaggtttatggaaacacagagcacaggacatatgatagtagaaacacttggtgattgccattatgaagtacatttgtgcttatttagataaacggataaatgtgttttcacgcatattgtatacatatgaatatataaattatatgcacatacagcattgatatatgtggatcacctgagtaacttggatatcacaaccaagatgatctttctgtataagcaaaacaatttaaag

SEQ ID NO: 41479 - DNA, 1071 bp, Homo sapiens
agacagaaaatgtacaggctgtgaattccaggctacgcagctctagatctggggccagaagttctccttctggaaccaaacaatctagatggagcctcattctctacagtggacatcagaaatgacctggacagcttgtgaaaacacagcctgctggccccacctccagagttcctgatctcataggtcttgggtggagccaaaacttttgcatttctaacaagtttccagatgatgctgatgctagagaccacactgtgagaatcactgctttgaagcaatgtacccaaaagtaggggaggcactggaccaggaagcccctctcagacagaggatcaaattcagatgcaggttgttatgtaatattacagcccaaaggcctggctggttaggtgtatggctgacttctatattcttcatgcttttaataatatcccacttattttaaagtcagcatgtgttttaaaatattaaggacaagacaaaaacctcagggccttacagrtttgggattcaatacatttttactttgattttcaacttttaaaattctagcaaaggttttagtacatgataccgaagttataggtgtgttattttgaggtcggtagacttctaggaatgtatgactaaccaaactatttctaagatagagtcaaacattcatttatcattagccaacattatcattagccaacatcttagtaatctatagtcttccatgtatagatcactaaggcggaatcgaacacttttgaaaaggaggaacagggtggttatggggattctccaagtcaatttttttctttggaatctctcaatgaaatgggtcatctcaggtttatggaaacacagagcacaggacatatgatagtagaaacacttggtgattgccattatgaagtacatttgtgcttatttagataaacggataaatgtgttttcacgcatattgtatacatatgaatatataaattatatgcacatacagcattgatatatgtggatcacctgagtaacttggatatcacaaccaagatgatctttctgtataagcaaaacaatttaaag

SEQ ID NO: 41480 - DNA, 641 bp, Homo sapiens
actaacaaaattctaacatgaagtcttgaacttttgtgttcagaataaatgtgatttctagttgcgatctactttgttttgtttctaaagattttgtttgaacatatattaactataatgaaataaaagccaagaatagcttgaagagggggaaaaaagagaacttaggatcaaggtttcaaaatattatgaaaaggaaataatcaaatgcaatactttgcttttatgttgaccttctcattctggttcctcacyctccatactccgtgagaggttctaaagcctgtggccattggtgaactgccaggcaggaggtcacaattcccaggcagatgcagcagtcctgtgtaccattgatgggattcagtaaaaaaggacaaggcctagatagcctccagaacaattttattgtatataattgttttcaggaggaaagattaatttgaaatctccgtattttgaattccaaagtgacttcacgtggtagaaagaacatgaactttggaatcagatagcaggcatggaagggagattgtcatcattataattaatccaagttaattagctgtaacatctgcaagaatgtttcttcagtctgtggagtgggtaacatcataggattttgaggatgacatgggaca

SEQ ID NO: 41481 - DNA, 1276 bp, Homo sapiens
aaagttcttctcccccagttaaagggaacttggaccccaaggtagctaaatagaatattccaggaatgccaaatacccaggattccttacaaataacaacagtgtaaaggcacaacttgttcatgggtgaatcaataaaagccagtttgatgccctgttcttagcttctttttctcaaaagggctttagcaatgttgtctacacccatttttcaaaaatgagaaaatagaagcacagaagtcaaaaataacttgtgtagtaccagaattccacctccaatgacctgtcccacctgctgtgccacactaagaagtgtgcactcttagcttccatgcttctatattgtgtggtttaagggaaactgcaaggaagaagaagtgatatacaagtgatctggctggccctggggagcttaatcagtatttggtttattttaagataacctgaactggagatagtgataagaaaggttacccggtgttttccaaggaagagctgagtggaaagttgaatttggacaaaggctctatctatcctggcagagagtggtgtggacagcttgcagacactcacctgtgtgttgtgtgtttgctgtgatgttctggccgctgtgcaggtgatcttacactcctgccacattctgccttccaagagtctgaagtctcaggaactaggtcatgttgtaaaaaccaattaaatagaaacttagttagcaagccaggaaggtccgtggtaatgagccaaatcatctcctaagaagagaaacagaccctgaagatgagtcataacaggaggtaaacaaagataaactgcagtgaccccctggactttccttttcagcacagattgttttgcccctatcagtggaatgttaatgactcacgtccatccacgaggtcctgttgcaacaacaaacactggcagctactatcggccacttgacatatttgctggcccttctcattttcactggctctttcttatcccccagccttaatgaaaagttgcagatacttgcattcctagcaaggaagaaaaagtagaggtctttttgaagaggaaagtctgtgtccttgtccyctttccttggcatcatggtatctatgtataaggacaactttgctctccagagttgataagaaaaaaaaaaacaaactgtaatcccagcactttgggaggctgaggcgggtggatcacttgaggtcaggagtttgagaccagactggccaacatggcaagaccccatctctactaaaaatacaaaagttagctgggc

SEQ ID NO: 41482 - DNA, 1200 bp, Homo sapiens
tccaagaaatgtcgataatatwggtccagtgtactggttcaacactgagtatcaaggatctagaagatctcgaaaacaaaatggaagacacaaatacgtgaaatgaaacctaaatataaacgatataaaagagagagttgttcaacagtatttaacagatacccatacagcatgtgtgatatgttataaacattcccttaagacagaaaattgtaggatatacggcttacataatgtttagtatcaatcccagtggattgagattttattcattacacaagtttagatttggagtaagaaaataattttaatagcaaaggcagaattatctctggaaaactgatgctttaaagcagatgtctgtctttataaaacaatgtctgcattctgcaatggttaaaaataataactaaattctttattacagcttcaatgaaaaagagaaagttacactgtcttttctttcgacgtcaaactaccccacaaagagacaactgaatttgattttaacatgtttatcatttctggctcatgtattaggggctatacatctaattcaacacagtgttttgcggataaccccattgctccaggcccaggaacgtgatatctttgacaccttgaaagtgactttgtcagaaacatttgtattttgataaataaataaataattttaaaaatcttgataaaaacttctgataaaagtatcttttaaaatgaatgactagctagtgtaagtaatatgaaggttatatttttaaaaagcctcctggaaatgtaagacgtgaagatataggattctgtatagcaagtgataactcatacgtccatgcctttcctcccccagcactgagtgaatgagggcctgtgtgataatattacccctttgtgcacatgaacaatttatgggtccacataatgccatttcagtatgttcaaattatacaagggtgaaggaggcattcttctgataaattcctctatttcaagacttcaattacaaatagttgaaaatgaatgatcaacaatccctaaatcattaaaataaataccaattccaacactttctccagccctagctattcatttcaggactttataatcagtaatcttgctacaagactatgatgaattaacaagtgattgcagtgttgacggcatttcagagcaggaaaatccattattttgaaagccctccac

SEQ ID NO: 41483 - DNA, 1200 bp, Homo sapiens
tccaagaaatgtcgataatataggtccagtgtactggttcaacactgagtatcaaggatctagaagatctcgaaaacaaaatggaagacacaaatacgtgaaatgaaacctaaatataaacgatataaaagagagagttgttcaasagtatttaacagatacccatacagcatgtgtgatatgttataaacattcccttaagacagaaaattgtaggatatacggcttacataatgtttagtatcaatcccagtggattgagattttattcattacacaagtttagatttggagtaagaaaataattttaatagcaaaggcagaattatctctggaaaactgatgctttaaagcagatgtctgtctttataaaacaatgtctgcattctgcaatggttaaaaataataactaaattctttattacagcttcaatgaaaaagagaaagttacactgtcttttctttcgacgtcaaactaccccacaaagagacaactgaatttgattttaacatgtttatcatttctggctcatgtattaggggctatacatctaattcaacacagtgttttgcggataaccccattgctccaggcccaggaacgtgatatctttgacaccttgaaagtgactttgtcagaaacatttgtattttgataaataaataaataattttaaaaatcttgataaaaacttctgataaaagtatcttttaaaatgaatgactagctagtgtaagtaatatgaaggttatatttttaaaaagcctcctggaaatgtaagacgtgaagatataggattctgtatagcaagtgataactcatacgtccatgcctttcctcccccagcactgagtgaatgagggcctgtgtgataatattacccctttgtgcacatgaacaatttatgggtccacataatgccatttcagtatgttcaaattatacaagggtgaaggaggcattcttctgataaattcctctatttcaagacttcaattacaaatagttgaaaatgaatgatcaacaatccctaaatcattaaaataaataccaattccaacactttctccagccctagctattcatttcaggactttataatcagtaatcttgctacaagactatgatgaattaacaagtgattgcagtgttgacggcatttcagagcaggaaaatccattattttgaaagccctccac

SEQ ID NO: 41484 - DNA, 1200 bp, Homo sapiens
tccaagaaatgtcgataatataggtccagtgtactggttcaacactgagtatcaaggatctagaagatctcgaaaacaaaatggaagacacaaatacgtgaaatgaaacctaaatataaacgatataaaagagagagttgttcaacagtatttaacagatacccatacagcatgtgtgatatgttataaacattcccttaagacagaaaattgtaggatatacggcttacataatgtttagtatcaatcccagtggattgagattttattcattacacaagtttagatttggagtaagaaaataattttaatagcaaaggcagaattatctctggaaaactgatgctttaaagcagatgtctgtctttataaaayaatgtctgcattctgcaatggttaaaaataataactaaattctttattacagcttcaatgaaaaagagaaagttacactgtcttttctttcgacgtcaaactaccccacaaagagacaactgaatttgattttaacatgtttatcatttctggctcatgtattaggggctatacatctaattcaacacagtgttttgcggataaccccattgctccaggcccaggaacgtgatatctttgacaccttgaaagtgactttgtcagaaacatttgtattttgataaataaataaataattttaaaaatcttgataaaaacttctgataaaagtatcttttaaaatgaatgactagctagtgtaagtaatatgaaggttatatttttaaaaagcctcctggaaatgtaagacgtgaagatataggattctgtatagcaagtgataactcatacgtccatgcctttcctcccccagcactgagtgaatgagggcctgtgtgataatattacccctttgtgcacatgaacaatttatgggtccacataatgccatttcagtatgttcaaattatacaagggtgaaggaggcattcttctgataaattcctctatttcaagacttcaattacaaatagttgaaaatgaatgatcaacaatccctaaatcattaaaataaataccaattccaacactttctccagccctagctattcatttcaggactttataatcagtaatcttgctacaagactatgatgaattaacaagtgattgcagtgttgacggcatttcagagcaggaaaatccattattttgaaagccctccac

SEQ ID NO: 41485 - DNA, 1205 bp, Homo sapiens
catttctcggtttgtgggtcctgcctccatcttcgaatcctctctcaacactttatgagaactccaataattgcattgggcccaccaggataactcaggttaatctctccatttcaagatccttaacctaatcacatccacaaagtcccttttgtcaagatwacgtattcacaatttgggggggttaagatgtggacatctctgattatcttctattatctatctagatagatagataatctattatctatctattcccattatcctgtctatttcatcagccttcgttttctcttcttaaaaacagggtaatatagtatggcctctctcagagttaggataagaaataaataaaataattcatgtgaaatgctgagtacagagcctactcacaaagaggaagcacttaataaatgtttattattattgttatgacattcaatgaatgaatctcagggtctcttccggctaataacccaggcattcatgcctctgcctcaccgggacaatgcaggaggcctggaagactgaaaaagaaggcgccttcccaccagctattcttcctcactcaaattcttggcaatcaccaaattagagccatggctctcttaagaaacacattctcccagtcttcccttaatttcagaaaaaattctcttcaatggaagggacataattaaaagccttataatttataggaacagatccagaggcaagaaataagggctgcctctgtttcttctctttccattctgtattcctgtcatagccagtcaacgctggtcttggggaaaggaaccgtggtgtgcaaaatgccattgtttactgctggagatcttgcagccataacttttggctgctcatacccccgcctgtttcttttccatgtggcctatttagttttggcatctatgttcattaaccccatctacttggctgtgttttcattgtataacaatcaccagagtccctacaatgttgttttctaagttgtttctaaatattgttgttttctaagttgttttatatcagcctaggatatccaccacagaaagaatttaagtggaggaaggaaaaaatagaataatattactaaatttaatatttagctatgaattaatctctattccacatgttactgatagataaaactagattgtaaacttgttaaatgtaggttctcttatgttctcattgtaaatgca

SEQ ID NO: 41486 - DNA, 993 bp, Homo sapiens
taaagcgttaagaaaatcaacttcaaattttctgttgctttctctttgttttttaaaatttccgacttattttcagccagttattcttgctctgtgttcaccaacaataagggagtagctggaacgagctaaatatctctcaaccctatgyacaaaaatagaaaaattgccaaacaagcacagctggcattttggcttaacgtgaattagaaaaactttaaagaagggaaaacaaaaccctcaagcctgaaacattccatatcccttcattttactttttcttattacagaagcaacgtagaaaatcatgaccttacctgttttttttgttttgttttgttttgatttgtgtttttgagatggagtctcgctctgttgcccagtgtagtggcgtgatctcaactcacgcaacctctgcctcctgggttcaagtgattctcctgcctcagccttctgggtagctgggactaaaggcatgtgccaccatgcctggctaccttatctgttttatcattaaaatgcaagccagcaaaagaatacaataggaacacccacaatcccactcaccaaggggcagccactggtctctgcgggcagattttgtgggtaaatttgcccacattcgctcattccattaataattatcacagaaactagaaatattcataactcaggatattcatttttgactagttaacattctggagagatttttgtgaccaaattacctttaactaaattgtttttggtcaaattgattttaaccaagttacctggaaactgctaaaaccatcttcccaggattaactatacaaagagtgactcctcagtcagagaaccagggacacataagggtgtgattcaggtgcactgctctcaaagtggggaatgcgatttatcggggtcacactatctgtatttctacagaatctgtgatattgtgggcttgtttctgcagactagaaaacttagtttacctccaaggggacacat

SEQ ID NO: 41487 - DNA, 635 bp, Homo sapiens
tatcctcattatctcatcattctccrttatccccatatttttcctggctctaacctaataatgaaatcctattttttccaatgtagttgaatatgcaattttaaaattattgtattttaaataactggatcaaaatgattctaaaattaccaaactgatatgatgatgtttttgtgttatggaacagctcacctgagtctaaaagtgcaatgaaacacaattacatttgtataaccaaattatttgattgagcacagttactgcaaagagttgaaataatatagaacaaacaatgatttttttctatatatttaaattttttcctactatatttgtatgcaggatgcaaggcagattagtctgttcccatgctgctaataaagacatacctgagaatgggtaatttataaaggaaagaggtttcttttttttttttccttttttttttttttcttctgtgagacggagtcttgctctgtcaccaggctggagtgcagtggtgtgatctcggctcactgcaaccttcgactcctgggttcaagcgattctcctgcttcagcctcccgagtagctgggattacaggcatgcatcaccacgcccagctaattgttgtatttttagtagagacagggtt

SEQ ID NO: 41488 - DNA, 635 bp, Homo sapiens
tatcctcattatctcatcattctccattatccccatatttttcctggctctaacctaataatgaaatcctattttttccaatgtagttgaatatgcaattttaaaattattgtattttaaataactggatcaaaatgattctaaaattaccaaactgatatgatgatgtttttgtgttatggaacagctcacctgagtctaaaagtgcaatgaaacacaattacatttgtataaccaaattatttgattgagcacagttactgcaaagagttgaaataatatagaacaaacaatgatttttttctatatatttaaattttttcctactatatttgtatgcaggatgcaaggcagattagtctgttcccatgctgctaataaagacatacctgagaatgggtaatttataaaggaaagaggtttcttttttttttttcyttttttttttttttcttctgtgagacggagtcttgctctgtcaccaggctggagtgcagtggtgtgatctcggctcactgcaaccttcgactcctgggttcaagcgattctcctgcttcagcctcccgagtagctgggattacaggcatgcatcaccacgcccagctaattgttgtatttttagtagagacagggtt

SEQ ID NO: 41489 - DNA, 570 bp, Homo sapiens
tcccctcacatgtgctcctggctgttattttgtgctaatcccattgcaatgggactggcttcatgagctggcaattgctgcagctgcccagggtcccaagcccagaagggcattgcacttgttttaatgttttattcttgctgtcttgaaattcttaattatttttgaacaagtagcctcacattttcactttgcattgggatctacaaattatgcagctattcctgcattacaaccttaatgcttattcaaattgtatttagttaagagttttccaggagccatcattatagttggattccaagtacccttcaagcctccagtttcaatgccaacaactaaactaaaaagattttaaatatcattctcaattattacacaagaaccattttctacagaataattttatattatcttgcttgaagcttccgtcagtattattgagtatgactatgaaatgtttggcaaggcttacattgaaaaccacaattacagrttagtcttagagaacctgatactgcagatctagtttggttgacactggggatgttgtctgctatctaaacccca

SEQ ID NO: 41490 - DNA, 565 bp, Homo sapiens
agaagacattgcaaggctaaaaaggcaacatgtctataggaaaaacaaagcaatatgaataaaatgggctttggactgagacaaagctgttttgatgctttgtactaatgctgcctcttagtagctatgtgaccagggacgagtcatttgacctccttgaatttcagttttctcactataaatttaagcctcatgccccttaattgccatggaagattagaggtagtattacatgacatacagccagagatcttggcataarcatacactaataataatagtaatttttattgttataattattattagaaaatgaagaagaacttctagaagttattttaaaaatccatcaggattccagtccatcatgttttttaaccaaaaatgatatgcagaataaagttttggggaagtatttacaaaaagactgaaaaagtagaagggctatttcttgaaaccttactctttcttgcggagaagaacttcacataaatcctatgcagttatataaagaaaaaaaaacatatgcacaaactctgcctttggtgagcttatttaatctgct

SEQ ID NO: 41491 - DNA, 657 bp, Homo sapiens
caaaatttttttaaaaagccactcatttttaaaaatagttaactagttagaaaatatctagttaatagatttttttaagtctttgttttttctggatgagaaatttccatactgttattgtttatagacttatagagtttgccacaaatgactacgaaaatgctatttaaatatatagtttctttttagattaataaaatatactatcctattaaaatgttatacattcaaaattatttctgaatgtgtgcgttcatttattcatcattctacaaatgtttggtaagtgttgctgtaattgatttcaattttttttttttttttttgagacggagtttcgctcttgttgcccaggctggagtgcagtggcaatctcggctcactgcaacctccgcctcctggattcaagcgattctcctgcctcagcctcctgagtagctgggattacagtcattmgccaccatgtccggctaatttcttatatttttagtagagtgggggtttctcatatacattctagtccctaattctgactgcccattttcttaaagtaactgtaaatttaggctgagtcttaagttctaatacagatggtaattcaatttctggcatattcaaggtgctagtctctgtatatcagagttgcagcctaatgca

SEQ ID NO: 41492 - DNA, 584 bp, Homo sapiens
aatgcaggcatattccaatagaacacaataggatagaagtatttacacttcatcctataggtggcactcaccaaaacatctgattatattgttattttaattatttaatacatttaagcaatggttttggtgttgtttgtatactttctttataactcttacttacttagaacacaaagtcccagagggcagagtcttttagaaccacatacgtagatacgttattgataataagagtttttataatgttagtttctatttaaagaaaccatctgtcaaagaaactaaacagtactcccattcatatacttttttaaaagactaaactttagactctgctaagcatcttcaacttttctgaaaacagactattgcatggtctctttgtgaatacagctcttactgaacaagtaagtattattataatttacaatgtgtgttcaaagtcaaaatatatgcaacatatcattatcataatatttacttgtcttatatgtaattttaagcaacactatcctaaagttaaatagctatgtattgtyatataacaaattttttaaatcattgtttaattaaaatctccc

SEQ ID NO: 41493 - DNA, 545 bp, Homo sapiens
gtatataaaattaatgtctgaacaaactggcttaaacaaggcagaagttggtttctccctcacttaaatctatagttctacctaccatggctaatacagatacctgccaaattcattagggatgcaggccccttccagctctctgttctgctatactttagaagaggctctagtttggctgccaaatccccacctatcatttttgaattccaggcagcaggaaggaaaaaagccaagagagaaaaacaagggagcatctacccctccttttaagtattttaaccaacccctcttgtttttttttaactgactttgttgagctatgattacatttaaaaagctgtacatatttaaggtgtacatctcagtgagttkggggataagtatacaccatgaacacatcactaccatcaagattataaacatatccttcacctccctaagtcccccccctttattattattattttttgggtaacaaatatgggtaagaatacaaaatctatccttttagcaaattttaagtgtgtaatacagtattctta

SEQ ID NO: 41494 - DNA, 545 bp, Homo sapiens
gtatataaaattaatgtctgaacaaactggcttaaacaaggcagaagttggtttctccctcacttaaatctatagttctacctaccatggctaatacagatacctgccaaattcattagggatgcaggccccttccagctctctgttctgctatactttagaagaggctctagtttggctgccaaatccccacctatcatttttgaattccaggcagcaggaaggaaaaaagccaagagagaaaaacaagggagcatctacccctccttttaagtattttaaccaacccctcttgtttttttttaactgactttgttgagctatgattacatttaaaaagctgtacatatttaaggtgtacatctcagtgagttgggggataagtatacaccatgaacacatcactaccatcaagattataaacatatccttcacctccctaagtcccccccctttattattattattttttkggtaacaaatatgggtaagaatacaaaatctatccttttagcaaattttaagtgtgtaatacagtattctta

SEQ ID NO: 41495 - DNA, 545 bp, Homo sapiens
gtatataaaattaatgtctgaacaaactggcttaaacaaggcagaagttggtttctccctcacttaaatctatagttctacctaccatggctaatacagatacctgccaaattcattagggatgcaggccccttccagctctctgttctgctatactttagaagaggctctagtttggctgccaaatccccacctatcatttttgaattccaggcagcaggaaggaaaaaagccaagagagaaaaacaagggagcatctacccctccttttaagtattttaaccaacccctcttgtttttttttaactgactttgttgagctatgattacatttaaaaagctgtacatatttaaggtgtacatctcagtgagttgggggataagtatacaccatgaacacatcactaccatcaagattataaacatatccttcacctccctaagtcccccccctttattattattattttttgggtaacaaatatkggtaagaatacaaaatctatccttttagcaaattttaagtgtgtaatacagtattctta

SEQ ID NO: 41496 - DNA, 1097 bp, Homo sapiens
  misc_feature (1)...(1097): n = A,T,C or G
cnnnnnnnnnnnnnnnnnnnnnnnnnnnnnnnnnnnnnnnnnnnnnnnnnnnnnnnnnnnnnnnnnnnnnnnnnnnnnnnnnnnnnnnnnnnnnnnnnnnntgggtgggactgagcccattcggggggactccggggttctggtgtaggtagatccggggcaggctcaggaccaagtccctctccttccaccaaggagcgcccagaggccggcgggagctccaggttcacctcctcctcctccaggtgtttacttttcctttatttctgtgaggccagaaattgtcgccatccttcacatcggtgaatcgggaccctaacactcattacctcaggtttattgttattgccattaacagtgttggtggcattatcactaagatcatcattgttgttattattgtcatttatgattattagcaggtgtgttcattttgtctyactatgcatttttttttgggggggggattggttttgtatgacgttgaattgagcttctttaatcttgaccagtgtcagatttctgaagagcattccggaggacaactcctacctttcagcgcagccacagaatttcgtgggcacaggagagcacttagaatattcccctttcattgcacagcagctttgggaaatagtggctgcctggctctgagatgaggtagaaaagactggatactggggcaagtgttagcacctccactggtgtttttatgaagctaagcgcactgtctcccacgtagacttagaataaaatctgatggctctaaagggccgtggctgcccttcctgggacttcctgggaacctttaaagcttctgtggtttctggagtaggtaggttgccaagtctgtgcctcatatggtagtaccagtctttgctgggccaacaaggacatttagaatgtttccagaagctcaggcatgctgtttctgttcctcccttctgttcaatggcaattcactgggtccctggctgacatagaacatcctgcagaaggttgggcttgggtgacttcctggtcagccttcccaggcagtcatctttgaaaaccttgaagagactcaaagaggccattcactgngtatttcatgactg

SEQ ID NO: 41497 - DNA, 1097 bp, Homo sapiens
  misc_feature (1)...(1097): n = A,T,C or G
cnnnnnnnnnnnnnnnnnnnnnnnnnnnnnnnnnnnnnnnnnnnnnnnnnnnnnnnnnnnnnnnnnnnnnnnnnnnnnnnnnnnnnnnnnnnnnnnnnnnntgggtgggactgagcccattcggggggactccggggttctggtgtaggtagatccggggcaggctcaggaccaagtccctctccttccaccaaggagcgcccagaggccggcgggagctccaggttcacctcctcctcctccaggtgtttacttttcctttatttctgtgaggccagaaattgtcgccatccttcacatcggtgaatcgggaccctaacactcattacctcaggtttattgttattgccattaacagtgttggtggcattatcactaagatcatcattgttgttattattgtcatttatgattattagcaggtgtgttcattttgtcttactatgcatttttttttkggggggggattggttttgtatgacgttgaattgagcttctttaatcttgaccagtgtcagatttctgaagagcattccggaggacaactcctacctttcagcgcagccacagaatttcgtgggcacaggagagcacttagaatattcccctttcattgcacagcagctttgggaaatagtggctgcctggctctgagatgaggtagaaaagactggatactggggcaagtgttagcacctccactggtgtttttatgaagctaagcgcactgtctcccacgtagacttagaataaaatctgatggctctaaagggccgtggctgcccttcctgggacttcctgggaacctttaaagcttctgtggtttctggagtaggtaggttgccaagtctgtgcctcatatggtagtaccagtctttgctgggccaacaaggacatttagaatgtttccagaagctcaggcatgctgtttctgttcctcccttctgttcaatggcaattcactgggtccctggctgacatagaacatcctgcagaaggttgggcttgggtgacttcctggtcagccttcccaggcagtcatctttgaaaaccttgaagagactcaaagaggccattcactgngtatttcatgactg

SEQ ID NO: 41498 - DNA, 1097 bp, Homo sapiens
  misc_feature (1)...(1097): n = A,T,C or G
cnnnnnnnnnnnnnnnnnnnnnnnnnnnnnnnnnnnnnnnnnnnnnnnnnnnnnnnnnnnnnnnnnnnnnnnnnnnnnnnnnnnnnnnnnnnnnnnnnnnntgggtgggactgagcccattcggggggactccggggttctggtgtaggtagatccggggcaggctcaggaccaagtccctctccttccaccaaggagcgcccagaggccggcgggagctccaggttcacctcctcctcctccaggtgtttacttttcctttatttctgtgaggccagaaattgtcgccatccttcacatcggtgaatcgggaccctaacactcattacctcaggtttattgttattgccattaacagtgttggtggcattatcactaagatcatcattgttgttattattgtcatttatgattattagcaggtgtgttcattttgtcttactatgcatttttttttgkgggggggattggttttgtatgacgttgaattgagcttctttaatcttgaccagtgtcagatttctgaagagcattccggaggacaactcctacctttcagcgcagccacagaatttcgtgggcacaggagagcacttagaatattcccctttcattgcacagcagctttgggaaatagtggctgcctggctctgagatgaggtagaaaagactggatactggggcaagtgttagcacctccactggtgtttttatgaagctaagcgcactgtctcccacgtagacttagaataaaatctgatggctctaaagggccgtggctgcccttcctgggacttcctgggaacctttaaagcttctgtggtttctggagtaggtaggttgccaagtctgtgcctcatatggtagtaccagtctttgctgggccaacaaggacatttagaatgtttccagaagctcaggcatgctgtttctgttcctcccttctgttcaatggcaattcactgggtccctggctgacatagaacatcctgcagaaggttgggcttgggtgacttcctggtcagccttcccaggcagtcatctttgaaaaccttgaagagactcaaagaggccattcactgngtatttcatgactg

SEQ ID NO: 41499 - DNA, 1321 bp, Homo sapiens
agtcctctagcacctgcggtggtctctggaagaactcagcagaactcccaagtgccaaggaacacatattacagaacaacggactgcagaaattcagatagatgaaaactatagatcattctaggtactttgttcccagacttataatactcccaatagcttctctaatgtatgatcaagtggctgtctgctgtaatattttcagagctataatgtttatatctaacctcttatatttatgtccaaatcagctggtatattttggcttattctgagcagtagctgctagatctatcttgtggtacacattaagcctattccttcttccacagttcttcttgacattatgctacttaaaaagtcatcccttatcaaaatcaaatttcattattttagttatatcacatccaatatttaattgtgtaaaccactctttactctagctattcgtcctcagaattgcttctgttataaatgctctttttgaacagacttcctagagtagaagagaaagctccagatatgatctgatgggggtaaaatatacttggacattactttccttagtatggatactatatctctatagatgacatgcaatgttggattatttctttaaaaaacatgatctagggacaagacttaacagaggaattgttaaagaccacagttcaaattaaaatccccagtccatggttgcttattaaaatgcttttaagccttaatttttattataatttcttttactcattatggttcattttggtatttttatactgattctgctattagtttgccacctgcaccagtgataatatgccttctgtgtcactgtgtagcttatttaattaaaataatgaagacttctgcttctcaactcagaataaaaggaaatagatttaactcccagcataaaactactaaaaaaaaaaaaaaacagacaaaatgtatgaaacaatggcactgaagacactgggcataagggcagcagagcataatgamccctgaggtgaagaaaacgaaagagctgagtcctataattacttcttggtgaaagtttccaggtcatacaacagaggggtgcagggacaaagtttccatggtttaaggatctgtgtgcctagaaaagcccaagcagctagaattcatagtgcaaagtcccaaaaaggagagagctacagaaaaagagaattatgaacatcttcagagagtcccccttgattattcagttgagtaacattcagtgcatacatgagaaaatcactcaaggtagagaagaaaccacttgaaaaggatcacaagggatggtactcagtgctca

SEQ ID NO: 41500 - DNA, 633 bp, Homo sapiens
ttgggcttaagccaagctcccttatgggcagtctttgcaccagagttccctgctaggctggccgaggctatctcagaggtgtatctctaagtcttttttgccccagtcctctttccttccttctttagcaggtgtcagagaactaccttgtcatctgagagtttctcttcttattcctgttccttccctcttttttctttcacaggcattgctctctaatagattatttgagcctcagtttgatcagagataaaatagaaatcaggtaatactttcttcatacaattgtgagatgattaaatgggataacattaatatatgtttgttattttggtaaaatgtaaagtggtaaataaaattattatgatcattatcattactactaattacagaggtatatacaatagcaaacaacatagtataatattaatatatcaaattcttcctctaagatctttcttagttttgatatgtattctagcatagtttttccaatttattcatgaggcagagaacatagaaatcatactgctctttgccaaatattatgaattatagacaaatttayatcaatcataatgttcatttactcaacaaatatttgaacatttattttgtgctaggagttattca

SEQ ID NO: 41501 - DNA, 511 bp, Homo sapiens
gactggtgtctaaagtgggcaggcagtcttggggactaagccctcaacctacgggatctgaaactgtctcctggtaggtagcattggagttgtactggagggcactgagctggtgtctgctgcagaattgattgcttgcttgctggtggggagaacttcctacatattttggggtcaccgaagtcttttgtawtgattgttgttgctgactgagaataggaaaaagcacgttgagtagtttttccacaccacagcattcttttaggctcctgcttttaccttctgcttccctcagcatcctgcatctcaccaggagagacacagcttctttgccattctcggcattccacttcggaatcaatcagaatagctcctattgctagaaacttgctttattaagttctgtttattcagggcttatctgaaagagaaacattttttatgatttgagatttctaagccattttaaaacttggttttaacagcttgagaaattgggggtatagtaggg

SEQ ID NO: 41502 - DNA, 536 bp, Homo sapiens
atgtaagagcattccaagagaacaagctccagtagacaagtgctaatccaacctctgagtcgtgcttactaatgtcacattgaccagagcaagctacagagccaatgtgggaagggactacacaaagagggtgtgattatarggagggtgtggctcattggtggccaccagaataacagtctaacatactaagagtgttcccgacggaacccagaaagtacacacacactctctctcttatagctttggattggagtatattactcctgccaccaggaagagctatcctctgtggctctaaaattcatcatagcctcttcctcctcctctttctccttccatccttcctccttccatcctcttcctcctcccatcccctccctccctccctctctcccttccttcctctcttattaatttacataaggtccacctgtttaaagtgtacaattcaatgatttttagtttgcaaaggtgtataaccataatcattatcataatccaattttagaataattttatcgttccccaaagaa

SEQ ID NO: 41503 - DNA, 1455 bp, Homo sapiens
caccgagttcctcccacaacacatgggaattatgggagcttcaattcaagatgagayatgggtggggacatagccaaaccatatcactgatgcacaggctcacataaccccagaaaacactggcgaggtgggggttatgtggtacagaattgctttctatagccaggtcctcagggagcctgggtctcccttctgcttctcccagaagtagaggcagctggagcagacctcacctgataccttcctgcctgccacccagacctacacagaaggccctggagcagcctcggcagcaggctgctgtttccactggctaaagaatagtcccagtcagaggactcctgggctgatgatgggtggatgcctcctctttctgtctttttctgtcctccaggaactcatatttcctggtgcagaaggggaaattaagcataaccactatcatagatttactttgattgcacagaagtatctcatctgcatatattagagtcatataggcaatagccaagtacattaaaagcatgttttctcaaaatagaaaatcttctggtttcagagaaaagtttgacattggtgtctcttggcccatagatacctgataatcacaatgagcagatggaacctttctcatctgacctcagaggggcccagagaggtgctactactgtttcccgtagtctccataactgcctgccacaaggcttgacattcccacgatatccattcatttagatttaaggaactgaagctccttttaaaaatgtaaatgttgtctgggaagggtaacatattaaaccataatttgcattagcttgaattaatttatcaggttagcattagtctccaatgagtgctcagaagaagtggaaattggttttgattggggctgaggaggggagctgagggacacagcagggaaggcagggcaggtaaagccctcacagggaagggaggcctgagcccacacaccagctgtctggctggggatgcagagctatgagccagggcactggagccaaccttgtatgcagttgctttttctagggaccagcctatcaatcatacacatgccaccaatgctttacttggtagtgtcatgattgccacatctgtttcatctcctctgccaaagccaagccttagcttcctttgcaccagttcttctgactgttctctgcacatgcacggcgatatccttaagccaaggactaagtcatctgatgaaattgcagagcggctggtttgttttgttgaatactattaaaatgaagagtgcaacccaagtatccatggcttctatcagataggggaacaaatggggcatcttttttttactagctcatacttctacctgctaatgcagggcctctagaccatttcaaagtctcggccagtgcgggcgggactgagacagaatacgtggagctgctcttgtttattcaggggcaattc

SEQ ID NO: 41504 - DNA, 1455 bp, Homo sapiens
caccgagttcctcccacaacacatgggaattatgggagcttcaattcaagatgagacwtgggtggggacatagccaaaccatatcactgatgcacaggctcacataaccccagaaaacactggcgaggtgggggttatgtggtacagaattgctttctatagccaggtcctcagggagcctgggtctcccttctgcttctcccagaagtagaggcagctggagcagacctcacctgataccttcctgcctgccacccagacctacacagaaggccctggagcagcctcggcagcaggctgctgtttccactggctaaagaatagtcccagtcagaggactcctgggctgatgatgggtggatgcctcctctttctgtctttttctgtcctccaggaactcatatttcctggtgcagaaggggaaattaagcataaccactatcatagatttactttgattgcacagaagtatctcatctgcatatattagagtcatataggcaatagccaagtacattaaaagcatgttttctcaaaatagaaaatcttctggtttcagagaaaagtttgacattggtgtctcttggcccatagatacctgataatcacaatgagcagatggaacctttctcatctgacctcagaggggcccagagaggtgctactactgtttcccgtagtctccataactgcctgccacaaggcttgacattcccacgatatccattcatttagatttaaggaactgaagctccttttaaaaatgtaaatgttgtctgggaagggtaacatattaaaccataatttgcattagcttgaattaatttatcaggttagcattagtctccaatgagtgctcagaagaagtggaaattggttttgattggggctgaggaggggagctgagggacacagcagggaaggcagggcaggtaaagccctcacagggaagggaggcctgagcccacacaccagctgtctggctggggatgcagagctatgagccagggcactggagccaaccttgtatgcagttgctttttctagggaccagcctatcaatcatacacatgccaccaatgctttacttggtagtgtcatgattgccacatctgtttcatctcctctgccaaagccaagccttagcttcctttgcaccagttcttctgactgttctctgcacatgcacggcgatatccttaagccaaggactaagtcatctgatgaaattgcagagcggctggtttgttttgttgaatactattaaaatgaagagtgcaacccaagtatccatggcttctatcagataggggaacaaatggggcatcttttttttactagctcatacttctacctgctaatgcagggcctctagaccatttcaaagtctcggccagtgcgggcgggactgagacagaatacgtggagctgctcttgtttattcaggggcaattc

SEQ ID NO: 41505 - DNA, 635 bp, Homo sapiens
attctgatttttttcttttgctactgtaaataatatgacagtaaacatcattgtatacactatctgataaatttttagatgtggaattttaagttttatcttattttttcataaattattggggtacaggtggtatttggttacataagtaagttctttagtggtgatttgtgagattttggtgcacccatcaccagagcagtatacactgcaccatatttgtagtcttttgtcactcamccccttcccactcttctcccaaagtccattgtatcattcttatgcctttgcatcctcatggcttagctaccacatatcagtgagaacatacaacgtttgattttccattcctgagttactgtacttagaataatagtctccaatctcatccaggtctggaatttaaaattttgacagatattgccaagctgtcatccaaagaggttgtactgtttagaactcctaagagcagtgcattagagtgcctgtttccctagtatattatcaaatgtattgttctatgccaatttagtaggcaaaaaatgaaatctcattgtgatttttactttgcatttcctttaatgtgagtgaaattgagcatcctttcacatggttaaaagttggttgcatttttt

SEQ ID NO: 41506 - DNA, 635 bp, Homo sapiens
attctgatttttttcttttgctactgtaaataatatgacagtaaacatcattgtatacactatctgataaatttttagatgtggaattttaagttttatcttattttttcataaattattggggtacaggtggtatttggttacataagtaagttctttagtggtgatttgtgagattttggtgcacccatcaccagagcagtatacactgcaccatatttgtagtcttttgtcactcacccycttcccactcttctcccaaagtccattgtatcattcttatgcctttgcatcctcatggcttagctaccacatatcagtgagaacatacaacgtttgattttccattcctgagttactgtacttagaataatagtctccaatctcatccaggtctggaatttaaaattttgacagatattgccaagctgtcatccaaagaggttgtactgtttagaactcctaagagcagtgcattagagtgcctgtttccctagtatattatcaaatgtattgttctatgccaatttagtaggcaaaaaatgaaatctcattgtgatttttactttgcatttcctttaatgtgagtgaaattgagcatcctttcacatggttaaaagttggttgcatttttt

SEQ ID NO: 41507 - DNA, 709 bp, Homo sapiens
atcacaacaaccctataaagtaggcattatcagctccatttttccagggagggaaactgaggctggcagaggttaagtaacttgctcaaggtctcacaacaagtaagtaagtgacagcgctaagattcaaatgcaggtcagtctcaagttattccactgggcttcaccagggttccccttgttatctccctgcctggggcaatcctgttgggggcctgatttccttcttgcagggaatggcaccggctgcatcggatgatctgccatctgttcagatgcagatggagaggcttcctgactcatggtcaggttgggtgcatgcagcagatccagccatgtgtgcagaagtgtggagggcaggagagaccagttcccatttcatcaggcagcctgtctccttgccatcctgagttatgaatgggccacgtatgctctccagggaggggtcctgatttgcaagagctatgaagatgagtattatgataagcaagacatttatrgccccagatgccacagggcacaaaagtcaatatgttacatgctcatttagcacgtttgactctaatgaaacaggttggaaataattggcttttaaagaaatgctgcatttcatttcatttcagtcagaaggcacgtacccactgcatggttgtaactccagccttcacaaatttacctcattctgagattggcaagtgggtgatggtgg

SEQ ID NO: 41508 - DNA, 709 bp, Homo sapiens
atcacaacaaccctataaagtaggcattatcagctccatttttccagggagggaaactgaggctggcagaggttaagtaacttgctcaaggtctcacaacaagtaagtaagtgacagcgctaagattcaaatgcaggtcagtctcaagttattccactgggcttcaccagggttccccttgttatctccctgcctggggcaatcctgttgggggcctgatttccttcttgcagggaatggcaccggctgcatcggatgatctgccatctgttcagatgcagatggagaggcttcctgactcatggtcaggttgggtgcatgcagcagatccagccatgtgtgcagaagtgtggagggcaggagagaccagttcccatttcatcaggcagcctgtctccttgccatcctgagttatgaatgggccacgtatgctctccagggaggggtcctgatttgcaagagctatgaagatgagtattatgataagcaagacatttatggccccagatgccacagggcacaaaagtcaatatgttacatgctcatttagcaygtttgactctaatgaaacaggttggaaataattggcttttaaagaaatgctgcatttcatttcatttcagtcagaaggcacgtacccactgcatggttgtaactccagccttcacaaatttacctcattctgagattggcaagtgggtgatggtgg

SEQ ID NO: 41509 - DNA, 709 bp, Homo sapiens
atcacaacaaccctataaagtaggcattatcagctccatttttccagggagggaaactgaggctggcagaggttaagtaacttgctcaaggtctcacaacaagtaagtaagtgacagcgctaagattcaaatgcaggtcagtctcaagttattccactgggcttcaccagggttccccttgttatctccctgcctggggcaatcctgttgggggcctgatttccttcttgcagggaatggcaccggctgcatcggatgatctgccatctgttcagatgcagatggagaggcttcctgactcatggtcaggttgggtgcatgcagcagatccagccatgtgtgcagaagtgtggagggcaggagagaccagttcccatttcatcaggcagcctgtctccttgccatcctgagttatgaatgggccacgtatgctctccagggaggggtcctgatttgcaagagctatgaagatgagtattatgataagcaagacatttatggccccagatgccacagggcacaaaagtcaatatgttacatgctcatttagcacgtttgactctaatgaaacaggttggaaayaattggcttttaaagaaatgctgcatttcatttcatttcagtcagaaggcacgtacccactgcatggttgtaactccagccttcacaaatttacctcattctgagattggcaagtgggtgatggtgg

SEQ ID NO: 41510 - DNA, 578 bp, Homo sapiens
tggggagtggagaagcccaaattttagcctgccctggctggttcacagggagcaagggccacagtgctatcttcagacttctaaactcagccagtttggcccacccacactggcaatgctgcccgaarggagacagaggaagaaagtccacgctgatgttctcagatgttctcccgggataactacttccttgtgtgcaatctcagcaaatggacaggtctgtgaggagtctccttgggtctcctgactcctcaggatgctgccatgtgctggatcaccattatcctgcttccgggaaagtctcttaacctccacaggccttacttagtttcctcacctatcaattaaagagggcaattcctgtcaaccttcctccaggctctgggacggccagtgtcttcaggttggggagatgccttaggaaagctctttgcatggaggcctgcaatctttattgcttattatatattatttatttagtcttaatttacaattgcttgatttccagaggatcttagtgccatggggacagaaatgtgctgcccagtcctcaataaagaatgcttttcctgccataa

SEQ ID NO: 41511 - DNA, 578 bp, Homo sapiens
tggggagtggagaagcccaaattttagcctgccctggctggttcacagggagcaagggccacagtgctatcttcagacttctaaactcagccagtttggcccacccacactggcaatgctgcccgaaaggagacagaggaagaaagtccacgctgatgttctcagatgttctcccgggataactacttccttgtgtgcaatctcagcaaatggacaggtctgtgaggagtctccttgggtctcctgactcctcaggatgctgccatgtgctggatcaccattatcctgcttccgggaaagtctcttaacctccacaggccttacttagtttcctcacctatcaattaaagagggcaattcctgtcaaccttcctccaggctctgggacggccagtgtcttcaggttggggagatgccttaggaragctctttgcatggaggcctgcaatctttattgcttattatatattatttatttagtcttaatttacaattgcttgatttccagaggatcttagtgccatggggacagaaatgtgctgcccagtcctcaataaagaatgcttttcctgccataa

SEQ ID NO: 41512 - DNA, 392 bp, Homo sapiens
agcttggcgaggtgagcccttctgctgagcagggagccaggtatcttcaggctccaacacgtcccaaaaggaaccagaaggaccctcagctctgaggtttgaatagtcactctggagagcattctggccatcccatgggccagtcacctcggctgccagcgcctatcctccctctccccagctccctgcggggcatcagtccccaccttccagtgcaggctgacctttgctgagaacctgctcttgcacatttctttcatgatctcgttcaatcygaatccccctgcttctgccacagtgaattcttttaggatgtctgtgatgtcacatagcactaatcagttgcacacacgtactccagggaagaagcacagtcctgaggctgcctctgg

SEQ ID NO: 41513 - DNA, 542 bp, Homo sapiens
tcagaaccaatggtcttgtcaaacgttcattttgcagatatgaaagctgaggtttaaacatagaaagtgatgggtcccaaatccacaggagatagagccaggagttaaactcaaawccccttacttctaatctgatgccctttattaaaattataatgtgacatttcatttgagaaacaaacatttttcatctctgagtaaaaatcctttattcttttttaaaaaatgtttaattcttatgaaaaaccctccgttctttaagaagcctaagttactgtctctcctgatacttagagttatttatatatttatcaaaacaggaagaagttaccagtccccaaaacaagacccaaatacaaagcagagagtgcatttcccccaccagcacacataactactccaccttgctatctgatgggaatccatcctgcccccttagagctgtcagctgcttatccctggagagggagtggagagggattccagactgaacaatgccatcatgttgagcagcagcaattaggaaaagaagattgttggca

SEQ ID NO: 41514 - DNA, 852 bp, Homo sapiens
cctcacccccaggctagccctaaaccacaggccacgtcctgtttctcagaaatactgccatttcccagagcccagtgttcgtggggggacaaagggagtgacgtgacagctgccagaggaggaggaaacatccccaggaaacctggaggccaggcctggcattgtgaaggatgatcacatatcagggccagaaagctacctgggaaggttgagtggaatggggactctgagcccaggtctgtgatgcctgcccctgctcaggacccggccccttcctgtgctctgggacccataaggatacagaatcctatcacataaaggtagagagtggaaaggtagatgacagagactgggaagggtrtggggagcgggaagatgaagagcactgggctgaaggtacagacatgcagtaagacagaaggattctgttcagtgatggatagcacggtaaggtgattgtacttaacaaaaatgtattcaggtgatggacaccctaaatgccttgacttgatcactgcacattatacacatgcagcaaaatttctcgtgtaccccataaagtttgcacaaaaaaatttaaaaaatacaattaagactttaggatatagaatcgtagaccccagttggaatccaactgtccatttgttattgtgaccttggtgagtgaccttctctccctggagccttagttcccttgtctgatatggttaacaagccccacctcactgggctgtgctagggatcagatgagacaatggatttgaatgtgctttgttaaccagtggccaggaaggatatcactacctcagtgggagctctggcggtgcccagcctggccaccagtgggacagt

SEQ ID NO: 41515 - DNA, 651 bp, Homo sapiens
aattcaaacccaatattttcagcataattaatagtacaggtactagcttcagtcctttctctgcctaacaatgaagcaaacaatgccccccaaaaaatgtccctaaaaagtggcaggtcttgtggcctaaattttcaaatagtagacagaacctttgcattcctattttgaaacttaagactcatcttccatgtacacccgtaatataggtcaagatgtaattctaaactaacacagttcatataggcagaaagtctctttgacatcagaaaataatggcttccaggagatttttttctgagacctaaaaaaaggaaggaacagagggagagagggaaggagacagagaggaaggaagaaagaaaagaataattttggactacatagcaattttgccgctattcatatttaatawccatgtgccgctatacattctgttaactatttccaaaaatttttccaggttaatatggtgcgctcttcttttacaatgttttatcacttcttgagggataacatttttccttctctactaactcttacacaggaagaaggacacatcatagagactggataagcccagattccaaagaaagatgagaagaaacatggcaaggactaccagaaagatcagagcagtctacaatttca

SEQ ID NO: 41516 - DNA, 354 bp, Homo sapiens
gtgactctgggcaatgtcttgacatctctgtaacatgcagatggcaggaggacccatgtcacagggccgctgtgaggattagattagtgaatcagtgtatggcagccctcagaacagagcctggcacacaggagaggctacagaagcacttggagctgctgttattattatctgcccacgtgccctggttagaggtcagggagcccttcggaaagcagcctggcctcctacagcctctccagcggctgccttcggaagcagagagactttccaatggaaattcccttgcagctctgtgcacaggttgctggcccctggggccacggaatccgagaaaatgcytggtgtgattgc

SEQ ID NO: 41517 - DNA, 608 bp, Homo sapiens
ggcagagcaaaccacgcctgggttctgtgtgggggcagctcctccactgctgagctcgtgtgtttctctcctctctcctgagtgaatttcatgcccaatcgattggctctcgggaagctggggtggaaagagctcacggggaacacccagaccgcacgccttgtggatgttcagtgactgactaaatgcttgttattcacacgatccctttattaacctgacagaacagcacggtgtttgaaaatccctgctcttcgctggcttggtgggtgtggaggagctgtttttcttccatcrtttggcacacccaccgccagtttgaagtgggcggcggcagcgcctctctaccagggctgacaaaagcgtgggtgcagtttcatttctcttttattgtctcaaatacagttgccattgaattgacccaccaaaaactagcactgtcttcaagtagaattttactaggtagcggaacacaccactggactatgcccccgaagactgaaacttgagttacaacatttcagcaaaagtaaaaataattcttgcaaatgacataagtatctgattttcccccttatgtggggttacctcactcatcaattagttta

SEQ ID NO: 41518 - DNA, 576 bp, Homo sapiens
tccaatataatagccattcgccacgtgtggctatataaacgtaaataaattagtctatatagaataaaatttaacatccagttctgcagtcacgctagccacatttccagttcaagagccacttgtatgcagatacagaacatttctgtttttgcggatacttctattaagcatcattgacataggagccacagttactaagaggactyctgaggaccccatggagtttgccatgggttattggggccagacagggatcttggggtccatctagccccaaacttaattttatactttctccacacagtagtcaggagattccttttaaagcaaacactttgttgtgtgtggaataaaatccaaactttcagggcctacaagatttcccataaactggctcttgccagcctcttcagacttatcctactctactctttccttctcactgatctctggccatacttgatccttcctgtgtcttcaccccacttggttccctcccactgcagggcctttgcacttgctattgcctctccttggaaggctcatactccagccttgcaaaccactacttca

SEQ ID NO: 41519 - DNA, 528 bp, Homo sapiens
acaattttatagtttagatttccatagatatttgttccaaacagctagtcctttcctaatatgatgttcactgaaaatacgtattagcatgcttcgcctctaaattgtgcttttcttattaaaaaaaamccccagatctcttatattagaaaagcataagctttaactaatattagtgtaactattttattgaatatactgaactcaatggaatacaacaggaaatgtctgtcttatcctttcccatcactgtcttcagttatgcttggtccagtctccccttcatgacctttgagaaaatctcaggcagatctcaaaacttcaaagttcagtttgaaagtttagtgaggtatgatgtaaagttccaatttcacattcagttcagagcttcttctcccaagcttgggcctgcttcccatggaatgaggagcctccctaggcgtgagggaggggcacaacctgtgcttccttcctctttcccctcatcctgctaattctgattcctacatggttggaggaggaaacggg

SEQ ID NO: 41520 - DNA, 528 bp, Homo sapiens
acaattttatagtttagatttccatagatatttgttccaaacagctagtcctttcctaatatgatgttcactgaaaatacgtattagcatgcttcgcctctaaattgtgcttttcttattaaaaaaaacmcccagatctcttatattagaaaagcataagctttaactaatattagtgtaactattttattgaatatactgaactcaatggaatacaacaggaaatgtctgtcttatcctttcccatcactgtcttcagttatgcttggtccagtctccccttcatgacctttgagaaaatctcaggcagatctcaaaacttcaaagttcagtttgaaagtttagtgaggtatgatgtaaagttccaatttcacattcagttcagagcttcttctcccaagcttgggcctgcttcccatggaatgaggagcctccctaggcgtgagggaggggcacaacctgtgcttccttcctctttcccctcatcctgctaattctgattcctacatggttggaggaggaaacggg

SEQ ID NO: 41521 - DNA, 1302 bp, Homo sapiens
tgtggattctgaaagcccttcctcaccgttgtgtttcctgtccatatagccctgccccagggcctggggctcccatggaggaccagtgcccaggagagattcgtgtgactgcagagcacctgggttgccctgaaggaaaccactggccttcagtatcactcactgcacctgggcccacccaaggtctctggagtgcagttctgcccctgtggcctcctctgtcccctccttcacagcgcaggctgtcacacatgtggcaggttctccaacatatggccagagaatcagtgtatgcagtrctggaggggcctgaggatgatgtccagggccattcctcattttgcagacatagagactaatgtctgagggaggcagggtcttcagcaatacagtcaggactagaatcctgaggactaattcccaagtccatgttcttttcaggaaaccctgctaaagtaaaagaatacaacttcttggctgtagtgtgaggaacaggcagaagcaggcacagggaagcgagtccaagatacctggcttacagagcctgctctaccccaccccccttggccattttgtctcccttcttcactcccctatttaggctctcggatcaggcagttccccactacttccccacaaactgtgaggcccctgtgaagctgctctcccagaggccctctgctcaggctgcactctcttgcacccagcagcccttgaacacatcacttttggaagtatccagtccacaccactatgctgttggagtcaggcaggtcagagttggaatcacagaaactatgtggccatggacaaggtacttagcctctttaagcctcagtttcttcatctgtggtcttcttcatataggtaaaataaaataatttggctgggcatggtggctcacacctgtaatcccagccctttgggaggctgaggcaggaggatcacctgaggtcaggagttcgagaccagcctggccaacatgatgaaaccctctctctcctaaaaatacaaaaattagccggtcatgatggtgggtgcctgtaatccctcctattcaggaggctgaggcaggagaattgcttgaacccgagaggcggaggttgcagtgagttgaaattgtgccactacactccagcctggatgacaagaataaaactctatctcaaaataatttataactatcagaacagtgcctggcagcccgtaggcttccaatgtgccatgcctgttattattattgcctgttatttttaaagcttcactcaaattgtctttattatgcccatggttccagatgca

SEQ ID NO: 41522 - DNA, 1127 bp, Homo sapiens
atgaaaggtatctggaacgcatccttccacacatattcttccacaagtcctgcaccacctacattctcacctggccatggcaaacatcattaatcaatcatgacactcctcgctgaggcctgatgaggctacccaatacaatatttaacatagagccctaggcgcccattaacaatgctggaagttgaaactttcctgttatctctggactagagataatccataaagctcctgtaagctctaaaaataactctcttaaaggaaaaagtaatttcacattctgctttacagggttcattttcatttatataaaagtgcatttaacacattgttttatattttgatttatttcaaatctcctcagaccttccctctccccattattccaacctcgattgtaattatgatttgaatgttatttctcctgaaagcccactagatctttattatcaaattatgctgaagttagactaactttgccttaaacttatattttaagtcagcttgaatttgaatacaaccctattcacaaaaacaagttcaaagttgaagcatttgtaggaaagaaagagaaaggaaggaaagaaaaagaatggaaggagagaaagaaaagaaagactcctgatttaactttagaaaaaaaactttctgaagtgatggaaccagtcctggcctgatgattactcaagagacattctcaggccaattgtaaataattcaaagttctgcatttttgtttaagaattctgagaatcatgctaacaaattagccaagactgaggagcaaaaaagtttaaaaactatgatgtagctgaccttaattrttcttaaatcccatgaattctatgccaataaaaacaatgttttcttactggccttaggcctggattgaaattgttgaaaatagtgacttttctcctcttattacctcaaagaacattgtgtcaggataggaaataaatatttcaagttggcaaacagttttcccaaagcaattctagcaaaatttggagatggcaggaataggtgggttttaattttctgatctggactcaaaactgaaacattttggtctggacactttattgtgaggcctggaagagttccctcgacatcatttgtccctt

SEQ ID NO: 41523 - DNA, 600 bp, Homo sapiens
tcacatcccagtgagaaagcaaggttaagagaatgatacaattcaagataagaacagacacagaaatgtgtcacgtgctatgggactgcagagaaaggagagaatagatctccctgcgggctgggaggagcagtggggaaagcttcacagaaaagtaccttttcaattaggctttaactttggacagttgctttcaaagctggaggcaggagaagggaagtaggacaggcatggaggcaccagccacagagcacctcaaggcagaggagatttgggtgctgtgccacctgggaggtgaggctgataggacagctgtgcatcaggcagggaagctggaggggtaggtcrgaccagaatgacatgggtcctgaaagctttgttaattacgttactctggaggcagtggggagccactgaaggttttaaagcatggcctcctgtgccatgctaagaaacagctaattttactgaaggcaatggcaaaggacatcaagcaggcaaggattgttccaattttccctttgatgagcccactagcactatgaggcagtaataaggctgctgccatagttcacgtgaaggaagaagatgctctaccag

SEQ ID NO: 41524 - DNA, 1253 bp, Homo sapiens
ctccttttcagacaggcaagaatataaatcttgtgattaaaacaacaataataacagcaaacttttgtggggaaccattaattcctaagacaggagatctcagacagatgtagtaataagaacatttgccacggagagagaagacattaatatagagtgagaggctctgctgtgttacctgcaaacttctatttttggggtattgtagttgataacccaaggctccttccaatctaacattctctagagatagaatgggcatgatgacagtgatttctggtggggctttccagacaggtttggaagtacagtggttcacattttgatgaggaggcaagtcgggggagtaaagtggaaggagctcaggcttaggaattcaagggacatggatttacatcctgaccctgccacttactagcagtgtgatcttgggaaggttacttgatctatctttcctgaagtttgctatctgtagaaagaggataacagttctaacctcctaaggttgttttgaggattaaaagagatattatagctatttaaagtgcttgtttaacacaatatctgacacattgtaggcccccagtaaatgctagtttaagctcccttaccctttactagcaatgatatcatattagtaagagttctaaaaacttgaaagataatgtgtcatccacccttagcctacacttcacatgagttttcgtccttttttgagcaaaagcttttattttaacaaagacacattaagttctacttatttatttgtgtgctgtggttgtgatttttttttgcatttgtatatgaaaawtcaatagtaaatgctgatttccttttcctgtggctgtaattgctatgttaatttaaaggtctgattacagaaatgaatgcagctgtgctgctcttgcactgcacagccctggatgtgctgtgtgtgtacccaggcatgctgcactccctgtacttacatcatttaggaggaagtttccagtaccacaacctcacaggcagtatttaatcacctcaaactctagctttgaggttagcctggaaatgaaaagccacttgggtttaccacaacagaaaagtcagaggtacaccatttctaagacagcatgtggggaggcacagccaggcctggggggctcctgtgggaagctgggagccatgtgagtttcatacccaggtgccatagtaaagacagaacctgcttccttatgtgtgtgtgtgtgtgtgtgtgtgtgtgtgtgtgt

SEQ ID NO: 41525 - DNA, 524 bp, Homo sapiens
tttttctttggctcatttctggttcagaattttagtgaaatgacaaagatcagatgttagctctggaatccaacagatgtagacttaattcttggctgggccttcttctagctgtgtgactccaggcaaatcacttagcttccttaaacttcagtttttccttttgcagattgaagacaatgctgatcatactatcaaccrtgaaggactgtgctgaggattgaatgagaatacattcaggccacggaacacagtgtgtatatattacacatgctccaaaaaggctagctgctactatgaagttggataaattgactcaggaaagggcagaatgaacttgatattgtgactgtacatttcagagaggccccaaagagcaaatattcagatcacagcattcactcccggaataagcatattcgaaaaccctttctttgtcaagcacgatacgtggagggagactcattctgtttcagaaagctgagagttaagtggccaagataaccccaaaagacaatcctaat

SEQ ID NO: 41526 - DNA, 524 bp, Homo sapiens
tttttctttggctcatttctggttcagaattttagtgaaatgacaaagatcagatgttagctctggaatccaacagatgtagacttaattcttggctgggccttcttctagctgtgtgactccaggcaaatcacttagcttccttaaacttcagtttttccttttgcagattgaagacaatgctgatcatactatcaaccatgaaggactgtgctgaggattgaatgagaatacattcaggccacggaacacagtgtgtatatattacacatgctccaaaaaggctagctgctactatgaagttggataaattgactcaggaaagggcagaatgaacttgatattgtgactgtacatttcagagaggccccaaagagcaaatattcagatcacagcattcactcccggaataagcatattcgaaaaccctttctttgtcaagcacgatacgtggagggagactcattctgtttcagaaagctgagagttaagtggccaagataacmccaaaagacaatcctaat

SEQ ID NO: 41527 - DNA, 811 bp, Homo sapiens
ttatttgagatggaatcttgctctatcagccagggtggagtgcagtggtgtgttcatagctcactgcagcctcaacctctagggctcaagcaatcctcctacctctgcctcctgagtagctgagactactggcatgtgccaccatgcctggctaattttattttttgaagagacagggtctcactctgtttcccaggctggtctcaaactcctgagctcaagcaatcctcccagcttggcctgccaaaagtgctgggaattttttagtgtattgctccattctctttgctagttttttattttctagttttctttcactattgataggtggtattggcttctgttgcttaaacatttatggtgcagatgaacatgctcctgtcttctctatttcctgcaaattgacagctggagccagagactggaccagactcaagtttaattctatggacgagactataggaggtacatcttaactgattgtctctttttttgcagtcataaaagttgtcgatacttcatggctatccgaattcatttggtggttgcaaaataatgacattctgtcatttttcttaatatttaaatacactttttgttttagaacagttttatatttataaaatatttggaaagatagtacagagaattcagtagactccacatccagttttccctatttgttaatatctaacactgctatgatccaattgttacaactaatggatctatattgattccttattaytgactaaagtccatactttattcagatttccttagtttttactggctgtatctgtctgctcca

SEQ ID NO: 41528 - DNA, 748 bp, Homo sapiens
ttggctacttgaggtcttctgtagttccatttgaattttatttatttattaaaaaagtctaaactttaaaaaatgtcactggaatttttacatgattacaatggtacaggttacattgaatttgtatatcactttggatggcatggacattttaacaatattgatttttttctatccatgaacatgtggttcatttgtctatggcctaccatcctgaagaagctcaatatctgatctcagaaggaaagctaggttgagcctaattagtactctcgttttttaaataaaccaaaaaatatattgttcactattgtgtattaggcactgcgtaagcactttacacgccttatatcatattgtcatcataacgtcatgaattacatattattctcttcattttagggaaacaatgagacttgtagatgttcaaaataactttttaaagttataacattgtaagtaagaaggctaactctgataatctgtctccagcttaaattcctatttaaaatccatagtcatctatgtccaaaatggtaaaatcatttcatattgtctcatctctctatctggacctttgctccaaatgtgggctccagaacaacttatcctcaggcaggtatgagcttcctttcctgattgcttgtcgggttgttattgttttaaacacatattttattttttagtgtcacagaatttgagcaggtagtasaaagagttcctatataacctctgtacctacacatgc

SEQ ID NO: 41529 - DNA, 1521 bp, Homo sapiens
gcaacatgttgatctaaagatattaagtatagttagcccttataacgcacattaaggactggagccagaagaatgtcttttgagttactcatgccatcttggaggatgggacactgcttacgaaccacacagtggtcactgctggcagcagcaggggaggagaggcagaaagaggctaacatggaggctagggaaggacatgggagtccttttctttttactttttcttttaatacagagtcttgctctgttgcccaggctggagtgcaatggcaatctctgctcactgcaacctctgcccccagggttcaagtgattctcctgcctcagcctcccgtgtagctgggattacaggcatctgccatcgcacccagctaattttggtatttttagtagaaacagggtttcaccacgttggccaggctggtctcgaactcctgatctcgtaatctgcctgcctcagcctcccaaagtgctgggattacaggcatgagcaaccgcgcctggccaggagtccttttcaatagctactaactatgggctaggctaagtgtccttcacctaagccccacctatataggctaggagatagcattcctgtaacagaaaaagaactggacttgaactctgaggacttaagctcaggatctgactgtcacttactgaccttgaccaatcacaagctctctgagcctcagtctcttcatcaatacattgaagataatctcaaccttgattcccctcttttcaggattgttttgaataccaagtgagacaatggccaatgcattactcacatataagtaaataatttaagcaataaatttagacaataacaaaaatggtaatcacagtaataacagcatttaataagtacttggcacagcaactactctcccaccgctactgtttatcaaataccaactgtgtgccaggctctgtgctagatgmcgtacttatattatcacagtaaaacctaaccacacacaaccctacaaagtaagaatcatgatctgcattttcagtaagaaaattgaggctaagactcataagaaaattctaaggtcataatcaatgcctacaggtccatgtgactccaaagcctcttccagtctgttctttctattgtacacattctctctaaaaacacacttgaaaaataattgttggatatgttaactggaagacttcccagcactaacattcttcctatatgtgagacactaggtctgcccttctcagctggataacccccaataagcaagaactcacaaagactgagagcatcccatggactccaataaagatttattctccctggggcaggaaatgaagccttcctgaccacactgcattagccaccctgatggactcccttccattcatagttttgtaaccacaagacacgcatacaatgaatttaaatttctctttcctctggccagcttctcacacagccagcctccagggcttccaggaaccaccatcatcacctacctgcctcccatcaaggactgtgag

SEQ ID NO: 41530 - DNA, 545 bp, Homo sapiens
taaaaccggataatgtgtgtctgagggactkgtacaatgaaggagataggttataatagggacagagtatattgaacttggagccagagttgggattctcatcctggtctttttacctcattgagcttcgggctccccttctgtaaaatagggaatataaccactggggtgttgagacaattaaatggacaaatatatgtggaagtgcctagtacgtaatttagcatattaataggtaaagagctacagaatatgaatgatgatacttggctaaggtagtatgaattttatttatttgtttatttatttttcaagacaaggtctcgctctgtcacctaggctggagtacagtggcctgatcatagttcactgcagcttcaacctcctacttcagcctgccaagtagctggggctacaggcacgtgccaccatacccagttaatttttttgtatttttttgtagagatggggtttcgccatattgccagactggtcttgaagtcctgagttcaagcaatcctcctgcctcagcctcccaaagtgct

SEQ ID NO: 41531 - DNA, 545 bp, Homo sapiens
taaaaccggataatgtgtgtctgagggactggtacaatgaaggagataggttataatagggacagagtatattgaacttggagccagagttkggattctcatcctggtctttttacctcattgagcttcgggctccccttctgtaaaatagggaatataaccactggggtgttgagacaattaaatggacaaatatatgtggaagtgcctagtacgtaatttagcatattaataggtaaagagctacagaatatgaatgatgatacttggctaaggtagtatgaattttatttatttgtttatttatttttcaagacaaggtctcgctctgtcacctaggctggagtacagtggcctgatcatagttcactgcagcttcaacctcctacttcagcctgccaagtagctggggctacaggcacgtgccaccatacccagttaatttttttgtatttttttgtagagatggggtttcgccatattgccagactggtcttgaagtcctgagttcaagcaatcctcctgcctcagcctcccaaagtgct

SEQ ID NO: 41532 - DNA, 550 bp, Homo sapiens
cttccttcttcctatttcttggcatggatgaatttacatctggggctttcatttttttgttctgtaatactagtaaaaagtcatttgtagattgtttagatctgatgggatttagttaaagtcataagcctgatttgctgtgaggcagggctgatgtgccaacctaggaagagagaaagctagtgaatagaagtgttaggaatccagcagagggaaaagggccctaccatgaacacactctttactcctacttggcttgttattagatgtgccaaccctgttattaggtggcttatggcttyttctttctttatatctagggtgtttgaggaaggtaaatatgccttttgaatgggtaatttctactctttggtgctgagcattttccaccttcgtctatactgtaaataaccagtctttttttttcttttagaaagttactgcttgagtggcaaggaaattagagaaactgcttctcatagactagttgggttgctggctgaaggggaccctaggagatgtctaattcaacacccttattttatgaatg

SEQ ID NO: 41533 - DNA, 600 bp, Homo sapiens
tagaggggaacaacagacaccacagcctccttgagaatggagggtgggaggaaggagaggagcaaaaaaatacctatcaggtgctattgcttattatctgggtgawgaaataatgtggtacaccaagcctctggaaccaccagttgttctgaataacacacctgcatatgtacccctaaacctaaatttaaaaaatggaaaatttaacatcatatttttttcacataggaatacttttattcttcaaagtaaggataatattaacctcaatcctaaagaagtggtaagataataatagtaaactgtttagaggtaacactgcacaaataatgacaactttttgtctgcttcacgtgcaacaggcattgggaacagagttatccctatattattctaagatcatctcaaccaaaatgtaagataatagattccctattctacagataagtacactgaggcacagaagtacatcgcttgtccaaggtaacataatgaaagcgtgtgtatagcaaaggtataatttcagatctgtctgacttcagtaatgacttctacttttactcattctgccagtgatttattgtttgaggcatctgacat

SEQ ID NO: 41534 - DNA, 600 bp, Homo sapiens
tagaggggaacaacagacaccacagcctccttgagaatggagggtgggaggaaggagaggagcaaaaaaatacctatcaggtgctattgcttattatctgggtgaagaaataatgtggtacaccaagcctctgkaaccaccagttgttctgaataacacacctgcatatgtacccctaaacctaaatttaaaaaatggaaaatttaacatcatatttttttcacataggaatacttttattcttcaaagtaaggataatattaacctcaatcctaaagaagtggtaagataataatagtaaactgtttagaggtaacactgcacaaataatgacaactttttgtctgcttcacgtgcaacaggcattgggaacagagttatccctatattattctaagatcatctcaaccaaaatgtaagataatagattccctattctacagataagtacactgaggcacagaagtacatcgcttgtccaaggtaacataatgaaagcgtgtgtatagcaaaggtataatttcagatctgtctgacttcagtaatgacttctacttttactcattctgccagtgatttattgtttgaggcatctgacat

SEQ ID NO: 41535 - DNA, 600 bp, Homo sapiens
tagaggggaacaacagacaccacagcctccttgagaatggagggtgggaggaaggagaggagcaaaaaaatacctatcaggtgctattgcttattatctgggtgaagaaataatgtggtacaccaagcctctggraccaccagttgttctgaataacacacctgcatatgtacccctaaacctaaatttaaaaaatggaaaatttaacatcatatttttttcacataggaatacttttattcttcaaagtaaggataatattaacctcaatcctaaagaagtggtaagataataatagtaaactgtttagaggtaacactgcacaaataatgacaactttttgtctgcttcacgtgcaacaggcattgggaacagagttatccctatattattctaagatcatctcaaccaaaatgtaagataatagattccctattctacagataagtacactgaggcacagaagtacatcgcttgtccaaggtaacataatgaaagcgtgtgtatagcaaaggtataatttcagatctgtctgacttcagtaatgacttctacttttactcattctgccagtgatttattgtttgaggcatctgacat

SEQ ID NO: 41536 - DNA, 600 bp, Homo sapiens
tagaggggaacaacagacaccacagcctccttgagaatggagggtgggaggaaggagaggagcaaaaaaatacctatcaggtgctattgcttattatctgggtgaagaaataatgtggtacaccaagcctctggaaccaccagttkttctgaataacacacctgcatatgtacccctaaacctaaatttaaaaaatggaaaatttaacatcatatttttttcacataggaatacttttattcttcaaagtaaggataatattaacctcaatcctaaagaagtggtaagataataatagtaaactgtttagaggtaacactgcacaaataatgacaactttttgtctgcttcacgtgcaacaggcattgggaacagagttatccctatattattctaagatcatctcaaccaaaatgtaagataatagattccctattctacagataagtacactgaggcacagaagtacatcgcttgtccaaggtaacataatgaaagcgtgtgtatagcaaaggtataatttcagatctgtctgacttcagtaatgacttctacttttactcattctgccagtgatttattgtttgaggcatctgacat

SEQ ID NO: 41537 - DNA, 600 bp, Homo sapiens
tagaggggaacaacagacaccacagcctccttgagaatggagggtgggaggaaggagaggagcaaaaaaatacctatcaggtgctattgcttattatctgggtgaagaaataatgtggtacaccaagcctctggaaccaccagttgktctgaataacacacctgcatatgtacccctaaacctaaatttaaaaaatggaaaatttaacatcatatttttttcacataggaatacttttattcttcaaagtaaggataatattaacctcaatcctaaagaagtggtaagataataatagtaaactgtttagaggtaacactgcacaaataatgacaactttttgtctgcttcacgtgcaacaggcattgggaacagagttatccctatattattctaagatcatctcaaccaaaatgtaagataatagattccctattctacagataagtacactgaggcacagaagtacatcgcttgtccaaggtaacataatgaaagcgtgtgtatagcaaaggtataatttcagatctgtctgacttcagtaatgacttctacttttactcattctgccagtgatttattgtttgaggcatctgacat

SEQ ID NO: 41538 - DNA, 656 bp, Homo sapiens
aaacccataaaaagctcagactcagccttacgtgaggctgtccactttkgggtcccctcttactgttgagagtgtttctttcacttaataaattttactgagccttacttactctgcagtgtccatgtacctcattcctcttggtcttgagagaagaacctggaactcatggaactgcaggagtcaaagagctgtaacacttcctccagttcaccaatctgtgggagtgaagaaggtaatgggtgccactccctcccactcactgaagtatgggagtgaagaagccactggtcaacaccccctcctgcttgccaaactacaggagtaagaaagccacaacagaacaatttattttttatttttatttttggatatacatacagtaatgggattgctgggttgaatgtagttctgtttcaagttctttgagaaatctccaaagtgctttctacagtgactgaactaattcacattcccaccaacagtgtataaatgttaccgtttgttggcagccttgccagcatctgttgttttttggctttttaatgatgcccattccgactggtgtgagatggtgtcttactgtggttttgatttacatttctacaaagattagtgatgttgagtattttttcatatgtttctttggcaacttg

SEQ ID NO: 41539 - DNA, 1033 bp, Homo sapiens
gcctctccctccacacatccctgcaagctgagggagccggctcctgtcttggccaaccccgaaaggggctaccacagtgcagtggtgggctgaagtgctcctcaagtgccgccaatgtgggagcccaggcagaggaggtgccaagagcgaacgagggctgtgaggactgccagcatgctgtcacctcccagtttcaccatattggccagtctggtctcaaactcctgacctcgtgatccacccgccttggactcacaaagcgctgggattacaggcttgagccaccgcgtccggcgagagccctcatttttaaatgtacttcaatgcattgttgttcattaggaatgttccactttaagttatctttagtaagattttgctgtttctctaagacttctctgcctcccaggcttaaaatataagccaaaagttttaaggttatactcagtttctataaatttcagaaaacygagaaatttctcagttttccagaaattaaggatctcatttttacctaaaacattggctttactctcagtttctcttgattaacttaaccaacaattttttccccaactaagcgcgctagaaaagtgaaacaaaggggtagaacacaaaaatccctgtgaattttcaaatccaaattttataacccctgcaatattactgcttattaccagttcctttctgacccagtgagatgtaagaggcctgtaactggatccaagccagttaattcccagatcaaatccgttcttagacacagtccagtttctgttgcgactccaaacccagtttggatcagacgtttgctgaaagtaacttggagagctcaaaacacaaatccgtggagttccaagacccaaaagggagcttacccatgatccccagcggctctgagagacaagggacacaagtggatcctgcaggttccttgctgttcactcagcactcctgcgggtcgctagaagctccactttggttcccgcttctgacgccatctgataaaagaaaaacttcaaccaaattaaat

SEQ ID NO: 41540 - DNA, 1033 bp, Homo sapiens
gcctctccctccacacatccctgcaagctgagggagccggctcctgtcttggccaaccccgaaaggggctaccacagtgcagtggtgggctgaagtgctcctcaagtgccgccaatgtgggagcccaggcagaggaggtgccaagagcgaacgagggctgtgaggactgccagcatgctgtcacctcccagtttcaccatattggccagtctggtctcaaactcctgacctcgtgatccacccgccttggactcacaaagcgctgggattacaggcttgagccaccgcgtccggcgagagccctcatttttaaatgtacttcaatgcattgttgttcattaggaatgttccactttaagttatctttagtaagattttgctgtttctctaagacttctctgcctcccaggcttaaaatataagccaaaagttttaaggttatactcagtttctataaatttcagaaaaccgagaaatttctcagttttccagaaattaaggatctcatttttacctaaaacattggctttactctcagtttctcttgattaacttaaccaacaattttttccccaactaagcgcgctagaaaagtgaaacaaaggggtagaacacaaaaatccctgtgaattttcaaatccaaattttataacccctgcaatattactgcttattaccagttcctttctgacccagtgagatgtaagaggcctgtaactggatccaagccagttaattcccagatcaaatccgttcttagacacagtccagtttctgttgcgactccaaacccagtttggatcagacgtttgctsaaagtaacttggagagctcaaaacacaaatccgtggagttccaagacccaaaagggagcttacccatgatccccagcggctctgagagacaagggacacaagtggatcctgcaggttccttgctgttcactcagcactcctgcgggtcgctagaagctccactttggttcccgcttctgacgccatctgataaaagaaaaacttcaaccaaattaaat

SEQ ID NO: 41541 - DNA, 416 bp, Homo sapiens
tgggagctgtggggctaaacagggcagggatgtccaagtatcagaaggtaaaaggaggtcagctgagcagccacagcagcattagggccaggttgagcaggagaggccaggctgcccagggcccagccccactcagagctgcagcatagaaccttgccacctcctcattggggttgccctgggccaggtcgaaccacatctggatgcagcrgctgctccctcggttgtagttgctgaccctgtaggagtgagtccagatttcactgcacagagcagtgggtgtgagaaagtagagatggaaaggtagtcaggcagctgccacctggcacttgttagaccctgtagggaagagggaagacctttagccactgggccccaaagggtctctgattctgccagccctacaaccccaaaat

SEQ ID NO: 41542 - DNA, 416 bp, Homo sapiens
tgggagctgtggggctaaacagggcagggatgtccaagtatcagaaggtaaaaggaggtcagctgagcagccacagcagcattagggccaggttgagcaggagaggccaggctgcccagggcccagccccactcagagctgcagcatagaaccttgccacctcctcattggggttgccctgggccaggtcgaaccacatctggatgcagcggctgctccctcggttgtagttgctgaccctgtaggagtgagtccagatttcactgcacagagcagtgggtgtgagaaagtagagatggaaaggtagtcaggcagctgccacctggcacttgttagaccctgtagggaagagggargacctttagccactgggccccaaagggtctctgattctgccagccctacaaccccaaaat

SEQ ID NO: 41543 - DNA, 961 bp, Homo sapiens
gaattgaattcccacccagcagctctctttcctgctccacaatccattactctgctactctattgattccagtgttcattcactctctcatggttgattcattcattccaggatccaatcatgcccctgtggacctgctcactcactaaccttgagggccacgccggagaaatctgtactctcagggaataccaggtgatcctttgggttcagttcctgcgggaacaaaccctaactgtttagagcacagggttcccgttcaacctgtcccgaccccagccctcactccaccttctccttggccttgggggaaagagaagcaaactatcttgaggcttagctttytcctgcaaggattaaatgtaagaagggggaaatcaacaaatgatagccagtttaatctttgtggaatcatttcagcacagatgagggccatgccccaagtcacacagtagggaccacccaagttcaggccagagctcttttggcctttgccccctgcaccttcagagtgctgaggctctcatgggtgcggccaacacacagtgctggggatgggggctgagaaaatcctttccccagcccccagtgaagcccacctgttcagtcagtagtctctcttgctgtggctgcttctgaagccaggctctcttcctgtccttttgagcagcatcactctgcaagctcctttcccacctgcctagtctcaccttcaggtcttagtccagctgtgacccctccccaccaacaatcatgacccccacacccaaccttggggccccagactagaagagctgagaactcagctctggactgaagggctagagcccaggtactagttcagggggatgaacactaacttgtcgtttaaccttgagcaggccacactctggtctgggcctcagtctccacttcaagattctctggccttcaggcaaacagagggcccttccagttcaga

SEQ ID NO: 41544 - DNA, 961 bp, Homo sapiens
gaattgaattcccacccagcagctctctttcctgctccacaatccattactctgctactctattgattccagtgttcattcactctctcatggttgattcattcattccaggatccaatcatgcccctgtggacctgctcactcactaaccttgagggccacgccggagaaatctgtactctcagggaataccaggtgatcctttgggttcagttcctgcgggaacaaaccctaactgtttagagcacagggttcccgttcaacctgtcccgaccccagccctcactccaccttctccttggccttgggggaaagagaagcaaactatcttgaggcttagctttctcctgcaaggattaaatgtaagaagggggaaatcaacaaatgatagccagtttaatctttgtggaatcatttcagcacagatgagggccatgccccaagtcacacagtagggaccacccaagttcaggccagagctcttttggcctttgccccctgcaccttcagagtgctgaggctctcatgggtgcggccaacacacagtgctggggatgggggctgagaaaatcctttccccagcccccagtgragcccacctgttcagtcagtagtctctcttgctgtggctgcttctgaagccaggctctcttcctgtccttttgagcagcatcactctgcaagctcctttcccacctgcctagtctcaccttcaggtcttagtccagctgtgacccctccccaccaacaatcatgacccccacacccaaccttggggccccagactagaagagctgagaactcagctctggactgaagggctagagcccaggtactagttcagggggatgaacactaacttgtcgtttaaccttgagcaggccacactctggtctgggcctcagtctccacttcaagattctctggccttcaggcaaacagagggcccttccagttcaga

SEQ ID NO: 41545 - DNA, 712 bp, Homo sapiens
tgcatgttacctgttatcattatgattatcccaacagcctagggtagggagccaaagtttcyagtaacatgaaatttagtagagacaaatataaaatcttgcacttatacctgcaaaaggaaaccacacacttacaggtgtgattatattatatattgctttttctaggaaaagacctaaatgctttaattcattgatatcacagtgctgtgtgacatggctgctacccaaaataagcatagtcatcgactgaagaaataggtgtgagattgtctctaggataacagaggggctttgcacagttctgagtaagtttaatatgcgatcgctctatcctggccatcgtattttaagaaggaagctggtatatgggaaaacatcttgaaagatgtaaacaatataataaataaggactcattatatataataaatcatctgagagataattatacaaattagtttttcaacctgggttgagatttctcaaatatatttaagtatttttataaggatggcagttttaaaacatagcctcccaaattatttgaccctcctcccatctagaggtggggtttatgtccccacctcctaaatctggactctgagactcttggtcagtagaatgtggtacaagtgatgctgtgccagtttttgagccaaggccttaagaaactgatggctgccactttccttcaggccagttgctcttaga

SEQ ID NO: 41546 - DNA, 512 bp, Homo sapiens
cacctgtttggcctaaactggcacctgcagccgatggaggggcagatgtatgagatcacggaggacacagccagcagttggcctgtgccaaccgacgtctccctatacccctcagggggcactggcttagagacccctgacaggaaaggcaaaggaaccacagaaggtagggttgctgcgttgtccgtgttgtgagtcctctgtgtctgcctctgagctgaagagccctccataacgtgcgtgcatcatgtgcctggctcacagctccatgctctggcgctccctccatccttccacactccacgccagctgtcaagctgccagtccacctgtgtcttcatcgcagttccttgtcactgagagttcgtgggaggctcaggaagggctcatggtgctcagcagaatcccatcccatgccttgagggaagcattaggggcttcacactgctggggtggccatctttgtgtggggtgagaggagctcttctgggcaaacctcatgggacagwtgg

SEQ ID NO: 41547 - DNA, 729 bp, Homo sapiens
cctactatgtgacaagcactggactcagtgcaagtgacatggtgataaataagaggcatctcgaggggctcacagattagtgggggacatatgcatgcatacgagttagtgtgctagctggacaagcacagctaccttgtggttttgggttcctgggacatgaaggagggtgtggtcaggtctgcctgaagagtgacgcggtgtttcagcctctgagttgagttctaacctcacggattgaggagggtctaggaaaggcactctaggctgatagcacagcgggttaggcatgactcccagctgtaaggatggaaacccaactccaactcacgtttttaagcaaggaaaatgtcacggtggtgttactgaaagtccaggggctccttttcccatcagygcagctagatctaggcattcagacgtcttaatgaatccctcctgaccctgtttccctttgttttggccttattctcaggcaggcattcctcatatgatgacaaagggacccctgcaagcttatctactaccagccttgtaaccaaacggaaaaaaacagtgccactttttctatagctccagaaaaatcttgtgattgcctctgattggcctgaccaaagtcacatatttgcctgaatcagtcaccctagccagggtgctgagcatggagtttgatgggtgatgtggagggagggggcaggacagagaagaagaatcaacaagcctgcattt

SEQ ID NO: 41548 - DNA, 581 bp, Homo sapiens
ggaattatgcagtaaacagatggcccttggggaggacccatactgctttggaagaatgcatatttttagcagaataatttgagcatcgctggggggaaaaaaaagttctggacctttttactcctccatgtggggagggccrgggtggggaggaagctgacagcagaacattatagagaaggatgtgaggctaaggagagtcccgggtgttcagatgccctggtttctcgtttcccatgtggctaaccgagatgtctttgtcttcccttccctctatcttggtaggaaagcccagtagtttctttccagaggacagtttcatagattctggagaaattgatgtgggaaggcgagcttcccagaagattcctcctggcactttctggagatctcaagtgttcatagaccatcctgtgcatctgaaattcaatgtgtctctgggaaaggcagccctggttggcatttatggcagaaaaggcctccctccttcacatacacaggtaaccagaaccccacataccctgttgatctgcatgggctcctacctcaaatcttaacccaaagttaagaagcccaatcca

SEQ ID NO: 41549 - DNA, 602 bp, Homo sapiens
gatacaatgggggctaaataataaattagagaaatatagaatactctggaaataaagaagagagaattcagtgacacgtattaggagaaatggatgagaaatgcttcacaaagaagtggcctttaaagtgggtcatgtagcatgaatagaattaggttttaaaaagwacaggaagatagaagagatgtagctcagtcatatagatagatagatagatagatagatagatagatgatggatagatagatacaggtgtaggtatagatatatctataggtgtagagaaagaatatattagtaatgtaatgcctaggcaaatgatataatgacattgtagacttacaaaattatagtaagtctaccataattaccaaaaccagtttatggtagtacccagaaatagataactttcgatgatatatgaagatgtggagaaaaactaattcaaatgaacattaacatggtatgtgcatttgtttatattggctttatttccatagcttgaagagcaaactgtcaggaaatgtccaacacaaatggcagtgcaatcacagaattcattttacttgggctcacagattgcccggaactccagtctctgc

SEQ ID NO: 41550 - DNA, 999 bp, Homo sapiens
tgtagcaaatcagtactacatatttctatgaatatataaacacctatccaatgatgtaactctacagaaggataagaaacattaaatttgtaatagagtttacagcaagaaatgggacaagagacagaatcagtcaggagagatgtatctttgtaagttttaaatttctgaaataactgaaacaaatggggcattctgtgaagatttaatagtgattagttgtgcttacaaaggagtctttatattattttctattttagatgtatattaaaaatagttcataagaaaaaattaacaagcgaaaccatgaaaataatttaataatatatgtaaaaatccacatgatcataggtggcataaacttaacttcctaaaagtaaaaaaagacacaataaagtgaaataaaaaaaattgagaaaatttaaaatgataaaatattaactttggaaaagayacaatagaagagataaaatggaattcatgtgtatatatatacaattgctacacctgtatatataacaaaaacatgtttatatcattgagaaatatctgaaataaataagaaaacatataaacaccacaatttaaaaacaggtgaagcagctgggcgcggtggctcatgcctgtaatcccagcactttgggaggccgaggcgggcggatcacgaggtcaggagatcaagaccatcctggctaacacggtgaaaccccgtctctactaaaaatacaaaaaattagccgggcgtggtggcgggcgcctgtagtcccagctactcgggaggctgaggcaggagaatggcgtgaacccgggaggcggagctttcagtgagccgagatcgcgccactgtactccagcctgagcaacagagcaatactctgtcaaaaaaaaaaaaaaaaaaaaggcatacgaccttgattctcaccaaaaaaatttgaataagcaattaaaaaaaagaaaatgttatattgtaatcaaaatacacacacacacctacataca

SEQ ID NO: 41551 - DNA, 597 bp, Homo sapiens
gcctgagatgaggatcctacagtgaagatgacgcagtctctggcctcgtgggacttatttycctgcaaggaagaccagaaagaaatgcactctgacacagcctgagcagaaatgctagatttcttttttggtactcaagtcagctaggcaggaccttttgcccacccaaatgagacaaaccaggcccttcttacagctgtaccttctcatgtatagatcagcttcactcaaaaaaaaatgttgagctaggattatgtgtttaaggaacattatcacaaagaaaaacaccattgtgagtaaagtcactgaagctttctgtttcatatcttccaatgaaagcagggatttaaactttctgagtctagccctctcgtctcccttgctggccagtttcacactgaaaggagatgctttccttggcctttcaaacgctttccttggccctctgagcgccagcagagggtgcacgtggctcttgttgaagcccttcattcctgaatttgaccatttacacatgaaggaatttaaattgagttaaaccttcccaaacaagacgcttctctgcagtgtctcctttttcacagtctacttatgagg

SEQ ID NO: 41552 - DNA, 597 bp, Homo sapiens
gcctgagatgaggatcctacagtgaagatgacgcagtctctggcctcgtgggacttattttcctgcaaggaagaccagaaagaaatgcactctgacacagcctgagcagaaatgctagatttyttttttggtactcaagtcagctaggcaggaccttttgcccacccaaatgagacaaaccaggcccttcttacagctgtaccttctcatgtatagatcagcttcactcaaaaaaaaatgttgagctaggattatgtgtttaaggaacattatcacaaagaaaaacaccattgtgagtaaagtcactgaagctttctgtttcatatcttccaatgaaagcagggatttaaactttctgagtctagccctctcgtctcccttgctggccagtttcacactgaaaggagatgctttccttggcctttcaaacgctttccttggccctctgagcgccagcagagggtgcacgtggctcttgttgaagcccttcattcctgaatttgaccatttacacatgaaggaatttaaattgagttaaaccttcccaaacaagacgcttctctgcagtgtctcctttttcacagtctacttatgagg

SEQ ID NO: 41553 - DNA, 597 bp, Homo sapiens
gcctgagatgaggatcctacagtgaagatgacgcagtctctggcctcgtgggacttattttcctgcaaggaagaccagaaagaaatgcactctgacacagcctgagcagaaatgctagatttcttttttggtactcaagtcagctaggcaggaccttttgcccacccaaatgagacaaaccaggcccttcttacagctgtaccttctcatgtatagatcagcttcactcaaaaaaaaatgttgagctaggattatgtgtttaaggaayattatcacaaagaaaaacaccattgtgagtaaagtcactgaagctttctgtttcatatcttccaatgaaagcagggatttaaactttctgagtctagccctctcgtctcccttgctggccagtttcacactgaaaggagatgctttccttggcctttcaaacgctttccttggccctctgagcgccagcagagggtgcacgtggctcttgttgaagcccttcattcctgaatttgaccatttacacatgaaggaatttaaattgagttaaaccttcccaaacaagacgcttctctgcagtgtctcctttttcacagtctacttatgagg

SEQ ID NO: 41554 - DNA, 310 bp, Homo sapiens
aaaaawaaaaaaatcctatgcttaaaatcatccagttagcatgttgcttctaaggtttcaagctatttttcaaatttgtcagttcagaatttgtcccttgcctactattctagtattacctccagttacttgctcacgtgtttccttcactccttcactctaaccctaattgattatctttttgactgtattatgtcattttatgtcataatgccctcaatctctcctttctctatattatgctctccatactaattgccagtgactttctgatttcccactagattataaactctaagtttctaagaag

SEQ ID NO: 41555 - DNA, 311 bp, Homo sapiens
atacctgggtacgaactcaacagcctcgattacactcacttctaacttttaattaattggtagtagacatcatctgcctttgctaggcggtccccttagggcccacagagcatcatttwttccgtttatcaaaatgcgtaaagacaatgtccctccatccccaccccttatcagtgtagccaattataatatatgcccatgcctgcaatttacagtcttgcttgtagctaccctccactggaaccccactactacttcatacttgttaaagtttgcatgaagatattcttccggttaccctcctgggttat

SEQ ID NO: 41556 - DNA, 533 bp, Homo sapiens
ctactgtgctgtacctggcttcgctcagttactgattgtaacttcatgtttcccaagtctgaatcctttagaagagcattatgaaatcctgtatgcaaaaagcatttattgagtgccagaaatgagtccgactgttatatagagaggaacccaagasagatgtggtccctgacttcctggagcccacagttaagatgggcccagataagctctaatatggaatgccacgtagatgcaaaaacacaggagagtcgagtctagtcatgaaaggttggcaaaggtgtcctggaggaggcggtgtctaaaatgaataagatttatctgagaaaaagggaagaaagcaagttctagacagagagaagagcatgtacgggaatgcccagcggtgagagggatggtacacaggattggtgaccctcatagatgctgcggtgctacacctgggcccccttctccaggtcagcacacccagcccccagctgctccaagtggagtgttgctgctcacagctcacagctcacagctgctccttc

SEQ ID NO: 41557 - DNA, 1732 bp, Homo sapiens
ggtgactctccgtggcacatgggatcaagttcagaccccttagcatggcatccagggcctgtctcaatggccccacctacttctgcccctcactctcagccctcattcatacatgcctgacacttagaatgtgttcagtaaatacttgttaaatgaaagaaccatgggctgtctttgggcatctatctcagtggttgacaaatgtgccccccaggccttcgggctttgcacatgtcacccccgtcctggatccaccaggaaggtaaacggtcaaaaccattgtatgggaggaaggattttctgtttacagatgaaacaagtaaggtgtgtacttagccttggcaaatgaatttttctacttggacctaactgcctgaggcagtggcagaggcactgcagggccttggtggaggctccccagcagcagagggacaaggctggcacccggaggggacccagccctagccttggggtcctttgccaagtcaattcagaagtccctctgctgagaagtccctgcctctggcagagctgatagaccctcgtgtgggttctttccatgtataattgtttcttgttattgtggtcattacattctataaaataatcacaatactgaattagtaaatatggatccgctgctcctaggaaaattgcagggtcagtttcctgccagcttctggttacattttcatcaactgaccaatgcataactttgttttctgttttaaaaacaccttatttactatatattgttattcattgattttgaactcttggccaacagcattatgacttaccctgcatgacgcttgtctaacacgcatattttccctctaaggcacatcacagccatcttgtgcttaggaacagaagacagcacttcactatgctttggggtcattttaaacagtgaaacaaccaatcaaaagcacaaaaattaaaaacaaacaaacaaaaaaacatggcaccaaacagaccatgaaagggacatttgtttatagtatgagaactgaaacagaaagacagagcattgccttgttcgacctcagctgagaatatgcgtgctgggcaactcagatgtttcaccactccacatgcccataggtgaccacaaccgtgatgcaagtgtcgatttggaggttacaaattttagtaagcaggcagatcagcaaatccagagtccatgaataatgaaaattgactgtatttctattataacatttattaccctgaatgacagttggtaatttatgtcttcttccaccagagtctggtgactacagtgtggggtccttgaggagttggcatayaacaagaaataatgccaacagcagatgaacatggagatcttaccatgcagttttccacatgcaattttctcattcagtgctcacaagaattctctgaattatgtgctgttattattactcctgctttatggatggagaaaccaaggcttagcagtgatatcatgaaacttgcctatagtaacatagctagtagtggtagcaagattttcacatagcctagaagtccacatgcttaattgctgtgttattctgcctgtggatttaagcccttttggagaaatgtttagaaaaaaaaaccacaagacctcagcataatggaccaatcaaccactgagagtgacaattggcccaactggtgagagaggaaggaggagtggcttctaggaggaggcagagttgatggcaagacctcttatgca

SEQ ID NO: 41558 - DNA, 553 bp, Homo sapiens
tattgccaaaccctatcacttattagataccaaatctacaatcaaaggattgtttcttaatatatatgttcttcttttttaaagtatttagctgtgtaaattgaagtgttgagagccaagacttcacttagtctctggatgccacaggtaagatcatccatgacttaatgacaacctgaaacagctaaaaagcataaaaaacgaagactctgggacttctaggtgctgtcagtgacaaggacactgtttgtgaatctcataaaacaacaacagcagctctttctacactggcatagggggttagttgtctaaactcaggagactacaccagagctaatgtaaaacaaagcttaagaatcaggcataaacagtacctagatggagcttcatttcttaggctctaagtgtcagctcagggaatgggctttgctcctgagaaaagctgtttgctatttgttcctaatgatggttaatgtatgaacaaaccatactcccagarctataactgatatcatcaatgatgctggtatacaaacaaagacgctaatgaagc

SEQ ID NO: 41559 - DNA, 1063 bp, Homo sapiens
tgccctaagtcctgatgtcccatctggtccctacaggagttgacagagctgcagtcccagatctccgacacatctgtggtgctgtccatggacaacagtcgctccctggacctggacggcatcatcgctgaggtcaaggcgcagtatgaggagatggccaaatgcagccgggctgaggctgaagcctggtaccagaccaaggtgtgaggccaccaggggcgtacttcctcctgccagggtccttggtggcagcttcccttactcctcaacttgtctcaagccttcagggcctgggtcccactgttctggcaggcaccagtggtttaagtctgtggtgctcagccctggagaaaatcccaagatgggaggacagggcagaggaaatagatatggattaatcattataatagctaaaatatggcaagtacttacacagtactaggctcatgtaattatgactcatgtaatccacagaacagccctattagataggcatcattattacccccatttgttttatttaatttaatttattttatttcyattttttgagatggagtcttgctctgtcacccaggctgaagtgcagtggtgcgatcttggctcactgcaacctttgcctccctggttcatgtgatcctcgtgcctcagcctcctgagtagctgggactacaggtgtgcaccaccatgcctggctaattttttttgtattttgagtagagacgaggtttcaccatgctggccaggctggtctcaaactcctgacctcaggtgatccacctgcctcggcctcccaaagtgctgggattataggcgtgagacaccgcacccagcctattacccccatttaaagatgaggaaattgaggcacagagaggttaagtaatttgcctaactgcatacagctagtagatggaagagcagggactaaatcctgaatgtgagggccctagacctgggaggcttaatcatcacatctacttcatggtggcaggacagttgatggtgcaggggctgagggagcaggagtgggtgctggggtgaaccagtgttcctgaagaag

SEQ ID NO: 41560 - DNA, 1063 bp, Homo sapiens
tgccctaagtcctgatgtcccatctggtccctacaggagttgacagagctgcagtcccagatctccgacacatctgtggtgctgtccatggacaacagtcgctccctggacctggacggcatcatcgctgaggtcaaggcgcagtatgaggagatggccaaatgcagccgggctgaggctgaagcctggtaccagaccaaggtgtgaggccaccaggggcgtacttcctcctgccagggtccttggtggcagcttcccttactcctcaacttgtctcaagccttcagggcctgggtcccactgttctggcaggcaccagtggtttaagtctgtggtgctcagccctggagaaaatcccaagatgggaggacagggcagaggaaatagatatggattaatcattataatagctaaaatatggcaagtacttacacagtactaggctcatgtaattatgactcatgtaatccacagaacagccctattagataggcatcattattacccccatttgttttatttaatttaatttattttatttccattttttgagatggagtcttgctctgtcacccaggctgaagtgcagtggtgcgatcttggctcactgcaacctttgcctccctggttcatgtgatcctcrtgcctcagcctcctgagtagctgggactacaggtgtgcaccaccatgcctggctaattttttttgtattttgagtagagacgaggtttcaccatgctggccaggctggtctcaaactcctgacctcaggtgatccacctgcctcggcctcccaaagtgctgggattataggcgtgagacaccgcacccagcctattacccccatttaaagatgaggaaattgaggcacagagaggttaagtaatttgcctaactgcatacagctagtagatggaagagcagggactaaatcctgaatgtgagggccctagacctgggaggcttaatcatcacatctacttcatggtggcaggacagttgatggtgcaggggctgagggagcaggagtgggtgctggggtgaaccagtgttcctgaagaag

SEQ ID NO: 41561 - DNA, 1063 bp, Homo sapiens
tgccctaagtcctgatgtcccatctggtccctacaggagttgacagagctgcagtcccagatctccgacacatctgtggtgctgtccatggacaacagtcgctccctggacctggacggcatcatcgctgaggtcaaggcgcagtatgaggagatggccaaatgcagccgggctgaggctgaagcctggtaccagaccaaggtgtgaggccaccaggggcgtacttcctcctgccagggtccttggtggcagcttcccttactcctcaacttgtctcaagccttcagggcctgggtcccactgttctggcaggcaccagtggtttaagtctgtggtgctcagccctggagaaaatcccaagatgggaggacagggcagaggaaatagatatggattaatcattataatagctaaaatatggcaagtacttacacagtactaggctcatgtaattatgactcatgtaatccacagaacagccctattagataggcatcattattacccccatttgttttatttaatttaatttattttatttccattttttgagatggagtcttgctctgtcacccaggctgaagtgcagtggtgcgatcttggctcactgcaacctttgcctccctggttcatgtgatcctcgtgcctcagcctcctgagtagctgggactacaggtgtgcaccaccatgcctggctaattttttttgtattttgagtagagacgaggtttcaccatgctggccaggctggtctcaamctcctgacctcaggtgatccacctgcctcggcctcccaaagtgctgggattataggcgtgagacaccgcacccagcctattacccccatttaaagatgaggaaattgaggcacagagaggttaagtaatttgcctaactgcatacagctagtagatggaagagcagggactaaatcctgaatgtgagggccctagacctgggaggcttaatcatcacatctacttcatggtggcaggacagttgatggtgcaggggctgagggagcaggagtgggtgctggggtgaaccagtgttcctgaagaag

SEQ ID NO: 41562 - DNA, 557 bp, Homo sapiens
agtcagggtccaatcagaagacaataatttgaacagagaaagtttaacataaagcattattaaccataacagagattggccagtaaaaagcaagaactctaaagcccacagcagctgcagccataagaagcakcccctacccccaggccttttctccagcatccagtgataatttctttgctggctctccagctttcactaattgtctccttgagcacatttaggctctgcctgatgcctgggcccaaagtcaaagacataggttttgagttttgtttcagtagcatctctctgccaggtaccaacttgccctccacttatctattgctatgtaacaagacatccccaaatttagtggcttaaaacaacaatatttttcataattgtgtgaattgcctaggtgattcttctgcttcatatcattgactggggctctggtactgctgaaaggtccaggatggcttcacttgtacggttggcatttggagctagctctggtcaagagctcaggagctgatggccagggcctctgttcttccctacgtgctccagtccct

SEQ ID NO: 41563 - DNA, 557 bp, Homo sapiens
agtcagggtccaatcagaagacaataatttgaacagagaaagtttaacataaagcattattaaccataacagagattggccagtaaaaagcaagaactctaaagcccacagcagctgcagccataagaagcatcccctacccccaggccttttctccagcatccagtgataatttctttgctggctctccagctttcactaattgtctccttgagcamatttaggctctgcctgatgcctgggcccaaagtcaaagacataggttttgagttttgtttcagtagcatctctctgccaggtaccaacttgccctccacttatctattgctatgtaacaagacatccccaaatttagtggcttaaaacaacaatatttttcataattgtgtgaattgcctaggtgattcttctgcttcatatcattgactggggctctggtactgctgaaaggtccaggatggcttcacttgtacggttggcatttggagctagctctggtcaagagctcaggagctgatggccagggcctctgttcttccctacgtgctccagtccct

SEQ ID NO: 41564 - DNA, 557 bp, Homo sapiens
agtcagggtccaatcagaagacaataatttgaacagagaaagtttaacataaagcattattaaccataacagagattggccagtaaaaagcaagaactctaaagcccacagcagctgcagccataagaagcatcccctacccccaggccttttctccagcatccagtgataatttctttgctggctctccagctttcactaattgtctccttgagcacatttaggctctgcctgatgcctgggcccaaagtcaaagacataggttttgagttttgtttcagtagcatctctctgccaggtaccaacttgccctccacttatctattgctatgtaacaagacatccccaaatttagtggcttaaaacaacaatatttttcatarttgtgtgaattgcctaggtgattcttctgcttcatatcattgactggggctctggtactgctgaaaggtccaggatggcttcacttgtacggttggcatttggagctagctctggtcaagagctcaggagctgatggccagggcctctgttcttccctacgtgctccagtccct

SEQ ID NO: 41565 - DNA, 987 bp, Homo sapiens
ccaaacaccccaggtctctgtaggatttccagaacctagcacagtggctagtgcatagttggtgggcaccaaataagtatttcctgaataaatgaataaatgaataaatgaatacacatagtctagtctgcaaatcagagccagactcttttctggtcatctctcaatcctgtactaccccaccccaatcctcctcaagcccaggtccccactctcctccatgagtccctggagctctgaggtattccacactccccgctcctgatcccatcagcaatgacrcctggaactctgaagcatagccctggcactgtcctgaactctctgaatcagtttcttccaagtcccagatggtgtccctgcactaggaatacccaaagtgcaaagaacatgccctcctcccaccccaaatctctacccccactcccatccttgaccaggctctgagcaggaataggataggagcggccaatcttgacaatgaggaaaggaacccgcctttgagaaaaagacaggaaagcctacagcaagaggttgtgtcggaggcagccccctccttgggacaggccagccactccaccccagggcttggccatgggtccagggcccatagcctagctctgcccctttcagaacagggttcagagagcaggctttaccccaggtcactgcacccattcccctcgcttggaccgcagaatgcaactaatgctttcaggaacccctctccccgctccacagcagtgccagtgggaggggcaggagcaaggaggaagcttataaagggctttgaaaatgaaacagggcccgtggccagggattgttgatgcagccacactgaagaggcaagcagggttctagcttaagaggccagggtgatgccaagccaataaaattcagctattgtctctttgctccctcttttaacaccagctgcccctggcacataaaagggcctgccatcagccagggagcacaggccttggt

SEQ ID NO: 41566 - DNA, 987 bp, Homo sapiens
ccaaacaccccaggtctctgtaggatttccagaacctagcacagtggctagtgcatagttggtgggcaccaaataagtatttcctgaataaatgaataaatgaataaatgaatacacatagtctagtctgcaaatcagagccagactcttttctggtcatctctcaatcctgtactaccccaccccaatcctcctcaagcccaggtccccactctcctccatgagtccctggagctctgaggtattccacactccccgctcctgatcccatcagcaatgacgcctggaactctgaagcatagccctggcactgtcctgaactctctgaatcagtttcttccawgtcccagatggtgtccctgcactaggaatacccaaagtgcaaagaacatgccctcctcccaccccaaatctctacccccactcccatccttgaccaggctctgagcaggaataggataggagcggccaatcttgacaatgaggaaaggaacccgcctttgagaaaaagacaggaaagcctacagcaagaggttgtgtcggaggcagccccctccttgggacaggccagccactccaccccagggcttggccatgggtccagggcccatagcctagctctgcccctttcagaacagggttcagagagcaggctttaccccaggtcactgcacccattcccctcgcttggaccgcagaatgcaactaatgctttcaggaacccctctccccgctccacagcagtgccagtgggaggggcaggagcaaggaggaagcttataaagggctttgaaaatgaaacagggcccgtggccagggattgttgatgcagccacactgaagaggcaagcagggttctagcttaagaggccagggtgatgccaagccaataaaattcagctattgtctctttgctccctcttttaacaccagctgcccctggcacataaaagggcctgccatcagccagggagcacaggccttggt

SEQ ID NO: 41567 - DNA, 987 bp, Homo sapiens
ccaaacaccccaggtctctgtaggatttccagaacctagcacagtggctagtgcatagttggtgggcaccaaataagtatttcctgaataaatgaataaatgaataaatgaatacacatagtctagtctgcaaatcagagccagactcttttctggtcatctctcaatcctgtactaccccaccccaatcctcctcaagcccaggtccccactctcctccatgagtccctggagctctgaggtattccacactccccgctcctgatcccatcagcaatgacgcctggaactctgaagcatagccctggcactgtcctgaactctctgaatcagtttcttccaagtcccagatggtgtccctgcactaggaatacccaaagtgcaaagaacatgccctcctcccaccccaaatctctacccccactcccatccttgaccaggctctgagcaggaataggataggagcggccaatcttgacaatgaggaaaggaacccgcctttgagaaaaagacaggaaagcctacagcaagaggttgtgtcggaggcagccccctccttgggacaggccagccactccaccccagggcttggccatgggtccagggcccatagcctagctctgcccctttcagaacagggttcagagagcaggctttaccccaggtcactgcacccattcccctcgcttggaccgcagaatgcaactaatgctttcaggaacccctctccccgctccacagcagtgccagtgggaggggcaggagcaaggaggaagcttataaagggctttgaaratgaaacagggcccgtggccagggattgttgatgcagccacactgaagaggcaagcagggttctagcttaagaggccagggtgatgccaagccaataaaattcagctattgtctctttgctccctcttttaacaccagctgcccctggcacataaaagggcctgccatcagccagggagcacaggccttggt

SEQ ID NO: 41568 - DNA, 760 bp, Homo sapiens
cctaactcattttatgaggccagcatcatcctgataccaaagcctggcagagacacaaccaaaaaagagaattttagaccaatatccctgatgagcatcgatgcaaaaatcctcaataaaatactggcaaaccgaatccagcagcacatcaaaaagcttatccaccatgatcaagtgggctccatccctgggctgcaaggctggttcaacatacacaaatcaataaacgtaatccagcatataaacagaaccaaagacaaaaaccacatgattatctcaatagatgcagaaaaagcctttgataaaaytcaacaccccttcaagctaaaaactctcaataaattaggtattgatgggacgtatctcaaaatagtaagagctatttatgacaaacccacagccaatatcatcctgaatgggcaaaaactggaagcattccctttgaaaactggcacaagacagggatgccctctctcaccactcctattcaacataatgttggaagttctggccagggcaatctggaatatagtcattgaaataccatttattgttgacaatggatattcctgaattgatttaaagataaatttctggctgtgatttcaacttatagaagtattttaattagttatattattttttatgattaatactaattttgtatttattattttctaaaaatttaacttgtgttgttagttacaagaggtatctgcacagatttgttacattagaatattgaatgactgaggtttgg

SEQ ID NO: 41569 - DNA, 797 bp, Homo sapiens
cttagttctgggtgatttccaaaaaaccacacctttcatggattcagattaactttggaccactcctagaatcctggacatgtctggaaagtgaataggtcattgcatttcattttaggtcaagtcaaccacaaatctggctgaacctgactaatctgagcagagtccaccaaactatggcttctaacctaggttaactccaacagaactggggaaccatttattattctgtgggtgaggccgcatgcatcacaagtcaacagcayatgaatgaaaaccacagaattaaaggtgttactggcaccaagacccaaactaaaagtgctgatccaggaatgacaatttctaaacattttcaggcaagttaggaacacaagtaagactagctctgggcagatcccatttgtgtgactggcaccaacacagaaaatactgtacagtgtgtgcctcatttaccttggcactgaggctgcatcagcccctttgtgccctgactatgccttatgcaaattttaagatacaaagcaattttttgttccaggtttattttaatcatctttagattctccttcccttagcaggttaccttcattgtggtaaaaataaagaaataagtaagtctgtgatccccttgtatagtttaaaaacattctggttgccaggggaaatgcaaatgcagatcctttcttccatagtcttccaggttttcggggtatattaggtcaagtccattaagaagtaggagatttactgggggaaggaggagaaggtggagagatccttcagattgtgtagaa

SEQ ID NO: 41570 - DNA, 555 bp, Homo sapiens
atgatagctttttaaaatataactcaatgaattcaagtggaattcaaacctgaaagtaacatttgtgactttgtttattattattattattattgtgagggtcctgtatttaaacataagaaaccactaggaatcagctgggagctctgatagccaagatttcttgagaaagctcaaaatgagaaatgttactccttcttcaacgttggactgacctataattctcctgcttgaaggggagaaatagaggggtcaggaaaaggtcaatagttaatcttccttataatttgatttcttgttatttctctatgttcagaatctttcctggagggaaactttcctgatggaccaatgttgctgtaaaacatattccaggaacatttattgcctatatctctcaggttttgtgtgtaacataaactatactaagctatgggtagtttttcatgtacttttattattctactctcagatttatgatagaattaagaagaatgaagactatatttttcttttctttttcttttctttttcttttcttyttttttttttttt

SEQ ID NO: 41571 - DNA, 1261 bp, Homo sapiens
acactggagtctacttgatggtggagggtgggaggagggagaggatttaaaaaaaatctattgagtattatccttattacctgggtgactaaataatctggacaccaaacccccacaacacacagtttacctatataacaagcctgcacatatacgcctaaacctaaaataaaagttaaaaaaattcttaatttcagttctttgtacataattgctaaaacgtgatgtaacagtatgtaatgcaccataggggagaactgatgtcccaagctagcaaaagggtagtatggcagccctttatagggaactttgccttcaagggtggacagggaggttgctgctcaaaaagccaacctggcagatgggaacagaaaataacaaaacaaaacaaacaactacttgcttgaaactatatcacagactctgactcagatgttcaaagcttctaagaagctgtcatataacaatttaatacttggccaggcacattggctcacgcctgtaatcccagcactttggagggccgaggcaggcagatcacgaggtcagaagatcgagaccatcctggttaacatggtgaaaccccgtctctactaaaaatacaaaaaaattagccaggcgtggcggcatgcgcctgtagtcccagctgttgagtaggctgaggcaggagaatggcatgaacccaggaggcggagcttgcagtgagccgagrtcatgccactgcagtccagcctgggtgacagagcaagactccgtctcaaaaaaaaaaaaaaaattaatacttaatctcaacacttaggtttgccattgtccttatcatgaaaattactacaattcccaaactcatggcacaaacatgtgttgacaaaatctatatacaaaatgtgaggtatagtcgacaaaatctttagaacaaaatgtgaggtgatgctagaatgtggtgacaattttgccctaacttaattggaaagccattgtaacttgaatagaatggtccacctgcagcatggtcttccctgctctgtcacatagcatcagaaaggaccagatacttgttaagaacatctttaaactgtgttgtttatgcttttgtttttgagtcagcaatcgctgacagattttagaaactggcgggaataaagaatcagacatttaatttggcagggcagtcttgtacttcagataaatggatctggatttgtgatgccttcttcaaaatattaatttctcttttgaaaccaaatcatatttggcttcaata

SEQ ID NO: 41572 - DNA, 511 bp, Homo sapiens
atacaaactaagcactcggtgaataggacaggtgataactattatcctcataggcacacttgccacatatgcatattgtgtatgtttstttaatatacaatatatgacatgtatttctatattagtgctttatgtatctgtaatacctaagacacaatgtgacacatagtatatgctcaataaatatttgctgaacaaagctgaaaggctaactataatgggtttttctcatacaaatgttgtattttatgttaataatgaactccaagactccctaagactgctaactctatgtaataatccccagtaacagattataaagatggaaatttttctatttgtttatatattttttcaaaactgggctggattacttttatcaaatgctttctctggtataagatactgttctgttttacatgtattaccacattcgattctcacaagaatcctatgaggttattatctccttctttcagatgaggaatctgagaaataaagatgtaaggtg

SEQ ID NO: 41573 - DNA, 537 bp, Homo sapiens
atatttgccaggctggtctcaaacgcctgaccttgtgatctgcccgccccagcctcccaaagtgctgggatyacaggtgtgagccactatgcccagcccaaactcaccaatttttaaaaataaaagtatcaggtacatattggaccgtcaataagtactagttaaatatacacttagtctaagtgttctgaaaaaaaacaaaatttatttttataggctagattagtttgaagacttattttgaacacttgcttttaaatatgtttatatgtatttgtttatgtaaaacacttctggatataaaatgaaatatttcaggtagaaataacttagcattactgaaatatttagaaggcgaagtctcagtaatcctctacaaagtccagaacacaaaaatttgtgctatacatgcccagctggttgtcagatgaagagataacgtgcacatagtgggaaagttatttttcatcttacataggccaatgggtctttaacaggtttcccattaaagtgttatactgctcagtgtaggcaatc

SEQ ID NO: 41574 - DNA, 537 bp, Homo sapiens
atatttgccaggctggtctcaaacgcctgaccttgtgatctgcccgccccagcctcccaaagtgctgggattacaggtgtgagccactatgcccagcccaaactcaccaatttttaaaaataaaagtatcaggtacatattggaccgtcaataagtactagttaaatatacacttagtctaagtgttctgaaaaaaaacaaaatttatttttataggctagattagtttgaagacttattttgaacacttgcttttaaatatgtttatatgtatttgtttatgtaaaacacttctggatataaaatgaaatatttcaggtagaaataacttagcattactgaaatatttagaaggcgaagtctcagtaatcctctacaaagtccagaacacaaaaatttgtgctatacatgcccagctggttgtcagatgaagagataacgtgcacatagtgggaaagttatttttcatcttacataggccaatgggtctttarcaggtttcccattaaagtgttatactgctcagtgtaggcaatc

SEQ ID NO: 41575 - DNA, 1128 bp, Homo sapiens
tcccacctcagtcccccaagtagctgagactacaggtgcatgccaacacacccagctaattttkgcttttctgtagagatgcatttcactatgttgcccaggctggtcttaaactcctgagctcaagaaatctgcctgcctcatcctcccaatgtggggagattacaggcatgagtgactgctcctagccatggacaggctacttcatcttctcagtgcttcagttttctcatctataaattgtagacaaaaaatagcatgcacctcagagggttgctatggggattacacgaatgaaaacaggtaaagggcagtgaatgttcaataaaggttggctatatttattacgtactgggtatgtcaatgggtcttcagcatctattcctacttctttctatgggatttcctgactacagaggctggaaaatgaaaaactacatttctcagactcccttgcagctagggttcacaatgcaaattgggtttccacggttagatgccctaactggatgtgaaagctgaagtaagagagagaccatcttcctgttatctttctactgtcaaccaagcttatccagaattgaatgttgagaggcagttctgtggtagtggataatataactgctttctaatccttttccccttctctctagatttcaagtattgcagtgtgttcttgactttgatccagcagctgcctcctaattcccactccttcaattattcagcaatactacaaacacttaattccctgaattaaatttctttcttcttaaactacataggatagtttctatttcccatatgcactctgattaaatcatatggtgacctgtggtcctacacataagtacagggcagagatacaaaccaagtactgcactataggaatataaattataaggtattgctttttggcaaatctgtgaactcatttcccatattaaatatgaaagtcaacatcaccaccctttgttattaaggacctacacttacatatattcactttacgtagccacataccagagagtgatttacagtatgttctagaaaacagacaatttagtcctcacccagagatcatctgctttcagaattctggaaatcctcagcagtcttttagtgttt

SEQ ID NO: 41576 - DNA, 558 bp, Homo sapiens
ttttgaatttttgagcaggtagctattaatgccaagaggtccacaattcaaacttttcttcaactaagtactcaaaacatcagtaggaggcaatattagaatagctgtagacaggcaatgctgagaataaaataaccagctcatcttcagaccaaagtgttttcaagatgcaaaacactccttttgcaaccttaaccaattatttatctcaaaggcccaatgccaatgagaagcaataatataatagaaagcacttaaaaacaaagggaaactgaatgttagtctcttctctgaagaccagtgaccaagtttctttgaatccaatcctgataartatctgagactcactttttccaatcataaaagaatggcctgtttattctacaagcatattgacagaatgtaatcatatattaggttacatagcaccgttcctctataaatattaagatattaaagtgtatcgtggtccagtgtccactctctacttggtacatgatttacatattctacccttcagcccagtgaactgctacatcccaacatccaaaaatgcca

SEQ ID NO: 41577 - DNA, 544 bp, Homo sapiens
aaaaaaataaataaagtgttgagttcacaatatagaaaattgtcaccatataatgataagtgaaaatcaggatataaaagtggtatcacagaatcccaattatgtgaaaaatagagaacgtgtgcataacatttttatttccaaagagacaaaagcttttgggaatgaaatgctctatatcttaatttcattggtgctacacctttattaaatgtttcagcactcaattcaccgtaaatgatctttttttttttkgagagagagagagagtttggctctgtggcccaggctggagtgcaatctgggatcactgcaacctctgctcctgggttcaagcgattctcaagcctctcctcccaagtagctcacactacaggcatgtaccacaataccctggctaatttttgtgtatttttagtagagaccgagttttgccatgttggcctggctggtctcgaactcctggcctcaagtaatccacctgccttggcctcccaaagtggtgggattacaggcatgagccaccgcacccagccaggttcct

SEQ ID NO: 41578 - DNA, 544 bp, Homo sapiens
aaaaaaataaataaagtgttgagttcacaatatagaaaattgtcaccatataatgataagtgaaaatcaggatataaaagtggtatcacagaatcccaattatgtgaaaaatagagaacgtgtgcataacatttttatttccaaagagacaaaagcttttgggaatgaaatgctctatatcttaatttcattggtgctacacctttattaaatgtttcagcactcaattcaccgtaaatgatctttttttttttggagagagagagagagtttkgctctgtggcccaggctggagtgcaatctgggatcactgcaacctctgctcctgggttcaagcgattctcaagcctctcctcccaagtagctcacactacaggcatgtaccacaataccctggctaatttttgtgtatttttagtagagaccgagttttgccatgttggcctggctggtctcgaactcctggcctcaagtaatccacctgccttggcctcccaaagtggtgggattacaggcatgagccaccgcacccagccaggttcct

SEQ ID NO: 41579 - DNA, 544 bp, Homo sapiens
aaaaaaataaataaagtgttgagttcacaatatagaaaattgtcaccatataatgataagtgaaaatcaggatataaaagtggtatcacagaatcccaattatgtgaaaaatagagaacgtgtgcataacatttttatttccaaagagacaaaagcttttgggaatgaaatgctctatatcttaatttcattggtgctacacctttattaaatgtttcagcactcaattcaccgtaaatgatctttttttttttggagagagagagagagtttggctctgtkgcccaggctggagtgcaatctgggatcactgcaacctctgctcctgggttcaagcgattctcaagcctctcctcccaagtagctcacactacaggcatgtaccacaataccctggctaatttttgtgtatttttagtagagaccgagttttgccatgttggcctggctggtctcgaactcctggcctcaagtaatccacctgccttggcctcccaaagtggtgggattacaggcatgagccaccgcacccagccaggttcct

SEQ ID NO: 41580 - DNA, 544 bp, Homo sapiens
aaaaaaataaataaagtgttgagttcacaatatagaaaattgtcaccatataatgataagtgaaaatcaggatataaaagtggtatcacagaatcccaattatgtgaaaaatagagaacgtgtgcataacatttttatttccaaagagacaaaagcttttgggaatgaaatgctctatatcttaatttcattggtgctacacctttattaaatgtttcagcactcaattcaccgtaaatgatctttttttttttggagagagagagagagtttggctctgtggcccaggctggagtgcaatctkggatcactgcaacctctgctcctgggttcaagcgattctcaagcctctcctcccaagtagctcacactacaggcatgtaccacaataccctggctaatttttgtgtatttttagtagagaccgagttttgccatgttggcctggctggtctcgaactcctggcctcaagtaatccacctgccttggcctcccaaagtggtgggattacaggcatgagccaccgcacccagccaggttcct

SEQ ID NO: 41581 - DNA, 671 bp, Homo sapiens
tgaaatttttatccattgcataaaaaggataaaaaacacacatataaacaaccataaataaaaggtatagggcaaagagagtttgatgggtgtactagtctgttctcatgaagctatgaagaaataccccagattgggaaatttataaaggaaggaaatttaattgactcagagttccacatggctggggaggccccaggaaacttacaatcwtggtggaaggcaccacttcacggggcaacaggggagagaatgagtgctgagtgaagggggaagccccttataaaaccactagctcttgtgagaactcactcattatttcaagaacatcatggggaaaactgtccctgtgattcagttatctccacctagtcccacccttgacatgtggggattattacaattcaaggtgagattttggtggggacacagagctaaactatatcaatgggtgtacaaataaagttctaaatatggaactgagaataggagagaactttcttatagtttgaaaaataggtttgaattatggaaaatgtatgtcaaggaaagttatttttgctagggtggcacccattgctcctctttctgctaacagcacctttaatttcctttgtcaccactgagtttcagcatatgttgaaacctctctcatgccacaggagtgaata

SEQ ID NO: 41582 - DNA, 727 bp, Homo sapiens
cctttgcctgggccagtgttcagaatggtatttcctagaattttttttctagtctttatagttttaggttttacagttaagtctttaattcattttgagttgatttttgtgtatagtgaaaggggtctattttgaatcttctgcatatgtctagccagttatccaagtaacatttattgaatagggatatcattcagagttaccaaataaatgccgtaagtcacatatgatggaatgcctgtgaacgccagaaagtagttgcaagtgtgagagtaaaagagaaagagawaaaaataagtaaaatctattttcaaaactttctcaacagcaataccgatgcactcaaatgcagaaatgaaaacccataaactgaaaatattcaagtccagaaactgcaatgtgcagtgtcatcagaaggcttcattttgtgtccagccccacacagaagggaaaccacaaatcacttcaaatatgaataactataaatcataaacttggttccttacaattcttcaagatgagtattgcatgggaaaagattttgtatcttggaccaaaaaaatagttttggaggcttacaaatgtttcccagtgatatcaacatatcacacaagcaggtagccaaatcccaatcttgactttccatttatctgacattatttctgtcacaggagaggatctgagatggtatagaagtgtttgtatcccagcagcaggtggaagccag

SEQ ID NO: 41583 - DNA, 2408 bp, Homo sapiens
tgcattgagatgttaatagggaaactggattcaaggatattggaggtcactatactatattcgcaacttctctgttcatttgaattctttcataataaattattaaaacattgtttaaattgtattgtattcaaasgctcatggttttggaattagaaataacttgggtcagtgccagtttcagatgggtgactttagataagtcacttaacttctcagcatctccatttctcttatccgctagttagcatgtactttgatgatttttttgtgggatttcgatgtaataaatatataaagagattacctgacacatagtagacatttaataaacaatggctcttattacaatgaaagttttacaaattatcataagaatttgcatttttttcagataccaacatctacagacagcacctgaaaatatgaagcatacatttctatagtgtagtttcaggcatctgaataatgacatagggagaatttgaggatttaattaagaccaacaagcatctattaagcattgtctatgttacagtcattgtgcttgggagaggagattcagagacaaacaaaacgctttctcaatccacacagattttacagtatagtggataaaagagagaagaaatcagctaatttttctacagcaggaagtaagatatgacagcagtaaacaccagatacaacgaaagcaagattaaagttttacctaaacaacttgttgataatgacatcagcataaatgaataatattaacttatcaggaacttaccaggaaaacacagaaatatgcaaaggattttataatcaaaacatttgtcttgttgtttatgttgacaaatttatgaccccatatgtactgaatggaagttactttatctttttttttctattcagctttttcttatctccttatactgaaagaactccatagatgatataagcaattccattgtcaccccaatgtcaatttaagatggaggtcattgtttaagaagtgtttggtcttagtttttgcaatgtctattcatatgttgacccccatatgtgccctgtagcttttgcttctcatcctaattctgtcctctagaactgcatgcatgacacataattcctttcacagtacaatcatttggaaactgctgccttctaacaaaccaaccaaccatcttagccccctaaacctagtaacttctaccacatctgcatttttcttactttatattaaaaatccatagtttcttgatttagttattacaacatagtttcaagatttctattactatgccctttgtctttctttgaatgcttttcaggatattaataacatgtaataatatgggatcaggttaaatatgactccccaaactgaatacaattattaaattgatttctcatcaatatcaagtgaagtaagagtaacaactcccttaatctgaacattgtgttttagaatcaaattctgaataaacagaaatatggcagtgagtcatttagtaaagccaaaggtttctttggaagccccttaaatatataaatctggtaaattaatattctttcatatattaattttacttaaattgaagaaaatctctcttgctttcattttaattattaattattatgtgccacactttctccatggcaggcacagagtgaaatgagtatgaagaaaatatcacttttgttgatatgctatgttcagtccaccagtttttgtaatgccatgcgttttaattacataaatgtaagcaaattattgttgatatcatttataattttattcggaatggcatttgctaactttatttactttaaaaatttaggaaaccatcaaatttagcagcttcttattctactatacttatttgttctatattggcaagtctacttcaccatgtattatttccctagaatcgtgtgttatgacaaatattatttcaagatttagttagggatggtggtgctatggtttgaatttgtgccctgaaaaacgtgataaaaactgaatcccaacacaactgtgttttgacacgggacctaattggaggtgtttatttcataaggacaccaccttcatgaatgaattaatgctgattataaaggatttaaggctatgagttcaatcttttgttctcttgcaacctctcttgcccttctaccatccactatgggatgatgcagcatcgaggccctcaccagatgctgtccttacaatcttggacttcccagcttccagaatcatgagccaagtaaatttctgtttattataaattacccagtctcaggtattatgttatagtagcacaaaacagtctaagacaagtgttataaattctgttccttgttcataacaatggccatcggaaatctacaaataatcccaagccataagaacttaatgc

SEQ ID NO: 41584 - DNA, 2408 bp, Homo sapiens
tgcattgagatgttaatagggaaactggattcaaggatattggaggtcactatactatattcgcaacttctctgttcatttgaattctttcataataaattattaaaacattgtttaaattgtattgtattcaaacgctcatggttttggaattagaaataacttgggtcagtgccagtttcagatgggtgactttagataagtcacttaacttctcagcatctccatttctcttatccgctagttagcatgtactttgatgatttttttgtgggatttcgatgtaataaatatataaagagattacctgacacatagtagacatttaataaacaatggctcttattacaatgaaagttttacaaattatcataagaatttgcatttttttcagataccaacatctrcagacagcacctgaaaatatgaagcatacatttctatagtgtagtttcaggcatctgaataatgacatagggagaatttgaggatttaattaagaccaacaagcatctattaagcattgtctatgttacagtcattgtgcttgggagaggagattcagagacaaacaaaacgctttctcaatccacacagattttacagtatagtggataaaagagagaagaaatcagctaatttttctacagcaggaagtaagatatgacagcagtaaacaccagatacaacgaaagcaagattaaagttttacctaaacaacttgttgataatgacatcagcataaatgaataatattaacttatcaggaacttaccaggaaaacacagaaatatgcaaaggattttataatcaaaacatttgtcttgttgtttatgttgacaaatttatgaccccatatgtactgaatggaagttactttatctttttttttctattcagctttttcttatctccttatactgaaagaactccatagatgatataagcaattccattgtcaccccaatgtcaatttaagatggaggtcattgtttaagaagtgtttggtcttagtttttgcaatgtctattcatatgttgacccccatatgtgccctgtagcttttgcttctcatcctaattctgtcctctagaactgcatgcatgacacataattcctttcacagtacaatcatttggaaactgctgccttctaacaaaccaaccaaccatcttagccccctaaacctagtaacttctaccacatctgcatttttcttactttatattaaaaatccatagtttcttgatttagttattacaacatagtttcaagatttctattactatgccctttgtctttctttgaatgcttttcaggatattaataacatgtaataatatgggatcaggttaaatatgactccccaaactgaatacaattattaaattgatttctcatcaatatcaagtgaagtaagagtaacaactcccttaatctgaacattgtgttttagaatcaaattctgaataaacagaaatatggcagtgagtcatttagtaaagccaaaggtttctttggaagccccttaaatatataaatctggtaaattaatattctttcatatattaattttacttaaattgaagaaaatctctcttgctttcattttaattattaattattatgtgccacactttctccatggcaggcacagagtgaaatgagtatgaagaaaatatcacttttgttgatatgctatgttcagtccaccagtttttgtaatgccatgcgttttaattacataaatgtaagcaaattattgttgatatcatttataattttattcggaatggcatttgctaactttatttactttaaaaatttaggaaaccatcaaatttagcagcttcttattctactatacttatttgttctatattggcaagtctacttcaccatgtattatttccctagaatcgtgtgttatgacaaatattatttcaagatttagttagggatggtggtgctatggtttgaatttgtgccctgaaaaacgtgataaaaactgaatcccaacacaactgtgttttgacacgggacctaattggaggtgtttatttcataaggacaccaccttcatgaatgaattaatgctgattataaaggatttaaggctatgagttcaatcttttgttctcttgcaacctctcttgcccttctaccatccactatgggatgatgcagcatcgaggccctcaccagatgctgtccttacaatcttggacttcccagcttccagaatcatgagccaagtaaatttctgtttattataaattacccagtctcaggtattatgttatagtagcacaaaacagtctaagacaagtgttataaattctgttccttgttcataacaatggccatcggaaatctacaaataatcccaagccataagaacttaatgc

SEQ ID NO: 41585 - DNA, 2408 bp, Homo sapiens
tgcattgagatgttaatagggaaactggattcaaggatattggaggtcactatactatattcgcaacttctctgttcatttgaattctttcataataaattattaaaacattgtttaaattgtattgtattcaaacgctcatggttttggaattagaaataacttgggtcagtgccagtttcagatgggtgactttagataagtcacttaacttctcagcatctccatttctcttatccgctagttagcatgtactttgatgatttttttgtgggatttcgatgtaataaatatataaagagattacctgacacatagtagacatttaataaacaatggctcttattacaatgaaagttttacaaattatcataagaatttgcatttttttcagataccaacatctacagacagcacctgaaaatatgaagcatacatttctatagtgtagtttcaggcatctgaataatgacatagggagaatttgaggatttaattaagaccaacaagcatctattaagcattgtctatgttacagtcattgtgcttgggagaggagattcagagacaaacaaaacgctttctcaatccacacagattttacagtatagtggataaaagagagaagaaatcagctaatttttctacagcaggaagtaagatatgacagcagtaaacaccagatacaacgaaagcaagattaaagttttacctaaacaacttgttgataatgacatcagcataaatgaataatattaacttatcaggaacttaccaggaaaacacagaaatatgcaaaggattttataatcaaaacatttgtcttgttgtttatgttgacaaatttatgaccccatatgtactgaatggaagttactttatctttttttttctattcagctttttcttatctccttatactgaaagaactccrtagatgatataagcaattccattgtcaccccaatgtcaatttaagatggaggtcattgtttaagaagtgtttggtcttagtttttgcaatgtctattcatatgttgacccccatatgtgccctgtagcttttgcttctcatcctaattctgtcctctagaactgcatgcatgacacataattcctttcacagtacaatcatttggaaactgctgccttctaacaaaccaaccaaccatcttagccccctaaacctagtaacttctaccacatctgcatttttcttactttatattaaaaatccatagtttcttgatttagttattacaacatagtttcaagatttctattactatgccctttgtctttctttgaatgcttttcaggatattaataacatgtaataatatgggatcaggttaaatatgactccccaaactgaatacaattattaaattgatttctcatcaatatcaagtgaagtaagagtaacaactcccttaatctgaacattgtgttttagaatcaaattctgaataaacagaaatatggcagtgagtcatttagtaaagccaaaggtttctttggaagccccttaaatatataaatctggtaaattaatattctttcatatattaattttacttaaattgaagaaaatctctcttgctttcattttaattattaattattatgtgccacactttctccatggcaggcacagagtgaaatgagtatgaagaaaatatcacttttgttgatatgctatgttcagtccaccagtttttgtaatgccatgcgttttaattacataaatgtaagcaaattattgttgatatcatttataattttattcggaatggcatttgctaactttatttactttaaaaatttaggaaaccatcaaatttagcagcttcttattctactatacttatttgttctatattggcaagtctacttcaccatgtattatttccctagaatcgtgtgttatgacaaatattatttcaagatttagttagggatggtggtgctatggtttgaatttgtgccctgaaaaacgtgataaaaactgaatcccaacacaactgtgttttgacacgggacctaattggaggtgtttatttcataaggacaccaccttcatgaatgaattaatgctgattataaaggatttaaggctatgagttcaatcttttgttctcttgcaacctctcttgcccttctaccatccactatgggatgatgcagcatcgaggccctcaccagatgctgtccttacaatcttggacttcccagcttccagaatcatgagccaagtaaatttctgtttattataaattacccagtctcaggtattatgttatagtagcacaaaacagtctaagacaagtgttataaattctgttccttgttcataacaatggccatcggaaatctacaaataatcccaagccataagaacttaatgc

SEQ ID NO: 41586 - DNA, 2408 bp, Homo sapiens
tgcattgagatgttaatagggaaactggattcaaggatattggaggtcactatactatattcgcaacttctctgttcatttgaattctttcataataaattattaaaacattgtttaaattgtattgtattcaaacgctcatggttttggaattagaaataacttgggtcagtgccagtttcagatgggtgactttagataagtcacttaacttctcagcatctccatttctcttatccgctagttagcatgtactttgatgatttttttgtgggatttcgatgtaataaatatataaagagattacctgacacatagtagacatttaataaacaatggctcttattacaatgaaagttttacaaattatcataagaatttgcatttttttcagataccaacatctacagacagcacctgaaaatatgaagcatacatttctatagtgtagtttcaggcatctgaataatgacatagggagaatttgaggatttaattaagaccaacaagcatctattaagcattgtctatgttacagtcattgtgcttgggagaggagattcagagacaaacaaaacgctttctcaatccacacagattttacagtatagtggataaaagagagaagaaatcagctaatttttctacagcaggaagtaagatatgacagcagtaaacaccagatacaacgaaagcaagattaaagttttacctaaacaacttgttgataatgacatcagcataaatgaataatattaacttatcaggaacttaccaggaaaacacagaaatatgcaaaggattttataatcaaaacatttgtcttgttgtttatgttgacaaatttatgaccccatatgtactgaatggaagttactttatctttttttttctattcagctttttcttatctccttatactgaaagaactccatagatgatataagcaattccattgtcaccccaatgtcaatttaagatggaggtcattgtttaagaagtgtttggtcttagtttttgcaatgtctattcatatgttgacccccatatgtgccctgtagcttttgcttctcatcctaattctgtcctctagaactgcatgcatgacacataattcctttcacagtacaatcatttggaaactgctgccttctaacaaaccaaccaaccatcttagccccctaaacctagtaacttctaccacatctgcatttttcttactttatattaaaaatccatagtttcttgatttagttattacaacatagtttcaagatttctattactatgccctttgtctttctttgaatgcttttcaggatattaataacatgtaataatatgggatcaggttaaatatgactccccaaactgaatacaattattaaattgatttctcatcaatatcaagtgaagtaagagtaacaactcccttaatctgaacattgtgttttagaatcaaattctgaataaacagaaatatggcagtgagtcatttagtaaagccaaaggtttctttggaagccccttaaatatataaatctggtaaattaatattctttcatatattaattttacttaaattgaagaaaatctctcttgctttcattttaattattaattattatgtgccacactttctccatggcaggcacagagtgaaatgagtatgaagaaaatatcacttttgttgatatgctatgttcagtccaccagtttttgtaatgccatgcgttttaattacataaatgtaagcaaattattgttgatatcatttataattttattcggaatggcatttgctaactttatttactttaaaaatttaggaaaccatcaaatttagcagctkcttattctactatacttatttgttctatattggcaagtctacttcaccatgtattatttccctagaatcgtgtgttatgacaaatattatttcaagatttagttagggatggtggtgctatggtttgaatttgtgccctgaaaaacgtgataaaaactgaatcccaacacaactgtgttttgacacgggacctaattggaggtgtttatttcataaggacaccaccttcatgaatgaattaatgctgattataaaggatttaaggctatgagttcaatcttttgttctcttgcaacctctcttgcccttctaccatccactatgggatgatgcagcatcgaggccctcaccagatgctgtccttacaatcttggacttcccagcttccagaatcatgagccaagtaaatttctgtttattataaattacccagtctcaggtattatgttatagtagcacaaaacagtctaagacaagtgttataaattctgttccttgttcataacaatggccatcggaaatctacaaataatcccaagccataagaacttaatgc

SEQ ID NO: 41587 - DNA, 603 bp, Homo sapiens
gattcaggtcacagtttcttatgggagttgttttattcatttttttaatgtaacactcaagttaagacataatcaaaatgttttttcatttcttttactgattaacatatattttctttccccatctttcattgcagtatagaacataaatgtgacaatacttgggagtcccatttccatcttcccaatatggtaaattraataaaggcatacataaagaaacaaatttatgaataagtgaatcattaaattgaggtgttaatgcacacagtttggcgttaggaagtaccgggttagaattctggctttttaatttagtaaatatgtgacccaaaaatggctttttgtttcaaggcttactttcactatttgtaaaataccaatgaaaatttccatttttagttaccacagttattttggttgcaaataatagagactaaacacaaactgatataataaaaacatgactttactgtatgtaattggaacagccagtggaaaggtgcaagtatttcatggacttaaacgattgatatattccctttctttctctatctgtatctctacctctctttttcttttcttacaaatgtattttccttt

SEQ ID NO: 41588 - DNA, 708 bp, Homo sapiens
cagagtgagactctatctgaaaaaacaaaaccaatcaaaaagactgaaatataatgggaaaaatcagcttaattgtaggtcaggtaccaggcctcaagttaaaagttagacactacatcttattagtaagactaatattagatcctaccacttgctaagatgatgaaataatttacaattattattaaaaagtacccaatttaaaatgggcaaaatattcgaatagatacttcactgaaaaagatacaggaatggctcataaacacatgaaaagatctcaacaktattagtcatctaggaaatgcaaatcaagaccaaaataacataccatttaacatccactagaattactataataaaaaaagacaataacaagtgttggcaatgatgtggataaattgatacccttataacattgctggtagaaatataaaatggtacaactgttttaaaaattattttggcaacgtctgtaaaaagttaaatataaatgtatcatgatcctatatttctactcctagaaatctacccaagaaagtgaaaacatgtccagacaaaggcttgcatataaatgtctgtagaagcattattcataatagtcaaaattgaaaacaactcaaatttctgtttcttagtaattagataaacgaaatctgttatatcacaaaatggaatactatttaagtaaaagaaattagtgatacatga

SEQ ID NO: 41589 - DNA, 708 bp, Homo sapiens
cagagtgagactctatctgaaaaaacaaaaccaatcaaaaagactgaaatataatgggaaaaatcagcttaattgtaggtcaggtaccaggcctcaagttaaaagttagacactacatcttattagtaagactaatattagatcctaccacttgctaagatgatgaaataatttacaattattattaaaaagtacccaatttaaaatgggcaaaatattcgaatagatacttcactgaaaaagatacaggaatggctcataaacacatgaaaagatctcaacattattagtcatctaggaaatgcaaatcaagaccaaaataacataccatttaacatccactagaattactataataaaaaaagacaataacaagtgttggcaatgatgtggataaattgatacccttataacattgctggtagaaatataaaatggtacaactgttttaaaawttattttggcaacgtctgtaaaaagttaaatataaatgtatcatgatcctatatttctactcctagaaatctacccaagaaagtgaaaacatgtccagacaaaggcttgcatataaatgtctgtagaagcattattcataatagtcaaaattgaaaacaactcaaatttctgtttcttagtaattagataaacgaaatctgttatatcacaaaatggaatactatttaagtaaaagaaattagtgatacatga

SEQ ID NO: 41590 - DNA, 708 bp, Homo sapiens
cagagtgagactctatctgaaaaaacaaaaccaatcaaaaagactgaaatataatgggaaaaatcagcttaattgtaggtcaggtaccaggcctcaagttaaaagttagacactacatcttattagtaagactaatattagatcctaccacttgctaagatgatgaaataatttacaattattattaaaaagtacccaatttaaaatgggcaaaatattcgaatagatacttcactgaaaaagatacaggaatggctcataaacacatgaaaagatctcaacattattagtcatctaggaaatgcaaatcaagaccaaaataacataccatttaacatccactagaattactataataaaaaaagacaataacaagtgttggcaatgatgtggataaattgatacccttataacattgctggtagaaatataaaatggtacaactgttttaaaaattattttggcaaygtctgtaaaaagttaaatataaatgtatcatgatcctatatttctactcctagaaatctacccaagaaagtgaaaacatgtccagacaaaggcttgcatataaatgtctgtagaagcattattcataatagtcaaaattgaaaacaactcaaatttctgtttcttagtaattagataaacgaaatctgttatatcacaaaatggaatactatttaagtaaaagaaattagtgatacatga

SEQ ID NO: 41591 - DNA, 708 bp, Homo sapiens
cagagtgagactctatctgaaaaaacaaaaccaatcaaaaagactgaaatataatgggaaaaatcagcttaattgtaggtcaggtaccaggcctcaagttaaaagttagacactacatcttattagtaagactaatattagatcctaccacttgctaagatgatgaaataatttacaattattattaaaaagtacccaatttaaaatgggcaaaatattcgaatagatacttcactgaaaaagatacaggaatggctcataaacacatgaaaagatctcaacattattagtcatctaggaaatgcaaatcaagaccaaaataacataccatttaacatccactagaattactataataaaaaaagacaataacaagtgttggcaatgatgtggataaattgatacccttataacattgctggtagaaatataaaatggtacaactgttttaaaaattattttggcaacgtctgtaaaaagttaaatataaatgtatcatgatcctatatttctactcctagaaatctacccaagaaagtgaaaacatgtccagacaaaggcttgcatataaatgtctgtagaagcattattcataatagtcaaaattgaaaacaactcaaatttctgtttcttagtaattagataaacgaaatctgttatatcacaaaatggaatactatttaagtaaaagaaattartgatacatga

SEQ ID NO: 41592 - DNA, 668 bp, Homo sapiens
aaacttctaatctcattcttactactagaaagaaaagttaaggcttttatgcttatttcttcttccatgtctggaagaatgaaggagctgaaataaaaagtgttaatattaagaaaatgaaagaaagagaggttagaatggaattgaattccaatcctgacattaccatttaatgaaactgggtctctatagagcatacataaaaatgaaaataaaataatagtgggacaaaataatatgtatctcactggataatcaacctttacataacctaatatatttaaaaggcactgacttcaaaatttgagttgaatgaaattttacttttacttttaccttttctttgattcaccctttcattctttggctcagtttctctgattcagccattttcttctcctttaaaacacaactgaaggatcacctcattccaaaagtcattcctagctgaactaatagagttggtgggcgtagatggcagagggatggtcttctctgtacagctatatgccctaggattccttctgaaatatcrtcttgtgcagtcctaatagcttattatttcttttctctaaaatctatctgattggaagaactgtatcctaaactaccacagttcctagagcaaggtaattattgaatcaatatatgttagacataactaaatt

SEQ ID NO: 41593 - DNA, 679 bp, Homo sapiens
ttgtttatttttccccttctataacatctcttatttttgctagctataatataaaaaataattggcaggcaaaatcattcattctttgaaagaattatacatttttggatgactccagagatatagcagatacatagatagatagatagatagatagatagatagagcttaaatattttctgaaacaaatagaaataagaatgtttaaaatgtatgtacttaacataatatttatttgaataattgggaaagggaacatggtctaatttttgtatccataatacctaagaaagtgaggagtgtgagaatatagtaaatgaccttgaaacaaaaatataacaacaacaaaacgaaagcaaaatgttgaacaactggtattaaataaatgttacttcccaaatgtattattagtttttgtcttggcaaaatgacatgaacaatatcaaccataaaatattttcatgccaattataagaaccmattattgtaaaagcactttgaaaagtacaaagttgggagcacaggcaatgtattaaaaaaaaaagcaaagggaatcttcatgaggaagttggcttgggttctagttctgccaaaaatgggtagtgtaacttaaatacattatttttatttctcaaataaataaacaatgtcgggagttatgataattaaataatataat

SEQ ID NO: 41594 - DNA, 815 bp, Homo sapiens
caggtggaagggagcagacaccacccacgagggaagccagcagagggcactgcttcctccacctacatagacagtcccagctgggcagcaccctcgttagcaccaggaggcaaccctgctaattaccaaacccaaactcgggatttgcatttttatgaaatgctcgcacaggaggcaaatattttgccttaaaaaaaaaaaaaaaaaagtcaagatggatgagggagaaaaactcataccagtacatactaattcaatctaatcttggtcatttcagtttctataagagagtgctttcataaagctacaaagctaacatccataactctccagtttccccagacaggatatctctgcattaagtttcccatttatcttcagagatggcaaatcatccrtttataatgggatctaataaagcaagctcccgttgcagtcccagccgcaggaatgcacctcagatccagagacactgcttggggcctgtgatggctttaccttctagatgcctgagtgtgcggctggggcatcagcacatgacttagttgtggtggcatgtgtgtgttggggagagggtgtggcctgcagaaagcagctaccctactcccacccgccccaacacatacatccccctgccaagaccaatggaggagctgggctgggctcgagacttgctctttaaggtaggcagagcttgctgtagggataacaatttggaaaggaatagggtttggcaggctgatgcagaggcttagctgagtaggtggggatgatgttccactatcacaggtcagggtgcctgggagcagcccctg

SEQ ID NO: 41595 - DNA, 815 bp, Homo sapiens
caggtggaagggagcagacaccacccacgagggaagccagcagagggcactgcttcctccacctacatagacagtcccagctgggcagcaccctcgttagcaccaggaggcaaccctgctaattaccaaacccaaactcgggatttgcatttttatgaaatgctcgcacaggaggcaaatattttgccttaaaaaaaaaaaaaaaaaagtcaagatggatgagggagaaaaactcataccagtacatactaattcaatctaatcttggtcatttcagtttctataagagagtgctttcataaagctacaaagctaacatccataactctccagtttccccagacaggatatctctgcattaagtttcccatttatcttcagagatggcaaatcatccgtttataatgggatctaataaagcaagctcccgttgcagtcccagccgcaggaatgcacctcagatccrgagacactgcttggggcctgtgatggctttaccttctagatgcctgagtgtgcggctggggcatcagcacatgacttagttgtggtggcatgtgtgtgttggggagagggtgtggcctgcagaaagcagctaccctactcccacccgccccaacacatacatccccctgccaagaccaatggaggagctgggctgggctcgagacttgctctttaaggtaggcagagcttgctgtagggataacaatttggaaaggaatagggtttggcaggctgatgcagaggcttagctgagtaggtggggatgatgttccactatcacaggtcagggtgcctgggagcagcccctg

SEQ ID NO: 41596 - DNA, 815 bp, Homo sapiens
caggtggaagggagcagacaccacccacgagggaagccagcagagggcactgcttcctccacctacatagacagtcccagctgggcagcaccctcgttagcaccaggaggcaaccctgctaattaccaaacccaaactcgggatttgcatttttatgaaatgctcgcacaggaggcaaatattttgccttaaaaaaaaaaaaaaaaaagtcaagatggatgagggagaaaaactcataccagtacatactaattcaatctaatcttggtcatttcagtttctataagagagtgctttcataaagctacaaagctaacatccataactctccagtttccccagacaggatatctctgcattaagtttcccatttatcttcagagatggcaaatcatccgtttataatgggatctaataaagcaagctcccgttgcagtcccagccgcaggaatgcacctcagatccagagacactgcttggggcctgtgatggctttaccttctagatgyctgagtgtgcggctggggcatcagcacatgacttagttgtggtggcatgtgtgtgttggggagagggtgtggcctgcagaaagcagctaccctactcccacccgccccaacacatacatccccctgccaagaccaatggaggagctgggctgggctcgagacttgctctttaaggtaggcagagcttgctgtagggataacaatttggaaaggaatagggtttggcaggctgatgcagaggcttagctgagtaggtggggatgatgttccactatcacaggtcagggtgcctgggagcagcccctg

SEQ ID NO: 41597 - DNA, 855 bp, Homo sapiens
ttcctgtattagtgagggttagaaacagagccaaaagggggtgtgtgtgtgtgtgtgtgtgtgtgtgtgtgtgtgatataaaaacatttattctaacaaattggctcatatgattatgaaggttgacaagtcccacgtctgtcgggtgagtaggcaagctggagacgcagaagagctgaggttgtaagttccagcctgggtctgaaggcctgagaactaggagggctgatggtgtaggttccagttggaaggccacaaacttgagacccagggacagccaatgtttcgctttgagtctgaaggtaggaaaaagctgatgtcctagaaggcaatcaggcggaaagaatactctcttactagggggagggtcagccttttgctctattcagrcctttaactgattgggtgaggccacccctgttggggagggaaatctgctttggccgtctgctgattcaaatgttaaactcatccccaaacaccctcaacagaaacacccagaatcatgtttaaccaaatatttgagcaccctgtgactcagccaagttgacacataaaattaaccactacccttcctttctatttttccctagttatcctggtctaccttaactggttttccagggagggccagcccttcaaaggggcccactgtccagcccagcccactgttcctgggaggaggcctgggtgccccagctggaagatgcctcagttcccgttaggttgcctctccccatagggcagtggctggctccccttacctcagctgggccagaggggccatctgtcctgccctcccatcccccagcacatccaggtgcttggctggcacatatcaggatgctctggcca

SEQ ID NO: 41598 - DNA, 2067 bp, Homo sapiens
tactggttcatttgccgtggccaatataagacgttagcagtagaggaaagtgggtgaggatatacgagaatcctctgtaccatctttgcaacttttctgtgcatcaaaaactattcttttaagaagtttgtctacttgttctaaaattttattttaaattattatccttaaaaattgcttccttaaaatggctgtaacaggctgttcagatagaggtgacaatggggacatgaatggggtggagtgtgacctactaaacagtttgttgtgtaaggtatcatttgttctccaggtgctaactgactccagagtgaaacatagggccttgcctgatctccaccctccccttctagttcctgacctgcctctttttgataggcccctgacttggggacatccttatagacaccaatatcttcaatatcttcaaaagtgcagactatgagagtcagggtctggccgggcacggtggctcgtgcctgtaatcccagcactttgggaggccgagatagtggatcacctgaattcaggagttcgacaccagcctggccaacatgatgaaaccgcatctctactaaaaatacaaaaattagccgcatgtggtggtgtgtgcctataatcccagctacccaggaggctgaggcaggagaatcactggaacttgggaggcagaggttgcattgagccaagaattgccactgcactccagcctgggtgacagagtgagactctgtctcaaaaaaaaaaaaagagtccgggtctctcttctgtagccataagatcctacagcagttctgcttcccaggccctggatcacacatcttccccagggcacttacaccaggaagaactttagatgagccatttcactgccttcccacaggggtgcggcctcatggccccatggttatgttctaagtcaacagtagaatgacatcttaatccagcataatatccactgatgctcccgcccactagccaggggccatttcctcctctgctgagtagagaaggttggtacataagggcatcacagacaccatcaatttgctcagaagggcatcaccatggcttcgactggcaggatagtggttaagaggaatgatttggaatagacaaccctacattcaaatcctgattctatcacttattcgtttatttaaaccctatgaccctcagtttccacaactgtaaaatacaggtaataaggttctggactattgaaggtattggtaatccggaatgtcactggcagagggtctaaaagtctctcctctgtggtttccatcgtttaccttttgaaagttgaatctccaggccagtgcagtgtctcacgsctgcaatcccaacactttgggaggccgaggtaggcagatcacttgagatcaggagttcgagaccagcctggccaacatcgtgaaaccctgtctctactaaaaatacaaaaattagctgggcgtggtggtgcacacctgtaatcccagctacttgggaggctgaggcaggagaattgcttgaacccgggaggtggaggttgcagtgagccgagattgtgccactgcattgcagcctgggcaacagagtgagactctgcctccaataataataaataaagaaagaaagttgaatttccagtctcctggtgtttgtgttctctctgagtcctcgaaactctcccgacagtggttctgtgagcacagtagtgggctccgctgtggctaggggtgcaattcagctcaaaactcctctggagcagctgggggaaggccaggagggtctgatacttgcccatcctgacattttcacccctaaccctctgtcagtgacattccctgtcatgtcatttacctgaaggtttgtgaacctctggcaagttgcggggagaaagtaagcaggagaaagaagcaggggttcactggctcaccagcctcccttctgttctaacagtgaccaacagtggaaagaggacgaaggctgtcaatgccattttggggaatcatatttgaatgattaccttgtgctaggaaccttgagcctccctttcccgagcccttggctcccaggtca

SEQ ID NO: 41599 - DNA, 2067 bp, Homo sapiens
tactggttcatttgccgtggccaatataagacgttagcagtagaggaaagtgggtgaggatatacgagaatcctctgtaccatctttgcaacttttctgtgcatcaaaaactattcttttaagaagtttgtctacttgttctaaaattttattttaaattattatccttaaaaattgcttccttaaaatggctgtaacaggctgttcagatagaggtgacaatggggacatgaatggggtggagtgtgacctactaaacagtttgttgtgtaaggtatcatttgttctccaggtgctaactgactccagagtgaaacatagggccttgcctgatctccaccctccccttctagttcctgacctgcctctttttgataggcccctgacttggggacatccttatagacaccaatatcttcaatatcttcaaaagtgcagactatgagagtcagggtctggccgggcacggtggctcgtgcctgtaatcccagcactttgggaggccgagatagtggatcacctgaattcaggagttcgacaccagcctggccaacatgatgaaaccgcatctctactaaaaatacaaaaattagccgcatgtggtggtgtgtgcctataatcccagctacccaggaggctgaggcaggagaatcactggaacttgggaggcagaggttgcattgagccaagaattgccactgcactccagcctgggtgacagagtgagactctgtctcaaaaaaaaaaaaagagtccgggtctctcttctgtagccataagatcctacagcagttctgcttcccaggccctggatcacacatcttccccagggcacttacaccaggaagaactttagatgagccatttcactgccttcccacaggggtgcggcctcatggccccatggttatgttctaagtcaacagtagaatgacatcttaatccagcataatatccactgatgctcccgcccactagccaggggccatttcctcctctgctgagtagagaaggttggtacataagggcatcacagacaccatcaatttgctcagaagggcatcaccatggcttcgactggcaggatagtggttaagaggaatgatttggaatagacaaccctacattcaaatcctgattctatcacttattcgtttatttaaaccctatgaccctcagtttccacaactgtaaaatacaggtaataaggttctggactattgaaggtattggtaatccggaatgtcactggcagagggtctaaaagtctctcctctgtggtttccatcgtttaccttttgaaagttgaatctccaggccagtgcagtgtctcacgcctgcaatcccaacactttgggaggccgaggtaggcagatcacttgagatcaggagttcgagaccagcctggccaacatcrtgaaaccctgtctctactaaaaatacaaaaattagctgggcgtggtggtgcacacctgtaatcccagctacttgggaggctgaggcaggagaattgcttgaacccgggaggtggaggttgcagtgagccgagattgtgccactgcattgcagcctgggcaacagagtgagactctgcctccaataataataaataaagaaagaaagttgaatttccagtctcctggtgtttgtgttctctctgagtcctcgaaactctcccgacagtggttctgtgagcacagtagtgggctccgctgtggctaggggtgcaattcagctcaaaactcctctggagcagctgggggaaggccaggagggtctgatacttgcccatcctgacattttcacccctaaccctctgtcagtgacattccctgtcatgtcatttacctgaaggtttgtgaacctctggcaagttgcggggagaaagtaagcaggagaaagaagcaggggttcactggctcaccagcctcccttctgttctaacagtgaccaacagtggaaagaggacgaaggctgtcaatgccattttggggaatcatatttgaatgattaccttgtgctaggaaccttgagcctccctttcccgagcccttggctcccaggtca

SEQ ID NO: 41600 - DNA, 674 bp, Homo sapiens
aatgacttgttaatatcacccggcaaggggtcagagtcagttgtgattttaacccttatcagtctgaacccaaagcccaccaggcatacagacactcagactcactgagccccacttcacaggccgcttccagtgaggggcagctttgatgcagagagggctttgcctctgctctcctccccgtgtgggctgagctatcctggacatgtcmcagggtggggctggtggtaacaaaaggagaagagctggtgagtggagcaaggacagtgggcatgtggctcagcctccagccccggtttctccctcctccccacctccagagaaccaggctcggagccactgactatgtgggtactgtagccaggccccaacctgccttcctgtctagagctttgtcttctgcttcacggctggaaagaggtgcccagcagccaagaatcttagaatcataaaaccttagcatctcagtcatgaggggaggaggtaacatttcttgagcacttactgtgtgccaagccctcttggcatgctttcacttaatctcagcagtaggctgggtgcggtggctcatgtccatcatcccagcactttgggaggcaaggcgggaagatacttgagctcaggagttcaagaccagcctgggcaacatagtgagactttgcctctactaaaag

SEQ ID NO: 41601 - DNA, 1322 bp, Homo sapiens
tgcatttctacaaagccactatccatttctgactgcaattctctagggccacatgaatatctttgtatttaggtaaaagttaaagcattaaacctatctcctaatatcccctttctttacgactcttacttcagatcccatatctgggattttgttcctgtgaagaattaggagaaactggaatatggcagctgacagatccaccaatccttcctcttacccatggaccaactgggggcttcaactggagagagaccttgcttcaagaataaaccayaccagtgaacaagaaggaaaggccttttggagtgtgtctttctgtgtgtttaaaaacagtgggaaaatccacaccacactctaagtggacagctcagaataatttagcatatttcctttcacacttaaagttcttaagatgagactgtgtaaatgagagaaagacttgattcagaggaaaaaaatgtgttctctctggactcttgcctagctcacaaggctttggagaacttgtcttcctaaatcggggcacctgctacagaagagaatgtttcgttccctctgggtatgcacagctaaggggcctcatttctcccagagggagctgctggcccgctctaaggggtgcaagaggaaggagtgtgcccagaccagctgggggagcattgaaaggacagcttggggatggaatttttttttttttatctccattttccagttaggtagagccaagctgaggaatccttttaagattattagaaaacatgccctgaagagagttgttcttaggttacacatgaaatcctaccgtcactagcccccatacaccagtgttgctggctgaagatacccgcttaaggatgctaacatttaccctggtactgccacattttctctagagcagctggcccttcttgctacagccctatcccccctccttgcttctgtgaaatggggagacaaagcacttttgctctccaaagcacttttggatactcaggaggaaagataagatacatgtttgaagtattcaatcataggagcaaagaacttgcaaaatatgaagtgacttggaattaaccatgttgtagcctaacgtgctactgcatttctaaatcatcaatatttgcttgtctttgcccctagactctagactatgttaactagttaaggatgttacattttgaaaggatgtatgttagatatattatttgcagcaagaagttcattctgtgcaatatggacatgtttgcaaaccataccaagggtcaggttgttgtacacttacagtacgtgtcaaccataatggaacatccacaaatgca

SEQ ID NO: 41602 - DNA, 1322 bp, Homo sapiens
tgcatttctacaaagccactatccatttctgactgcaattctctagggccacatgaatatctttgtatttaggtaaaagttaaagcattaaacctatctcctaatatcccctttctttacgactcttacttcagatcccatatctgggattttgttcctgtgaagaattaggagaaactggaatatggcagctgacagatccaccaatccttcctcttacccatggaccaactgggggcttcaactggagagagaccttgcttcaagaataaaccacaccagtgaacaagaaggaaaggccttttggagtgtgtctttctgtgtgtttaaaaacagtgggaaaatccacaccacactctaagtggacagctcagaataatttagcatatttcctttcacacttaaagttcttaagatgagactgtgtaaatgagagaaagacttgattcagaggaaaaaaatgtgttctctctggactcttgcctagctcacaaggctttggagaacttgtcttcctaaatcggggcacctgctacagaagagaatgtttcgttccctctgggtatgcacagctaaggggcctcatttctcccagagggagctgctggcccgctctaaggggtgcaagaggaaggagtgtgcccagaccagctgggggagcattgaaaggacagcttggggatggaatttttttttttttatctccattttccagttaggtagagccaagctgaggaatccttttaagattattagaaaacatgccctgaagagagttgttcttaggttacacatgaaatcctaccgtcactagcccccatacaccagtgttgctggctgaagatacccgcttaaggatgctaacatttaccctggtactgccacattttctctagagcagctggcccttcttgctacagccctatccccccyccttgcttctgtgaaatggggagacaaagcacttttgctctccaaagcacttttggatactcaggaggaaagataagatacatgtttgaagtattcaatcataggagcaaagaacttgcaaaatatgaagtgacttggaattaaccatgttgtagcctaacgtgctactgcatttctaaatcatcaatatttgcttgtctttgcccctagactctagactatgttaactagttaaggatgttacattttgaaaggatgtatgttagatatattatttgcagcaagaagttcattctgtgcaatatggacatgtttgcaaaccataccaagggtcaggttgttgtacacttacagtacgtgtcaaccataatggaacatccacaaatgca

SEQ ID NO: 41603 - DNA, 824 bp, Homo sapiens
gagaatcagttgagtccaggagtccaagaccagcctgggcaacacagcaagacctcatctctccaaaaaaaaaaaaagaagctgggcatggtgggacacacctgtagtcccagttactcaagaggttgaggtgggaggatagtttgagcccaagttgagaccactgcactccagcttgggtgacagagcaagaccctgaaaaacacaaagcaaaacatacaaaacaaaaagaaaaaaaaaggaaagaaaaaaacaacttaaaaaaattagatcttggccatgycctgtggctcatgcctataatcccagcactttgggaggctgaggcgggcagatcacttgaggttgggagttcgagaccagcctggccaacatggtgaaaccctgtctctactaaaaatgcaataattagctgggcgtgatggcacatgcttgtaatcccagctacttgggaggctgaggcaggagaattgcttgaacccgggaggcagagattgcaatgagctgagatcgtgacactacactccagcctgggtgacagggagagactccgtttcaaaacaaacaaacaaaacaaaaaacaaaaaaactcccaacatataaagctgatagacttacaatgaaagaaaagaggataccacactaccctcttaatcctcagttgggtgaccccaacccctgtccctcaaagttcctgggggtcccttgacaaaatcctagcgatccccaggctaagctaatcccctcatttggcaagcaaggaagttgaggcccagagaggggcagcacatggtttcaaaatcttctgaccacgaaggatcccc

SEQ ID NO: 41604 - DNA, 188 bp, Homo sapiens
cctamagctgggggacgagggcgcggggttcgagtcccgggtatagtgctcagcctccgccccagccgggtgtgagctcagcgtttctctcgcgcgctcccctaggtctccagcgccgagcgcctagggaggcggggccctgcggaggactcgggcaccctctccgtctggaatactgggctggtctg

SEQ ID NO: 41605 - DNA, 1058 bp, Homo sapiens
gatctgagtactttcgatgtgtcagcagaaggctcttcctctcacagtgatgatgcacatactgctatgtgtagtatggggcacacagtgtgctgggacctctccaggtccmggagaacataaagctgtcgtggactgtcttggccatgaaacattctccatgtaggcgtagccaaagttgagggttctggcagaggtgatgtgttctttaaaaaataaaaattaatttaaaaaaaagaaagaaaaaacaagggctctctttccttccgtgtactcactcttttgctgacatccaagggacttgttaagtggcaaatcagtattaagcacaagcgtgtgcaagagacccagggactgtgacacagtttggggttggtaggcgcttagagttgggtgggcagcaggccttgcatttagcctcacgtcactgcgacccttggatggacactcacagagctcttgtgtcttgttctgggttcacaatcttctgtggacgggaggaaatggaggtattcaaagaatcaaggagaagatgaaaatgtcaagaaatgctttgtagtaataaattgcataaacgtaaattatttagcccaacctaaaggaagctaaactgagattaaatgacattaacaacaggctgttttccatttccactgagggaaaagcaagtaaggaagagaattctccgagtgcacagggagctgggatggcgcgtgcccgtctataggggcagctgggatgaaaccagactggaggtatgttgatcgttactgaatctggatgaagatacatgggggttcattacactatcctctctgcttttgtgaatgttgataatttccaaaaagttaaaacaatgaaagaaagatggcagctgctactcaactcccacctacagctgaaaggcagaatgacggtctgaagttgtccacaccgatttgtttggaatgatggattttgtcagttttaaaccactatgtgaagtcgctccaccttttcttatttgccacaatgtgtttcttccaacacaagggaggtattcttgctctccttttgca

SEQ ID NO: 41606 - DNA, 1058 bp, Homo sapiens
gatctgagtactttcgatgtgtcagcagaaggctcttcctctcacagtgatgatgcacatactgctatgtgtagtatggggcacacagtgtgctgggacctctccaggtcccggagaacataaagctgtcgtggactgtcttggccatgaaacattctccatgtaggcgtagccaaagttgagggttctggcagaggtgatgtgttctttaaaaaataaaaattaatttaaaaaaaagaaagaaaaaacaagggctctctttccttccgtgtactcactcttttgctgacatccaagggacttgttaagtggcaaatcagtattaagcacaagcgtgtgcaagagacccagggactgtgacacagtttggggttggtaggcgcttagagttgggtgggcagcaggccttgcatttagcctcacgtcactgcgacccttggatggacacwcacagagctcttgtgtcttgttctgggttcacaatcttctgtggacgggaggaaatggaggtattcaaagaatcaaggagaagatgaaaatgtcaagaaatgctttgtagtaataaattgcataaacgtaaattatttagcccaacctaaaggaagctaaactgagattaaatgacattaacaacaggctgttttccatttccactgagggaaaagcaagtaaggaagagaattctccgagtgcacagggagctgggatggcgcgtgcccgtctataggggcagctgggatgaaaccagactggaggtatgttgatcgttactgaatctggatgaagatacatgggggttcattacactatcctctctgcttttgtgaatgttgataatttccaaaaagttaaaacaatgaaagaaagatggcagctgctactcaactcccacctacagctgaaaggcagaatgacggtctgaagttgtccacaccgatttgtttggaatgatggattttgtcagttttaaaccactatgtgaagtcgctccaccttttcttatttgccacaatgtgtttcttccaacacaagggaggtattcttgctctccttttgca

SEQ ID NO: 41607 - DNA, 1058 bp, Homo sapiens
gatctgagtactttcgatgtgtcagcagaaggctcttcctctcacagtgatgatgcacatactgctatgtgtagtatggggcacacagtgtgctgggacctctccaggtcccggagaacataaagctgtcgtggactgtcttggccatgaaacattctccatgtaggcgtagccaaagttgagggttctggcagaggtgatgtgttctttaaaaaataaaaattaatttaaaaaaaagaaagaaaaaacaagggctctctttccttccgtgtactcactcttttgctgacatccaagggacttgttaagtggcaaatcagtattaagcacaagcgtgtgcaagagacccagggactgtgacacagtttggggttggtaggcgcttagagttgggtgggcagcaggccttgcatttagcctcacgtcactgcgacccttggatggacactcacagagctcttgtgtcttgttctgggttcacaatcttctgtggacgggaggaaatggaggtattcaaagaatcaaggagaagatgaaaatgtcaagaaatgctttgtrgtaataaattgcataaacgtaaattatttagcccaacctaaaggaagctaaactgagattaaatgacattaacaacaggctgttttccatttccactgagggaaaagcaagtaaggaagagaattctccgagtgcacagggagctgggatggcgcgtgcccgtctataggggcagctgggatgaaaccagactggaggtatgttgatcgttactgaatctggatgaagatacatgggggttcattacactatcctctctgcttttgtgaatgttgataatttccaaaaagttaaaacaatgaaagaaagatggcagctgctactcaactcccacctacagctgaaaggcagaatgacggtctgaagttgtccacaccgatttgtttggaatgatggattttgtcagttttaaaccactatgtgaagtcgctccaccttttcttatttgccacaatgtgtttcttccaacacaagggaggtattcttgctctccttttgca

SEQ ID NO: 41608 - DNA, 1058 bp, Homo sapiens
gatctgagtactttcgatgtgtcagcagaaggctcttcctctcacagtgatgatgcacatactgctatgtgtagtatggggcacacagtgtgctgggacctctccaggtcccggagaacataaagctgtcgtggactgtcttggccatgaaacattctccatgtaggcgtagccaaagttgagggttctggcagaggtgatgtgttctttaaaaaataaaaattaatttaaaaaaaagaaagaaaaaacaagggctctctttccttccgtgtactcactcttttgctgacatccaagggacttgttaagtggcaaatcagtattaagcacaagcgtgtgcaagagacccagggactgtgacacagtttggggttggtaggcgcttagagttgggtgggcagcaggccttgcatttagcctcacgtcactgcgacccttggatggacactcacagagctcttgtgtcttgttctgggttcacaatcttctgtggacgggaggaaatggaggtattcaaagaatcaaggagaagatgaaaatgtcaagaaatgctttgtagtaataaattgcataaacgtaaattatttagcccaacctaaaggaagctaaactgagattaaatgacattaacaacaggctgttttccatttccactgagggaaaagcaagtaaggaagagaattctccgagtgcacagggagctgggatggcgcgtgcccgtctataggggcagctgggatgaaaccagactggaggtatgttgatcgttactgaatctggatgaagatacatgggggttcattacactatcctctctgcttttgtgaatgttgataatttccaaaaagttaaaacaatgaaagaaagatggcagctgctactcaactcccacctacagctgaaaggcagaatgacggtctgaagttgtccacaccgatttgtttggaatgatggatttygtcagttttaaaccactatgtgaagtcgctccaccttttcttatttgccacaatgtgtttcttccaacacaagggaggtattcttgctctccttttgca

SEQ ID NO: 41609 - DNA, 1240 bp, Homo sapiens
tcgtctttcaccccctccatctgtttgtgtaatgcttggtatgtgactgttgctgtgtaataataggccctaagtcatgtgactttaatttgtaaggtcagacaccatttttcctgcagagaattcatttttgtcctaaagctaactcttttacctcacgatgctactgtttctgatgaccaaagataaaaactgaactttaaaaatctctcttcacctgtgtgtatatatataaaaaaaaaatactggacctttatcaccaaagtcaacaatccagtgaaaagatggtcacatcaggaatccataagctggattctgatcctgatattgtaattgacttgtcacaactccagtccagttgcttcagctctctgatcttcgatttatttatcagaaaattgtccttcctctctctcttttgcctcctcccctccttcttcccatctttccctccttctttcctctttctttccttcctctcttccttccttcctttttttccttctttttttgacagagtgcaggaaattctaccccccaagtatggcaccttggcatgctgagtattttaagctgaaggaaacagagaaaaccacagaagcagaaaggtctttctgacccctcttgaagaccctcatgtgacaggtgtcctgccctacatccagagagaaggaatgttccacagagagactaagaagaatctgaagaatcaggccttactaagtgccctccaggttatctttaagtcataccccctttttgtccaatcatgcctctgcattcatcatcaaacctaagcataaaaatacagtttctcctgggtctttgggtcttcakttttgaagacttgtgtcacataaaacatgaattacatacgtttgttatgcttctctgttgttaatctgtctttggttataaaggtatcagccatcaaccttgtgatggataaagcaagatattattttttctcctctatactttctttcttttttcctttcttcccttttctttctctcccttcctcccttcctcttccttcctcctcttttccaactttctcccttttcctttcttccctttaatttatatttactaaatgcctccattctcaaggagagagcaacaaacaaatacaaatttcgtcaattaaaataagttaatttttaaaaatgaaacattaaaataacaacacaaggctatgccgttaaatgaacaaataaaaaggaataaactttgtatg

SEQ ID NO: 41610 - DNA, 575 bp, Homo sapiens
tgtggatgtacagcatgatttagatttagatttaagtgaagcgaacttaagaaattagtgactcctgataacaaatctctacatatatgacatcatgaagaaaccatttctttgaaaattttaaaaagaatgtgacctaaacattaatctgcagggaactagcagatgaatgaaaatctattcacgcatccatccaacacaggaaaagctatggagtcacagcttgaaagaaggtgtgatggtcagaagtgtctgttctacatagtattccaaggacatttgctacacaaatgggggatatccaatttcaaggctaycaggtcaatagtggcaagattaattgctttatcctttaggacaagcttgtccaacccacagcccatggaccacatgcagcccaggatggctttgaatgcagcccaacacaaattcataaactttcttaaaacattatgtgtttcttttgtgattttttttctcatcagctattgttagtgtattttatgtatggcccaagacaattcttcttccagtgtggcccagggaagacaaaagattggacactcctgctctag

SEQ ID NO: 41611 - DNA, 575 bp, Homo sapiens
tgtggatgtacagcatgatttagatttagatttaagtgaagcgaacttaagaaattagtgactcctgataacaaatctctacatatatgacatcatgaagaaaccatttctttgaaaattttaaaaagaatgtgacctaaacattaatctgcagggaactagcagatgaatgaaaatctattcacgcatccatccaacacaggaaaagctatggagtcacagcttgaaagaaggtgtgatggtcagaagtgtctgttctacatagtattccaaggacatttgctacacaaatgggggatatccaatttcaaggctaccaggtcaatagtggcaagattaattgctttatcctttaggacaagcttgtccaacccacagcccatggaccacatgcagcccaggatggctttgaatgcagcccaacacmaattcataaactttcttaaaacattatgtgtttcttttgtgattttttttctcatcagctattgttagtgtattttatgtatggcccaagacaattcttcttccagtgtggcccagggaagacaaaagattggacactcctgctctag

SEQ ID NO: 41612 - DNA, 1331 bp, Homo sapiens
cattagggagatttgagtaagcatgatcattttttggcaatttaccagcactgattatccttaaagctccatttagatttttattttyacccatttgagacaagggccaaggccacacagatgtaaattatttaattgagtcattaaaccaaatccatgttgtggtccagttggcccacataaagaaaaacgtagagcttgggaatatgatatggcttcacttttttccaaatttatctgaaaatggctaactttgaacatcctttgaatattgtagggctcattagagaaggggaacagtgaagccaaactctaggaagaacaaaaagagaattatatagaaatcttagaatacttaaatgcctcaaaaattttgagggtctatctcaagtctggccagcttttattatagaagattgctttcatatggccagcctgtttgttctgtatggggatatgtcccaagaactatctaagttagatacttttctaggtcaagataagccagtacacagtgcaagtggattatggatgttgcagtatgatctactgcctgaatttccaagtcttagatgaaggtagtgatctggagtgaatgaatggatcattcattcaacacaaaagggtgtccagtaggaactgagtcattggcctgggaaactggaatggagaacggaatggcctgggaatggagaatcctcagctttgtctttagtagttagatctttgtgatggttaataccgagtggcaccttgattggattgagcgatacggaagtattaatcctgggtgtgtccgcatgggtgttgccaaaggggattaacatttgaatcagtgggctggggaaggcagatccacccttaatctggtagacacaatctaatcaacttccagtaaatataaagcaggcagaaaaatgtgaaaatgaaagatgggcctagcctcccagcctacatctttctccagtgctggatgcttcctgcccttgaacatcagactccaagttcctcagttttgggactcagactggctctccttgctcctcagcttgcagacagcctattgtggaaccttgtgatcatgtaagttaatacttaacaaattccccttcatatatatgcctcctgttagttctgtccctctaagagaaccctgactaatacagattttggtaccaggagtggttctagaggaacagaatactaaggatagagttctttcattggttttagggtttctggaattggctgcttaatatgattgacccaaaaatgctaaggactctacttctaatagtatgcagaacactgatagtccttggcatgaacta

SEQ ID NO: 41613 - DNA, 676 bp, Homo sapiens
gctctggccacattaataaagccttttatttgtctatgaggttagataagtgggcattcagcattaactgtgcatcagacaatgttctgaacataagaatataacctgcttcttctccaagaaaatccttctctctatactccaatgtcataaagtccatggccattatccctgtgccctttgctgattgtagatctttagttcattggtctgcatrcaaagccctttcatcctttgaagttgaagtcatcccactttaccacctctcctctacctcacattttcatcatttagagattttctagatgaagaagatcttcattttcatctactaagcaatttgaaacatgcttcacagtcttcctctgcttctggtttctgtcatcataggaatgatttagtcattcattttttcacagatgtttagatagctcatcttactatctgaccatatatataacatcaaagtcctcaatctcttccaggacaacagattgtatcaactttccaattcagtccttctcactatgcccctgacccagcaagtactgcagttcctccctctattcttttttttatcctttacttcacctccctataaaacaaaaacccaatgttccatattaaacttagatccattcagcttcatttattgccaacatcttcaaagttttca

SEQ ID NO: 41614 - DNA, 524 bp, Homo sapiens
cactccagcctggatgacagagagagactgtctttaaaaaaaaaaaaaaaraaaaaaaaaaaaaaaaaaaaagagataggaaaggaaggaagagggagagagagagagagagagagagagaaagagaaagaaagagaatagtatgcatgtgaggaacttagcattgtgtctggtgccaaacaaatgctgagctactggttacctttctcttctttttcttattacattcagtatccactgaacattccttacagtgattttccattactctttatatcagatgcagaaatgttgactgtgtttttggttagcatcatttataaggaaattcctccaggaagcacatcttcctctttgttgttcttcttttaatactgttgaatggaaagctcaccacaaccacagcctaggccccagagacctgtcgcttggactattcaactgcctcctaagtctaacagcttttggttttgtctcttgcaatagatactgctctttgcaccaagaaagctctattcaaaata

SEQ ID NO: 41615 - DNA, 524 bp, Homo sapiens
cactccagcctggatgacagagagagactgtctttaaaaaaaaaaaaaaaaaaaaaraaaaaaaaaaaaaaagagataggaaaggaaggaagagggagagagagagagagagagagagagaaagagaaagaaagagaatagtatgcatgtgaggaacttagcattgtgtctggtgccaaacaaatgctgagctactggttacctttctcttctttttcttattacattcagtatccactgaacattccttacagtgattttccattactctttatatcagatgcagaaatgttgactgtgtttttggttagcatcatttataaggaaattcctccaggaagcacatcttcctctttgttgttcttcttttaatactgttgaatggaaagctcaccacaaccacagcctaggccccagagacctgtcgcttggactattcaactgcctcctaagtctaacagcttttggttttgtctcttgcaatagatactgctctttgcaccaagaaagctctattcaaaata

SEQ ID NO: 41616 - DNA, 524 bp, Homo sapiens
cactccagcctggatgacagagagagactgtctttaaaaaaaaaaaaaaaaaaaaaaaaaaaraaaaaaaaagagataggaaaggaaggaagagggagagagagagagagagagagagagaaagagaaagaaagagaatagtatgcatgtgaggaacttagcattgtgtctggtgccaaacaaatgctgagctactggttacctttctcttctttttcttattacattcagtatccactgaacattccttacagtgattttccattactctttatatcagatgcagaaatgttgactgtgtttttggttagcatcatttataaggaaattcctccaggaagcacatcttcctctttgttgttcttcttttaatactgttgaatggaaagctcaccacaaccacagcctaggccccagagacctgtcgcttggactattcaactgcctcctaagtctaacagcttttggttttgtctcttgcaatagatactgctctttgcaccaagaaagctctattcaaaata

SEQ ID NO: 41617 - DNA, 524 bp, Homo sapiens
cactccagcctggatgacagagagagactgtctttaaaaaaaaaaaaaaaaaaaaaaaaaaaaaaaaraaaagagataggaaaggaaggaagagggagagagagagagagagagagagagaaagagaaagaaagagaatagtatgcatgtgaggaacttagcattgtgtctggtgccaaacaaatgctgagctactggttacctttctcttctttttcttattacattcagtatccactgaacattccttacagtgattttccattactctttatatcagatgcagaaatgttgactgtgtttttggttagcatcatttataaggaaattcctccaggaagcacatcttcctctttgttgttcttcttttaatactgttgaatggaaagctcaccacaaccacagcctaggccccagagacctgtcgcttggactattcaactgcctcctaagtctaacagcttttggttttgtctcttgcaatagatactgctctttgcaccaagaaagctctattcaaaata

SEQ ID NO: 41618 - DNA, 530 bp, Homo sapiens
ctcagtagagtgaagactttggatataagatgaaatgtaaaaatatggtagaatatattagaacaaagaatgttctttgaatttgacatccttttagttagtcactgaacatgtggtattcacttacttatgtgtaccggaccctgtgctgagctctrggggagatacagaaatgaggattttagggctctttctcttttgtaagctggaataaaagtaaagtacatgtaaaccaataattttaataaaatgtgtctggtgctttaccattcatgagctatataaatttgataagatatttaagcatttatttcttgatttataatgtttggataaaaatagcacctaccttatggcattttggggtggggttaaaagaaaagaaaaaaaacagtgttaaaatgtttagtacattacctggcacatgctacatgctaaatgcatttttaaagggctttgataccagcaaggggttgtggtagcatggagcaaaaaatgacttattttatctgggcctggaaaaatcccca

SEQ ID NO: 41619 - DNA, 521 bp, Homo sapiens
tatctttatctttgtattagttttctattgttttgtagcaaattactacaaacttaatacaacacaaatctatcaccttacagtaggtcagaattctaaaatagattggcaggcctgtgatacttctyggggctctatagcacaattggtttccttgctttttccagctttgaaagcctgcctgcattccttggttcactaccctttctagcaaaggcatcactcagacctttgcttctgtgttcacattttctctgactccagtgctcttgtgtctcacttataatgaccctaaaattacattaggtccaccctgataattcagaaaaactgtctcatctcaaggtcctgaattaattcaaagttatttttgctaaggaaggtaatatagtcacaggtttgaggacatttggggaagaacattagcctccaaccattttcataactgattgatacctacctaggtatggaactgtatttttttttggctattcacagtaccttgaaattctatatgaatt

SEQ ID NO: 41620 - DNA, 645 bp, Homo sapiens
acacttccttatatactctcaccctgctttttgttgtgtctggtgcttccatatctggacccactctaatacaattttttataagagcaaacctccagtcttctgatgacagggaagatgtagcttctgtctgaaaggggacctgggagtctaattactcttcagagaaattttcatgccgtcttcctcttttcgttcctatacttgatctcatttttggaggtattttatggtgccaattcccaggtctttccaagtttctttctcagtaactctgcagatacttaacttttatttttctctaatctactgtcagtttccatttattgacatgttttgcattttccattttcagccactatcacctcctttcctcttcttttcatatttgtacatttacatcatttttacaactcctttactatcatttatatcatttttgttccttttatggggacttaggaagcaaaagtaagtggatttgtttaatctaccatgtttaacttaagtcttctctcatttaatgtactattaagtgagtagtgcaatattgcaaatataccttcatttgtagaagactatgaggcttaatgacttgttatgcracaaagttgagataagcttaataactacattttcaatagc

SEQ ID NO: 41621 - DNA, 632 bp, Homo sapiens
tgcgtcagatgagaaaagcacacaaccagaaagacaggtcttcaccacagcccccagggccccattctgaccccaggacagagccaccgcttccaaaaaatcccacgaggaaacaaagatacacacacacacacacacacacacacacacacacacacacacacrcacacactccatcgcgtgtcagcacgagttagcactaacctggaagccattaggtaggaacagtagcagagtgcagtgcagagaggaactcattcattcatgcattgggcatgtggggggcggggtgcggtgagcgggggccctgaggaggctggagggcactcacctccatgaccatcccaaagccctgtttctaacgggggaggggactcgggccagtggtctctcagaagctgggggcgcttctttgctctgctgtttcacaccgctgtagcattttaagcatgactcccctttatttccctctcccccacctccctctgctgctgttatttggtgtggtcgtgccgccttacagaagtccctctctctctctgcctggctccctttctctctctccctctgactccctcacagacagctgttctgagctcaggcacgcacgcgcacaggcgcacagacacact

SEQ ID NO: 41622 - DNA, 632 bp, Homo sapiens
tgcgtcagatgagaaaagcacacaaccagaaagacaggtcttcaccacagcccccagggccccattctgaccccaggacagagccaccgcttccaaaaaatcccacgaggaaacaaagatacacacacacacacacacacacacacacacacacacacacacacacacacastccatcgcgtgtcagcacgagttagcactaacctggaagccattaggtaggaacagtagcagagtgcagtgcagagaggaactcattcattcatgcattgggcatgtggggggcggggtgcggtgagcgggggccctgaggaggctggagggcactcacctccatgaccatcccaaagccctgtttctaacgggggaggggactcgggccagtggtctctcagaagctgggggcgcttctttgctctgctgtttcacaccgctgtagcattttaagcatgactcccctttatttccctctcccccacctccctctgctgctgttatttggtgtggtcgtgccgccttacagaagtccctctctctctctgcctggctccctttctctctctccctctgactccctcacagacagctgttctgagctcaggcacgcacgcgcacaggcgcacagacacact

SEQ ID NO: 41623 - DNA, 632 bp, Homo sapiens
tgcgtcagatgagaaaagcacacaaccagaaagacaggtcttcaccacagcccccagggccccattctgaccccaggacagagccaccgcttccaaaaaatcccacgaggaaacaaagatacacacacacacacacacacacacacacacacacacacacacacacacacactccatcgcgtgtcagcacgagttagcactaacctggaagccattaggtaggaacagtagcagagtgcagtgcagagaggaactcattcattcatgcattgggcatgtggggggcggggtgcggkgagcgggggccctgaggaggctggagggcactcacctccatgaccatcccaaagccctgtttctaacgggggaggggactcgggccagtggtctctcagaagctgggggcgcttctttgctctgctgtttcacaccgctgtagcattttaagcatgactcccctttatttccctctcccccacctccctctgctgctgttatttggtgtggtcgtgccgccttacagaagtccctctctctctctgcctggctccctttctctctctccctctgactccctcacagacagctgttctgagctcaggcacgcacgcgcacaggcgcacagacacact

SEQ ID NO: 41624 - DNA, 619 bp, Homo sapiens
attttgaaagtcattcatgacttacaaagcattttgcctacattcaatcatttcattcccaccacaatcacctaaatactgacctgtttagtggatctggaaactgagtcctggaaaagtgaaggtcccatgcaagaaagaggcagagctgggaatccagatcacctgcctctagacccatggcgattaactaattgcctcacaccccaactatttgagaaccattgtcatctcttgaggsatgtagcacaaaaccgacaacactaacaatgatgatggttagctcaatgcctgggaaactttaatcccctaagaatcttcttcacccacagattctgatagagcaggtctaggggaccacccaaaagtcagcctttctaacaaaccccaggcgatgcccacgttgctattccgggaccaccctgaacagcaaatgtttggcttatgcattctcatgctttgaatcttccaaaaagacagttttgtctgtccactgcagctgcataggaaaacatgctgaaggtgaataataattacaatccattgatgtcacctgcatcctgctcgaactcatgctgagagctaatatttcttgggcatctgttggcaaaatgtctca

SEQ ID NO: 41625 - DNA, 676 bp, Homo sapiens
aaaatagcaccacagggtttacacgataacggctctcccagctttatcactctccactcccaaggcccatcccctccaggcaaccactttaatctccgttagctgtttcttttgatattttcctccatatttcaaaacaatatgacggtgctgctatrtctttatttattttcattttagacatatttatcgatttcctattataggagatgagggtttagcacattcacacttgaattttgccttccccatcctatcagcttggttccaggggcagtgttccagacgtttcctaactgcttgagtaacatgcagaagagttattgactgcctggccaaaccagtgcgtagcaaatgaatatcagtttttgtttgtttgtttatatcagtaaatagcgtaagatagatagtagatgaatgctcaaattctgaagccagactttctgtgttcaattctggtcggccatgtttagttgcaccagcttgggcaaattacttaatgtgtctgtgtcttttctggggataataatagtaacgacatcacaatattttgtgatcgttaaataagtaaatataggtaaagtacttagagcagtgctatgaaaagccatatatgtgtttgctattattataattatattattattcttatataagaccctcttgctgagccaag

SEQ ID NO: 41626 - DNA, 560 bp, Homo sapiens
aacatgcctgagtcatacagccactgagtggtacaggcaaactttgatatgcctctcaagcttgtgctcttacgtaagagatactgtttgcatcttacaagaggctttatcttacagcaaaagaaagcagtcagctaccgttgttaaagatcagaccctacttcctccaggactaattccaaatacaaaccaggcttaattgaaaacaagtcccggctggacggacaaaaattgacatgagactaattgaggaaaaaagaaagctgtgattgcttagatcactaatggtggctgatgttggcaaccaagtcagattgcctggatagccgcctgtgtgtcacagctctgctcctggggctcgcttttaaaacttctttctcaatcactttttggggtggccatgctggtagcctctcatctttcccagcaggcttctgctatacagaaacccatagtctacatacacttctaacttctggaggaatccctccgaggctggagtacacaattgttacatgtttcttcctttgaatggaaaacacartggccaaattgcttgg

SEQ ID NO: 41627 - DNA, 675 bp, Homo sapiens
atttgttaaattctcaaacattttattcattgtcttgtagattggtaggaaggtctgagcctctgagacctaatttgttttcttttctttttcaaagtagctaagattattagcagcttctaaactaagcatgcagtttggaagggagatgagcaaatgcaccttgacagaggtgccagctaatttagtttgaaagaaatgaaaaggattgagattttcatgtgaatttgaagcatgtggggccacgaggcatgagaatcaagtcagtctctctccctcagagccctggcagagagcttcagtggacatggttgctcaacctgtttcctaaagagcagttgtattttggaagactttaccaccgctccctgcagtaagcatgaagctgttgctggcctggagcctgaggggcttgtgaatcgggccctgtgtgttttgcaccatctcacagatgtgcctttgtgaagggygggcagctccactctggctatgaagggcccccctccaaaccatttgctttggatctgaaaccccatttagatggttcttggagttggggtgaggaagcaggaagctgaaagagaataaacccagcaaaagctcagaacaaactgcaggttttggacaacaacctagagtatactcatggggttggggttcagcctccctcccgca

SEQ ID NO: 41628 - DNA, 271 bp, Homo sapiens
tgtcatattccaatkcatgtctaaggaaccaaggctcaagaggtttcactggctcacagtcatacaactaataacaagtcaacctgcaagcccaggtctgtccaattctagaggttcagtttcaagggctgctggagaaggaaggagcaaacaaagctgagaagaatcttggcttgaaggtggaggaggtggggtttgaggacaggctcaggcttgagttgggacctgaaggatgggtgggggtggtgggatgccgtcagatggaggattg

SEQ ID NO: 41629 - DNA, 672 bp, Homo sapiens
tccagtaagtgcaatatcgcctgccacataaccatgccagatgctacacagacaaagggattgtgccccacgtttgggacaggcctatgccatggtggggaaaataaaaccaaagacaggatgacatgagagaggagaagggagagcaagcattctccagggatggccaaaaggaacttcaactcattctgtgatccaggcatttggaaatgtgatcacagaaacaagaagacatatgaataaggaaaacagacaaagaaggatgggaaactgcaaaagtggccacactcctgctctgccagcttcgtctggctttacggaaaactagagcccgtccctttgactactcagagcagcatccaacctccctacaggtgaagcagccataacaagaacaagtggtaccccatctcggcagaggcctttccaagaagttggaatttagaaatacgcaaaatttgaatcatctctgatatgcactagtgaagggggttgagtctttggtcaaatatactgctggattatctgtttgccattcttgaattttccatgtacacatgtgcccacatatgcttgaatgcaaaatgcttagcgttctaagtaagatgcatycctcctttgtgcatcgtacacagactatgaggtgcaggtcaatggatgtcactgtgaaaa

SEQ ID NO: 41630 - DNA, 588 bp, Homo sapiens
aaaggctttttgttactaatttattaaggaaaaaactaggttttaggacartcaagtagcttacctgaggccacaccactagcaaggaggatcggggacaccaagtctaaccaatgcatttgcagtactttggtgggcagcttctgtattgtaaactccatggagaaaactagagaagtaggtatatcactgttactcccacattatttatgaaatgtggctcagagagactaagtacaggaacttgtccagggtcactgttgggggccatacttggtcttgaactttagtctctgaacatcatggtcctcctaccatagcacactgcttacctcaatgggatgaagttacagttttctggcttttatggactggcatttgtcacaacccctgcttcactatttaattcattcaattcccattcatttatttgtatagcagttatgttttaagcacttccactaagtgctggaacacagaacagatctgtgcgctcccacggtggtgaggaagtttcccaaagtcacacagctgagacgcagcagagccagaatttgaacccaggcaggaatacatgtcgttagactg

SEQ ID NO: 41631 - DNA, 588 bp, Homo sapiens
aaaggctttttgttactaatttattaaggaaaaaactaggttttaggacaatcaagtagcttacctgaggccacaccactagcaaggaggatcggggacaccaagtctaaccaatgcatttgcagtactttggtgggcagcttctgtattgtaaactccatggagaaaactagagaagtaggtatatcactgttactcccacattatttatgaaatgtggctcagagagactaagtacaggaacttgtccagggtcactgttgggggccatacttggtcttgaactttagtctctgaacatcatggtcctcctaccatagcacactgcttacctcaatgggatgaagttacagttttctggcttttatggactggcatttgtcacaacccctgcttcactatttaattcattcaattcccattcatttatttgtatagcagttatgttttaagcacttccmctaagtgctggaacacagaacagatctgtgcgctcccacggtggtgaggaagtttcccaaagtcacacagctgagacgcagcagagccagaatttgaacccaggcaggaatacatgtcgttagactg

SEQ ID NO: 41632 - DNA, 1276 bp, Homo sapiens
tgcatcagatgggaggggggctaggtcagatgaccattaagttcctctccagtggttcacctattacttgatttcaactttctgttttaagaagagaaaggacacaaaattctagtcttacatctttttattttttattttttattttttatttttttgagacaggtttcactctgtcacccaagctggagtgcagtggtgcaatctcaactcactgcaacctctgcctcccaggttcaagccattctcctgcctcagcctcccragtagctgggatgacaggcacccaccatcacttagttcacatcacttttgtatttttagtagaaacggggttttagcatgttgaccaggctggtctcgaactcctgatctcaggtgatccgccctcctcggcctcccaaagtgctgggattacagatgtgagccaccatgcctggcctagtcttatgtcttattgcatgatagggctttaagtagcagccatgctatgccctcttcttaattcagcagacccagcctgccggattagtgatgtaccttggttcacatgtggccctcttttcccattatctataatctgagtccatctggcttctaaacatgtggctgcagaaccctcaaatcaggttccatgtggggctgggcagtgtcagaaacattgggtgtacaaatagggaggaactcagttttcttcaatgttcaaaaagtaaaagtgcatgccaaggcttggatgggaacgtgccttgctaggtttgtctgcaggtgattggagttaagatgccagcaccaaacagagctgccagtatgtttctggctgggtcctgtttgggcacaagatattctggggtgaggcaaggaagactctgcctgtacaatccccacaagcctgaaacaagagggacttagcagggggtcatctaggatcagggaaggcctggagaccatcatagagcaaacccatttggtgtcacattgaagacagaactaggactaggagggcaggtttctcctcagacctccccagcatcctcagaggctgatgaacagaggctgggctgccagctctccagatgctgtcacagtgatctcatctcaactaggaggctggcactcagtcttctggttctcctttcacttgtaagatactgtgtttctaattgagccatctttaaactgcttagctattttgtaattgcaaaggcctttgttgagtaatctatcacaattagagctaagattgctgtggagtcatagaatcttagagacttaagaa

SEQ ID NO: 41633 - DNA, 1218 bp, Homo sapiens
gcatatcctatgtattcctctcaaaactgcagtgaaatgagtgctgtcatccctgttgtacagagcaggaggctgaggcttggcgaggtgaggtgactcctgcagggtcaccacatgaaaactggccccagataccaggtcctctgacatgttttactcctccccaatctttctcccatctcatttatgcttttcccttcctcctcctcctcctgcttctcttcaccctctgcttcccctcttctttccactgtctcctctttttttcccctcctctctccttctgcctttccctctacctcctgaacacccagagtccatggggccacgccatcttccctccackcggtgagtcgacgaccgtcccttgctgtgatctgcctctgctttctaggctttgcaggaggaaatctctatctctggctgcaagatgaggctgagctacctgagcagccggacccctggctacaaatctgtcctgaggatcagcctcacccacccgaccatccccttcaacctcatgaaggtgcacctcatggtagcggtggagggccgcctcttcaggaagtggttcgctgcagccccagacctgtcctattatttcatttgggacaagacagacgtctacaaccagaaggtgtttgggctttcagaagcctttggtaagcctcccggctgcaggactcagagaatagctcttgcagggaggactctttctacctccctagttccttcttccttccttcctcttctcagatcaaaaatacctaaggcttaattgacctttaagacctgtccgtgactggccaggacctaaaagaatgtgaactgaaagacctgaatgtagaaaacccgaccattacaatgaggctacagaaccaaagggccctgaaaagtgctgtgctggcttgtgaggggctaaaagaggtcatgtgccacaaaggcagggccaggtggacatgcctggccaccccacagccatcctgtgggaacttacccattaaaataggagagctaaaaaatggtttctttcatttttttttttgaggtgcagtaactaagattcttcctccatcaaaaatgctttttggcctctttacccagtcagagaggtcatctctttgtttttgttattgctgtctctttgtaagatgaaacagaagttggctgtagcctcacctggagtcctagcctctcttggcccttgggcttccaggg

SEQ ID NO: 41634 - DNA, 1218 bp, Homo sapiens
gcatatcctatgtattcctctcaaaactgcagtgaaatgagtgctgtcatccctgttgtacagagcaggaggctgaggcttggcgaggtgaggtgactcctgcagggtcaccacatgaaaactggccccagataccaggtcctctgacatgttttactcctccccaatctttctcccatctcatttatgcttttcccttcctcctcctcctcctgcttctcttcaccctctgcttcccctcttctttccactgtctcctctttttttcccctcctctctccttctgcctttccctctacctcctgaacacccagagtccatggggccacgccatcttccctccactsggtgagtcgacgaccgtcccttgctgtgatctgcctctgctttctaggctttgcaggaggaaatctctatctctggctgcaagatgaggctgagctacctgagcagccggacccctggctacaaatctgtcctgaggatcagcctcacccacccgaccatccccttcaacctcatgaaggtgcacctcatggtagcggtggagggccgcctcttcaggaagtggttcgctgcagccccagacctgtcctattatttcatttgggacaagacagacgtctacaaccagaaggtgtttgggctttcagaagcctttggtaagcctcccggctgcaggactcagagaatagctcttgcagggaggactctttctacctccctagttccttcttccttccttcctcttctcagatcaaaaatacctaaggcttaattgacctttaagacctgtccgtgactggccaggacctaaaagaatgtgaactgaaagacctgaatgtagaaaacccgaccattacaatgaggctacagaaccaaagggccctgaaaagtgctgtgctggcttgtgaggggctaaaagaggtcatgtgccacaaaggcagggccaggtggacatgcctggccaccccacagccatcctgtgggaacttacccattaaaataggagagctaaaaaatggtttctttcatttttttttttgaggtgcagtaactaagattcttcctccatcaaaaatgctttttggcctctttacccagtcagagaggtcatctctttgtttttgttattgctgtctctttgtaagatgaaacagaagttggctgtagcctcacctggagtcctagcctctcttggcccttgggcttccaggg

SEQ ID NO: 41635 - DNA, 657 bp, Homo sapiens
gggcgtggtggctcatgcccagcactttgggaggcggagggggtgcgaatcacgaggtcaggagattgagaccatcctggccaacacggtgaaaccctgtctctactaacaatacaaaaaattagccaggcgtggtggtgggtgtgtgtagtcccagctacttgggaggctgaggcaggagaatggcgtgaacccgggaggcggagcttgcagtgagccaagatggcgtcactgcactccagcctgagcgacggagcragagtctgtctcaaaaaacaaacaaacaaaattcttgtgtagtgttccatattttgaatcaacacatttccattgtacaaatgaggcaactggggcctggggggttgagaaagttgccctaggtcatgcagctagttggtagtaaagctgagactaactccagaattcatgctgttttccttgaggagttgatgaaatcctcctcagaaaaaaagacacatattcagaacatttttgcatccaattttataaggttcaagaatagtcaagcccatctctgaaccatctcctccctagaggcagaccatctgtgctaaacctgaacaatactaatgggtttgctttccacttgggccaattagtttctctgttatatagtcatggtgcatcccaaccatt

SEQ ID NO: 41636 - DNA, 1287 bp, Homo sapiens
gtgcaccactgagctggcaggaaagtacagaatacattgagcctaaaaacagtgaaactggagaccctgggaccctgggcgcaaagctggcttttgccccaagggtttcctacgcctggagaccttgagttttattgttgataacttcatggaactggaggtgggggggtgggcaggagatccaataggagacacctctgaatgctgtagctacagatggctcacactaaaaccgtgactgagacataagtccactgcacagagagggaaggctgaacacatgcctccctcaatctggtgcttggtggagggggagagatgttgcctagaaattgacagcctttgtgctggaaacctccctacctgtgtagtataagactcaggagaataagttaattccatgtggacccaagatgagttcaggaagtgtccagtctccaggcaatagaccttccagaagttactgtagcacccgcaggcgctgggcacaggcaaacagacgtctctctggagaaattcaccttcaatccaggctgctccgaatttctagacgtgacatttaaggaaaatgagaagctcagagtccagtcataaaacatacaaggaaataaggcacaatgagtcagaaccagcaaaaaaaatacagtagacgcagatgtgaaagctcaacacagaatagaagataagtgttcctaatacactgaagtaaattgatgagaagctcaaaaggtaagaagcagccaatcagaattagaaaaagagccaaataataatgtgaatgaataacaagtaagttaaacatagttgaatagagaggtatggaactgaaagatagacctctccctgcaattatccagaatttaagccttaaagaaaatctgatgaaaacctaagagacattaagaaacatgagaaaagggtgaaagtggataacaagggtggaattcttgtctcagaaggagataatggaggttatagagaagaggcggtatttgaaagaaaatggaaacatccataagatgtttaaaagatgctgttctcagatacactaactgcaacagatctcaacaggataaacaaatagaaattcacatctagaaacattcttgtgaaaccgcagaacactaaagacacagagaaattctcaaaagtagccaaaagggaaaaagacaaattgcccrcagagattcagcagctagagcaactcctgcttcgtagtggtgaagcctggagccaggagacggtggctggaaaaaatccgaggagagagtcaccggcagccaggag

SEQ ID NO: 41637 - DNA, 645 bp, Homo sapiens
acttccggaggatgagctccatgatccagagcatgagctgggaacgcagttgcactggggggtcttgcccccaccactttgtcaccatgtggattcgagaagtcacctctcggagcaggtggttcctcttccgggagaagaggcatctctgtccctacctggcatgcagccaggctcagacccactcgcccagtttcagttatgacgcgactgtgttgtccgggggagggggatgagcagttggtttttaatggggccagagcttccgtttgggaggatgagaacgttctggagatagatggtggtgaatgttcttgatgccactgaactgtgcagttaacacagctttacactgtgtatactttaccacaatagaaacacctgtgtttctaaattcccttgaaacacaggaagatctggcgatgtgggatccacttgctggcatgtcagagatgggcctcttggagggcctgtgtcccrgtccccacctgccctcctactgccttcctatcacggaggctgagtgtccattgccactcaccctaatggactcccgtttaccctaaaggcaaattgctccttctctgtgtccatacctctctgaatgtgagaagagccagagatgggagacgggcagtaagactg

SEQ ID NO: 41638 - DNA, 1074 bp, Homo sapiens
aggctgatgcccatgtgccactgcactgctggctcagatgcccccgtgacccctgcagctcccggggctcctgggaatgctactggcggtgccccacactgggtggtagctgcctttgtatttacccagccatgccttgactccctgagcactgggctgcttccagctcttcattccagcacctgtaggaagcatctgtggatgcttgtgggcgggatcggccaccatgttacctgctctttgcaggaaagcctggccttttacatcccaggcctaggacttgtcccagtttgaccaggactgagaagtttttggggacatggcttcttcaatgttgaaastggaaaaaaccaaaccaggatgaggtggttatttcacccagactttggtactcaaatgtaagggcttggtttggctaggactgattgtgtgtcacagcagcacgccacatatcctgtatgccttctgtaaaccctccatttattttggaaggaacagtcatcccgtgtctcccactgccagctcctgggggctgccagcgttttactgagtggctctcagctgcctccaatcttgctaagggcagattaaactagtaaaatgggacttgagagcaattcttcctccctgaaaggctagagtgaggacacgagaacacgcttttcagactgcagagtcaacaatcacaacagatttctgtaactgaaggtggtggttttcttgtcttatcttcgactggagggcatcagacttacctgggggtcttcttagactaagattgctgggcccccacccagcgtttctcattcaggggatctgggatgaggactgcggactgcatttctaacaaatgaagctaattttgatggtctggggtccgcactttgagaactgttgtcacagtgttaagggatacagtctagatgaggggttgtcagactttttctacaagggggtcacataagaaatattttaggttttgtgggtgatatggtttggatctgtgtccccacccaaatctcatgtggaattgtaatccccaatgctggaggtggggcctgctgggaggtgatt

SEQ ID NO: 41639 - DNA, 1074 bp, Homo sapiens
aggctgatgcccatgtgccactgcactgctggctcagatgcccccgtgacccctgcagctcccggggctcctgggaatgctactggcggtgccccacactgggtggtagctgcctttgtatttacccagccatgccttgactccctgagcactgggctgcttccagctcttcattccagcacctgtaggaagcatctgtggatgcttgtgggcgggatcggccaccatgttacctgctctttgcaggaaagcctggccttttacatcccaggcctaggacttgtcccagtttgaccaggactgagaagtttttggggacatggcttcttcaatgttgaaactggaaaaaaccaaaccaggatgaggtggttatttcacccagactttggtactcaaatgtaagggcttggtttggctaggactgattgtgtgtcacagcagcacgccacatatcctgtatgccttctgtaaaccctccatttattttggaaggaacagtcatcccgtgtctcccactgccagctcctgggggctgccagcgttttactgagtggctctcagctgcctccaatcttgctaagggcagattaaactagtaaaatgggacttgagagcaattcttcctccctgaaaggctagagtgaggacacgagaacacgcttttcagactgsagagtcaacaatcacaacagatttctgtaactgaaggtggtggttttcttgtcttatcttcgactggagggcatcagacttacctgggggtcttcttagactaagattgctgggcccccacccagcgtttctcattcaggggatctgggatgaggactgcggactgcatttctaacaaatgaagctaattttgatggtctggggtccgcactttgagaactgttgtcacagtgttaagggatacagtctagatgaggggttgtcagactttttctacaagggggtcacataagaaatattttaggttttgtgggtgatatggtttggatctgtgtccccacccaaatctcatgtggaattgtaatccccaatgctggaggtggggcctgctgggaggtgatt

SEQ ID NO: 41640 - DNA, 958 bp, Homo sapiens
accatgacacgaccataaattatatcacctgaaatagagatgtggaaatgttatttctgttatrtgataaggtatatcaacgtgacactgtaaacaggttatgacaatgaggacacagagattatttccttgccaccctcatctactatcaaatgttgaaggcctgtttgcatgagcttcaagatctggtacattctcaggcctcaggtaagaccactttgcagactgaccagaagtgactaaagatttattgagtctcagatgctcagccactagtgtgaataatttcaaagatctggcctataatttggcattaataatatcccattgtggtccaagtccagtttacaaaaataagttgataagatatatactgatacaatatagaataacactaagaaagaaagtatcaatacaaagcctaattaacgttatttgtttctgaaagagggtttaatgaaaccccctggtgttcaattctttatttcataactattattgaacccctaccatgagtgccaggtatttctgctaggtatgtgtgctgggtgctgaatatacaccattgagtaaggcaggcacaatctttgcctgagaggcatttacagtctcatgtagctgcagcatttaagtttacacagattgaaaaaaaacattcgagaaaatcatctagacttgttccaaaagtcacttaggtaagacagctagagattagcttcctcagaaaaaaaagatacccagttacatatacccaatcgcaacgacttcccacaccagccagagtgggtaaagacccagttacattctcaaaaccataaaaaaagctataatttgccccctcaaacacaatccccaaaaagcaaagcacaaaagatatacatgacaaacagagcatccctctcatttgtaaagtgataccttctgcaaaagcaacatcactctcttgcccgaatcccat

SEQ ID NO: 41641 - DNA, 770 bp, Homo sapiens
acttcccagcttccagaaccgggagaaataaatttctgttgtttgtaagccatctagcctatgatattttgttatagccacctgaatggattaaaacttagggttacaggtaaaacaacaacaacagcaaaaacttatatatgaagctgcagggattttccgcactgctctgcccactggtgttaagagggcaaataaaggaattcagaagctccttaagtatttatccaagacaaagggagagtctgtggacagggaagaatccaaagtgcctgtgaacagcaaggtgttcagttccaacaaaggattcttggcaccagcaccttcctcctgtccctcatatgtgaaaagagacttttcccactccttctccaaatgtaaaaagagagctgtttaataatcaagaccattttaaggccarggacaatcaattaataacaactcttccctgaaatttcaaccccccaaacacacattttaatcaaaagaacagctttccacatccctcctctaatagatcctggcctccatccacccacattaatcactccaagatggcctgagaacttatttattgtcactgcctaatcactttattaaatgtcattgcttctgattatgaagatgtgttttgtttctcatccccacccatctgtctgaggggtctgatttgaaggacacctattttcttgtcaagtgcagttagggactcctacggtgcattgtctttgcatccacactaagatcccagatactttgaaatggaatgc

SEQ ID NO: 41642 - DNA, 770 bp, Homo sapiens
acttcccagcttccagaaccgggagaaataaatttctgttgtttgtaagccatctagcctatgatattttgttatagccacctgaatggattaaaacttagggttacaggtaaaacaacaacaacagcaaaaacttatatatgaagctgcagggattttccgcactgctctgcccactggtgttaagagggcaaataaaggaattcagaagctccttaagtatttatccaagacaaagggagagtctgtggacagggaagaatccaaagtgcctgtgaacagcaaggtgttcagttccaacaaaggattcttggcaccagcaccttcctcctgtccctcatatgtgaaaagagacttttcccactccttctccaaatgtaaaaagagagctgtttaataatcaagaccattttaaggccagggacaatcaattaataacaactcttccctgaaatttcaaccccccaaacacacattttaatcaaaagaacagctttccacatccctcctctaatagatcctggcctccatccacccacattaatcactccaagatggcctgagaacttatttattgtcactgcctaatcactttattaaatgtcattgcttctgattrtgaagatgtgttttgtttctcatccccacccatctgtctgaggggtctgatttgaaggacacctattttcttgtcaagtgcagttagggactcctacggtgcattgtctttgcatccacactaagatcccagatactttgaaatggaatgc

SEQ ID NO: 41643 - DNA, 579 bp, Homo sapiens
cgttttaattactaataaattagaaataggagattgtggcttaggtgtatgagtggcaacaattggcttcataatattagacttaatgattaaacatatctacatgcctagtcacaggatgtgctggaaaaatgatgcagccacacccatccctactcgacaacttttaacatagaggagcagacgaagagacagggctcctggtgacagctaatttccatagaaaaagggaagaggaagaggtgatgccattgatgcctasatactactcccaattatacattcagaatttactctccttccctgaaaagaccagtaaatgaggcagaagataaaaacctgaatgtcacattaaattttgtccttaaatatgtgcatcaggttcctagggctgctgcaacagattatcacaaaaatgatgatttaaaacaagagagatttattttctcacagttctggaggccagaagtctgaagttgatgagttggtagggctacattccctctggtattgtttgaagatgtcctccaaagttcatgtcttacaaacatgatccccaatgtaacaggattaaaaagt

SEQ ID NO: 41644 - DNA, 460 bp, Homo sapiens
acatttcactctgccatgtgatcagcaagagaaataggtggcatgataggggccttgaggctataaatgacaaaattaccacatttaaaaaaatggtctatctttattccaacccatttgtccactgttcaaaatcacagttaacaggtagraacaggatcctgacctaggaggacacctaggtaatagtcaattggattttttaaagtttgggtaggacctagtctttgaactgtgtactagaaatcagttacttatcaaagtggttgtaaagtcagtttcaagttaaagcttgaatctgggattattatttcattaccttttaaaagagaagacactaagaagcatgtatgtttaaaaaatagttttagcctgggcaacatagtgagaccccatctctacattaaaaaaattagctgggtatagtgatgcatgactgtggtcccagatactagggagg

SEQ ID NO: 41645 - DNA, 1098 bp, Homo sapiens
cttgagcccgggaggttgaggctgtagaaagccaagatcatatcactgcactctattctgggtgacagagcaagaccctgtctcaaaaaaaaaaaggaagtgacaaagatacaaccacttagctaggtgtgcctgtggtcccagctactcaggaggctgaagtgagagggtctcttcagcctgggaattcaaggctgcactgaggcmtgatcgtgccgctgcactccagcctgggcaacagaaccagactctgtctcaaaaaaagaaaaaaaaagatggaatgactaactcttcttggacactaaagttgagcagaaggaacccctgggcaggaggggaagtgtcaccaagggtccttcttcccaggccgcaatagcctggcttggaaagtcaggccctttgctttgtagcaggaggaaggtgattcttgggacccaaaacatgccagagaacctggcgccgagtgtcccaaggaggcttcgcttttggaacaggcttggtcctgtccaggtaggcacttcctcatgagtaaccccttccagctctcacagtggagccacatgcctgctgcccgctgacgacttcttcccttgcccgacctgtctgagcgggtgggtgtgagcaggtcatatttaccaggccctgccccaggagatggggagatagcactgacttcctctcttctcttacccaatcttcctcccacgccacgcccaaacacggcactcccccaaataggtctgtcacgagccaccttggaattgtgaggagactgctgggaggaaggggcggccaccttccccagccagcagagaagggtctgactgcaacacagatggcttcatcgtcacattgaaaataaccaaatatgaaaatgtgttttatttctcagtacaaagccagatactgtaaggctatgaaaaactgactagccagaggccagaaaggacaaaaagaagactatctctggcctggtgccctgtgatctggcgtggtgtcacaggaggtctggggacagcagcaaagacctggaccggtggaggtggatgagggaagcgatctgccagcccttccagcctcccgcggctggggcctgag

SEQ ID NO: 41646 - DNA, 1098 bp, Homo sapiens
cttgagcccgggaggttgaggctgtagaaagccaagatcatatcactgcactctattctgggtgacagagcaagaccctgtctcaaaaaaaaaaaggaagtgacaaagatacaaccacttagctaggtgtgcctgtggtcccagctactcaggaggctgaagtgagagggtctcttcagcctgggaattcaaggctgcactgaggcatgatcgtgccgctgcactccagcctgggcaacagaaccagactctgtctcaaaaaaagaaaaaaaaagatggaatgactaactcttcttggacactaaagttgagcagaaggaacccctgggcaggaggggaagtgtcaccaagggtccttcttcccaggccgcaatagcctggcttggaaagtcaggccytttgctttgtagcaggaggaaggtgattcttgggacccaaaacatgccagagaacctggcgccgagtgtcccaaggaggcttcgcttttggaacaggcttggtcctgtccaggtaggcacttcctcatgagtaaccccttccagctctcacagtggagccacatgcctgctgcccgctgacgacttcttcccttgcccgacctgtctgagcgggtgggtgtgagcaggtcatatttaccaggccctgccccaggagatggggagatagcactgacttcctctcttctcttacccaatcttcctcccacgccacgcccaaacacggcactcccccaaataggtctgtcacgagccaccttggaattgtgaggagactgctgggaggaaggggcggccaccttccccagccagcagagaagggtctgactgcaacacagatggcttcatcgtcacattgaaaataaccaaatatgaaaatgtgttttatttctcagtacaaagccagatactgtaaggctatgaaaaactgactagccagaggccagaaaggacaaaaagaagactatctctggcctggtgccctgtgatctggcgtggtgtcacaggaggtctggggacagcagcaaagacctggaccggtggaggtggatgagggaagcgatctgccagcccttccagcctcccgcggctggggcctgag

SEQ ID NO: 41647 - DNA, 805 bp, Homo sapiens
ttttcccaaagagactttgcagggcaatttcgaggcatggcaagaaaatatatcttggagttaaatattttcttccttgtctcataatgttataccagagtcagattgaaaagcaagtcacaatatacagggtcaaataaaacccatctgatgagaatccatggtttgtagggcatgactccccagaccctttaggcaaaatcaaaaatcagagcttagtcctcagtccccaccacccccttggccataaagcattccacagaatggatatgcagcccaacaaaacagcagcagctccccaggtgctaggaggcttattcctagagtacyttcgttagtggtaatagttttaaatatttgtgatttgtgtcatggggaggggacgcgatctgacctgatgtaatagccaatagttcaaggggtgagatggagtcaggcctagggtttagtcttaaaaaaaaaaaaaaaaaaaaaaaaaaaatcccagatcttatctattttgtgagctatcatgctccaggtctttaattataccttctttcttttgctgtatctgtcataacatttattagagatacataatgctaatatagtgacaaataccatacatctagcaaagatcaggcatccaagaaggctataggtagagtcagagggcagtaaacaacctaaccagccaaaaaacccactgcatgcatcatcacactctttgattagactcacgacgtgtttaccctatttattaagggtcatttgaaccttatgataaatcttatttgaggattataggaccaacactaaatcg

SEQ ID NO: 41648 - DNA, 1347 bp, Homo sapiens
ttcattccaagatattgttatgcccatcctacagatgcaaaactttttctcaaagagattagatgtttttctccaaatttcatgactattaagcagcagattcaggataggaattcagtttggtctgacttcaaagcctatgtttgctttcccttacataatattgtctacatctgattataattgctgggttaaaagaaaaattaccagattttacttagattttctttgcgtccctaaacaattgaaagtacacataatcccagtgtttagacttgaaccacctctctgtactctgatgtgagagagaatctgaaggtgaaaatggcagtatgatcagtgggaaaaaaaagtgaaggccaaattgatagaactttggttttatatccaaggtaggcatggatccaacagccatggagcagtggagaggatcttacccaacccagcctgcctgagggaggccgacccacatccacaaaaccctgagccctgctcactctgttttttgttttttttgttttttttaaagatgttgaaggcaagtttccaaccagtcctgctttccctggacacaggatagtggctgtaaatgtcatctgggtccacccatttattgtgctattgactgggtacctgaaaagacaacagtagaatgcagttgagaagcactcttacgatgaaatgtaatgatctaatttattcattttgtaaatgtttatttagtgtctttttttgatgtcataagacagaatacaggtatgggggtcatctagatctggatgtaaatctcagtcagccacttactatttaacctgaggctattatttaatatctctgtactttatctatgaaatgagaataacatcaagctcacatggttgttgtaagaattagaaataatatatgggatgtgtctaacacagagcctagtaccttgaaggtacaaaacaaratgcaacttattattgttttgttattcctatatttaaaatagttattgtgttatattgaggtaatagagattataatagacctgggggacaaataaatggaagaataggaaactttccctgcctttgagacatgcacatctagtcctggagccagatgcataaacacatgatgatgggatgagaaaggttttgtgaatgaggtaagggcaagctgctctgggagcacctcttatggtttactattagttagcttaaatataattatatataggagctacaaattaatatagagtctaaagatattgggtgcctgtggcatccaccagtggctcacaaaggttaggccctaagccaggaatctctgggccaaaggtggaaattaggtttcctttca

SEQ ID NO: 41649 - DNA, 1347 bp, Homo sapiens
ttcattccaagatattgttatgcccatcctacagatgcaaaactttttctcaaagagattagatgtttttctccaaatttcatgactattaagcagcagattcaggataggaattcagtttggtctgacttcaaagcctatgtttgctttcccttacataatattgtctacatctgattataattgctgggttaaaagaaaaattaccagattttacttagattttctttgcgtccctaaacaattgaaagtacacataatcccagtgtttagacttgaaccacctctctgtactctgatgtgagagagaatctgaaggtgaaaatggcagtatgatcagtgggaaaaaaaagtgaaggccaaattgatagaactttggttttatatccaaggtaggcatggatccaacagccatggagcagtggagaggatcttacccaacccagcctgcctgagggaggccgacccacatccacaaaaccctgagccctgctcactctgttttttgttttttttgttttttttaaagatgttgaaggcaagtttccaaccagtcctgctttccctggacacaggatagtggctgtaaatgtcatctgggtccacccatttattgtgctattgactgggtacctgaaaagacaacagtagaatgcagttgagaagcactcttacgatgaaatgtaatgatctaatttattcattttgtaaatgtttatttagtgtctttttttgatgtcataagacagaatacaggtatgggggtcatctagatctggatgtaaatctcagtcagccacttactatttaacctgaggctattatttaatatctctgtactttatctatgaaatgagaataacatcaagctcacatggttgttgtaagaattagaaataatatatgggatgtgtctaacacagagcctagtaccttgaaggtacaaaacaagatgcaacttattattgttttgttattcctatatttaaaatagttattgtgttatattgaggtaatagagattataatagacctgggggacaaataaatggaagaataggaaactttccctgcctttgagacatgcacatctagtcctggagccagatgcrtaaacacatgatgatgggatgagaaaggttttgtgaatgaggtaagggcaagctgctctgggagcacctcttatggtttactattagttagcttaaatataattatatataggagctacaaattaatatagagtctaaagatattgggtgcctgtggcatccaccagtggctcacaaaggttaggccctaagccaggaatctctgggccaaaggtggaaattaggtttcctttca

SEQ ID NO: 41650 - DNA, 575 bp, Homo sapiens
tatcaagccattcactcactgcaatgtgtctcttgagattcacagcagcccttcctgcaaatgaagggaacagaggctcaggcagctgaagtaacgtgcctaaggtcacatggcagttgtggcagaggcaggactggaacctagatctgtgctggtgcagtagtaacgtcatccttcctttacagagaggcggcatgggtttccggaagttctcccccttcctggctctcagtatcttggtcctgtaccaggcgggcagcctccaggcggcgccattcaggtgagacagcctggagccagaggcgccttctgctcccactgcccctaggaccagacagctctgtgcctytgaagtcacgcgtggctcctggtgaatcagtgcccacaggtggaccctggcctcatgcccgtcccctgggagtcgcggtggccacatccccaggggaagaagcagagaccaggaagcctggctgcctatcctggggagggtcagtcaggggctcacagcctgcaaggagtttgcttcccttccacaggtctgccctggagagcagcccagacccggccacactcag

SEQ ID NO: 41651 - DNA, 661 bp, Homo sapiens
tggtagcaaactggttctttcggagccatcctgttgatcatgcagctccaccaaaccttagggggacgtgaaatcactgcctgttgtggtctccgaggacacatggtaatggtgatgctgtgccttgttatctaagaacatgattgtataatttgtttaagaaaatgtcaatattgtgccatttgtgaacttcatcaagattaaaagcatattttgggtacatttgtttcaaaaccttggtgatgcattacaacttgttttcttatgtaataataatgatgatgatgatgataataataaatatttttgagtgcttactatgtatgggccagatattattttraaacagtgctttacacctgtgaattcatttaatcttcatgacaaaaccatgaagtagatgctattattcatgtcccttcacctctgaggaaacagaggcagggagaagtccaaggtcacacacagatagatagaggtagacccaggtattgggttccagggcttacagtggaaatcactgcactataggcctttctacagtggctcctgatgtttttcagagacttgtgagccattctttggcctagctgcctgataaggtagaccctcagattttggagatgcataacaaattttaaacataaaaacaacctagtct

SEQ ID NO: 41652 - DNA, 533 bp, Homo sapiens
tctagaggctgctctcattctttggctcaggggagtatatccttctgacctttgcttccttaatcacgtttgagtctctgactctgaccctcttccctccctcttacaagaacttctgtgatgacactggattcacctggataatcaaggataacattcctatgtcaagatcttaactcaatcgcatctagaaaacccgtgtcgctatataaagtaacttattcacaggttttgaggattaggatgtggacatccytgggggccctaccacaagaaataaaaataactcagccaggcaccatagctcatgcctttaatcccagcttctccacaggctgaggcaggaggatcacttgaagccaggagtttgagatcagcctgagcaatataacaagactccgtctctaaataaataagtaaataaataaaaggtatcttttaagtcctgtatgagcattcaatgagttaatatcaagcaccctttgttaaataaaataaatatggctcgctctgggcaggagaacctgaaagga

SEQ ID NO: 41653 - DNA, 533 bp, Homo sapiens
tctagaggctgctctcattctttggctcaggggagtatatccttctgacctttgcttccttaatcacgtttgagtctctgactctgaccctcttccctccctcttacaagaacttctgtgatgacactggattcacctggataatcaaggataacattcctatgtcaagatcttaactcaatcgcatctagaaaacccgtgtcgctatataaagtaacttattcacaggttttgaggattaggatgtggacatccctgggggccctaccacaagaaataaaaataactcagccaggcaccatagctcatgcctttaatcccagcttctccasaggctgaggcaggaggatcacttgaagccaggagtttgagatcagcctgagcaatataacaagactccgtctctaaataaataagtaaataaataaaaggtatcttttaagtcctgtatgagcattcaatgagttaatatcaagcaccctttgttaaataaaataaatatggctcgctctgggcaggagaacctgaaagga

SEQ ID NO: 41654 - DNA, 533 bp, Homo sapiens
tctagaggctgctctcattctttggctcaggggagtatatccttctgacctttgcttccttaatcacgtttgagtctctgactctgaccctcttccctccctcttacaagaacttctgtgatgacactggattcacctggataatcaaggataacattcctatgtcaagatcttaactcaatcgcatctagaaaacccgtgtcgctatataaagtaacttattcacaggttttgaggattaggatgtggacatccctgggggccctaccacaagaaataaaaataactcagccaggcaccatagctcatgcctttaatcccagcttctccacaggctgaggcaggaggatcacttgaagccaggagtttgagatcagcctgagcaatataacaagactcygtctctaaataaataagtaaataaataaaaggtatcttttaagtcctgtatgagcattcaatgagttaatatcaagcaccctttgttaaataaaataaatatggctcgctctgggcaggagaacctgaaagga

SEQ ID NO: 41655 - DNA, 533 bp, Homo sapiens
tctagaggctgctctcattctttggctcaggggagtatatccttctgacctttgcttccttaatcacgtttgagtctctgactctgaccctcttccctccctcttacaagaacttctgtgatgacactggattcacctggataatcaaggataacattcctatgtcaagatcttaactcaatcgcatctagaaaacccgtgtcgctatataaagtaacttattcacaggttttgaggattaggatgtggacatccctgggggccctaccacaagaaataaaaataactcagccaggcaccatagctcatgcctttaatcccagcttctccacaggctgaggcaggaggatcacttgaagccaggagtttgagatcagcctgagcaatataacaagactccgtctctaaataaataagtaaataaataaaaggtatcttttaagwcctgtatgagcattcaatgagttaatatcaagcaccctttgttaaataaaataaatatggctcgctctgggcaggagaacctgaaagga

SEQ ID NO: 41656 - DNA, 533 bp, Homo sapiens
tctagaggctgctctcattctttggctcaggggagtatatccttctgacctttgcttccttaatcacgtttgagtctctgactctgaccctcttccctccctcttacaagaacttctgtgatgacactggattcacctggataatcaaggataacattcctatgtcaagatcttaactcaatcgcatctagaaaacccgtgtcgctatataaagtaacttattcacaggttttgaggattaggatgtggacatccctgggggccctaccacaagaaataaaaataactcagccaggcaccatagctcatgcctttaatcccagcttctccacaggctgaggcaggaggatcacttgaagccaggagtttgagatcagcctgagcaatataacaagactccgtctctaaataaataagtaaataaataaaaggtatcttttaagtcctgtatgagcattcaatgagttaatatcaagcaccctttgttaaataaaataaatatggctcgctctgggcaggagaamctgaaagga

SEQ ID NO: 41657 - DNA, 618 bp, Homo sapiens
tgctcaacctcgctgggggkacaggtggctggattcgggtccctcactggcgtgacaggagggagtgcgaggcaggaatttaggagccaaggaggtgagagcagctctggcccctcactgtaggtgacgccaaactctcctcgacttgccccgactcttagttgaaaaatctctgtcctctcccagtgctctccagcttcccaagcaatgacctcaatgaaaaaaatgacagcggggcggactgcccccgctccagagtaccagtgccggcagtgcgagctatgacgcaatcggagctcggtcggtcctttgattggctagtcctggccactttggattggccgcgcgggctggtggggaccccccccctccagctatctctgtaataagagcggggtctccgcggggaaggcgcccacagcaggtgtggtgttcatcccgggtcgaccggccgctcgcgctgccctgaaactctagtcgccaggtgaggaacttcccattccccattccgctcactcgaataacctgcttcttcgactagttcatccagtttgctccatctgcctgtctgcctctccgccgccatctggtcctaccttacagcggtggtcctagctc

SEQ ID NO: 41658 - DNA, 618 bp, Homo sapiens
tgctcaacctcgctggggggwcaggtggctggattcgggtccctcactggcgtgacaggagggagtgcgaggcaggaatttaggagccaaggaggtgagagcagctctggcccctcactgtaggtgacgccaaactctcctcgacttgccccgactcttagttgaaaaatctctgtcctctcccagtgctctccagcttcccaagcaatgacctcaatgaaaaaaatgacagcggggcggactgcccccgctccagagtaccagtgccggcagtgcgagctatgacgcaatcggagctcggtcggtcctttgattggctagtcctggccactttggattggccgcgcgggctggtggggaccccccccctccagctatctctgtaataagagcggggtctccgcggggaaggcgcccacagcaggtgtggtgttcatcccgggtcgaccggccgctcgcgctgccctgaaactctagtcgccaggtgaggaacttcccattccccattccgctcactcgaataacctgcttcttcgactagttcatccagtttgctccatctgcctgtctgcctctccgccgccatctggtcctaccttacagcggtggtcctagctc

SEQ ID NO: 41659 - DNA, 618 bp, Homo sapiens
tgctcaacctcgctggggggacrggtggctggattcgggtccctcactggcgtgacaggagggagtgcgaggcaggaatttaggagccaaggaggtgagagcagctctggcccctcactgtaggtgacgccaaactctcctcgacttgccccgactcttagttgaaaaatctctgtcctctcccagtgctctccagcttcccaagcaatgacctcaatgaaaaaaatgacagcggggcggactgcccccgctccagagtaccagtgccggcagtgcgagctatgacgcaatcggagctcggtcggtcctttgattggctagtcctggccactttggattggccgcgcgggctggtggggaccccccccctccagctatctctgtaataagagcggggtctccgcggggaaggcgcccacagcaggtgtggtgttcatcccgggtcgaccggccgctcgcgctgccctgaaactctagtcgccaggtgaggaacttcccattccccattccgctcactcgaataacctgcttcttcgactagttcatccagtttgctccatctgcctgtctgcctctccgccgccatctggtcctaccttacagcggtggtcctagctc

SEQ ID NO: 41660 - DNA, 618 bp, Homo sapiens
tgctcaacctcgctggggggacaggtggctggattcgggtccctcactggcgtgacaggagggagtgcgaggcaggaatttaggagccaaggaggtgagagcagctctggcccctcactgtaggtgacgccaaactctcctcgacttgccccgactcttagttgaaaaatctctgtcctctcccagtgctctccagcttcccaagcaatgacctcaatgaaaaaaatgacagcggggcggactgcccccgctccagagtaccagtgccggcagtgcgagctatgacgcaatcggagctcggtcggtcctttgattggctagtcctggccactttggattggccgcgcgggctggtggggaccccccccctccagctatctctgtaataagagcggggtctccgckgggaaggcgcccacagcaggtgtggtgttcatcccgggtcgaccggccgctcgcgctgccctgaaactctagtcgccaggtgaggaacttcccattccccattccgctcactcgaataacctgcttcttcgactagttcatccagtttgctccatctgcctgtctgcctctccgccgccatctggtcctaccttacagcggtggtcctagctc

SEQ ID NO: 41661 - DNA, 963 bp, Homo sapiens
cttttaattcacaaaaccatcctatgaagaaagtaccatgttgttaccatcaacagttgaggaaatggtttaaggagcttattcaggatcatgcagctgacaaggagttgagacagaattgaaccccagcctctttaagtttaattcagagttcatggtcctaaaccccacagtggtgacttctggttcaatctttggcccttcaggtccttgagccaaagtgtgactcaggagttctcaatcctggatacacaatcgaactactagggagctttaaaatttttaggattctgacttaattggtctggagtaggtcctgggatgaatattttagctttccaagtgattctactgtgctgcgtgggttgaggacctctactctcttttgggagtcatttaaatgtatttaacctgaagagcttgtagtggtgttggagcaaaggggatggaggagatagcattggatctgttttctccaaggattctgtgactcaaayatttaacttggtcaagagggctgactggagatttttgtcttggtgctgtgggggaacagccaacagctccaacctctgagctgaaactgacttaacatttgtttaatgattaattccaaacagtaagtagctgaacttcttttggaacaattaccatttttccctttcaaaatgagttgcaaacacatgctggatttgggctctctgtgtggatctgaggtctgggtgggataaggacttctgaatggcacatgggttctgaagatattttatgttttgtaaagaatgggccttagaaatttcctgggaaggaaactttgcttggcaagagctctgaagctctgggtgttctgtttcaggacctgagcactcaaggtctgtttccatgtgccgcttgatatagacagctcctaccacctgcctgcatttgtgcttcacattcaggaaagcagagaggagacatgca

SEQ ID NO: 41662 - DNA, 963 bp, Homo sapiens
cttttaattcacaaaaccatcctatgaagaaagtaccatgttgttaccatcaacagttgaggaaatggtttaaggagcttattcaggatcatgcagctgacaaggagttgagacagaattgaaccccagcctctttaagtttaattcagagttcatggtcctaaaccccacagtggtgacttctggttcaatctttggcccttcaggtccttgagccaaagtgtgactcaggagttctcaatcctggatacacaatcgaactactagggagctttaaaatttttaggattctgacttaattggtctggagtaggtcctgggatgaatattttagctttccaagtgattctactgtgctgcgtgggttgaggacctctactctcttttgggagtcatttaaatgtatttaacctgaagagcttgtagtggtgttggagcaaaggggatggaggagatagcattggatctgttttctccaaggattctgtgactcaaacatttaacttggtcaagagggctgactggagatttttgtcttggtgctgtgggggaacagccaacagctccaacctctgagctgaaactgactyaacatttgtttaatgattaattccaaacagtaagtagctgaacttcttttggaacaattaccatttttccctttcaaaatgagttgcaaacacatgctggatttgggctctctgtgtggatctgaggtctgggtgggataaggacttctgaatggcacatgggttctgaagatattttatgttttgtaaagaatgggccttagaaatttcctgggaaggaaactttgcttggcaagagctctgaagctctgggtgttctgtttcaggacctgagcactcaaggtctgtttccatgtgccgcttgatatagacagctcctaccacctgcctgcatttgtgcttcacattcaggaaagcagagaggagacatgca

SEQ ID NO: 41663 - DNA, 963 bp, Homo sapiens
cttttaattcacaaaaccatcctatgaagaaagtaccatgttgttaccatcaacagttgaggaaatggtttaaggagcttattcaggatcatgcagctgacaaggagttgagacagaattgaaccccagcctctttaagtttaattcagagttcatggtcctaaaccccacagtggtgacttctggttcaatctttggcccttcaggtccttgagccaaagtgtgactcaggagttctcaatcctggatacacaatcgaactactagggagctttaaaatttttaggattctgacttaattggtctggagtaggtcctgggatgaatattttagctttccaagtgattctactgtgctgcgtgggttgaggacctctactctcttttgggagtcatttaaatgtatttaacctgaagagcttgtagtggtgttggagcaaaggggatggaggagatagcattggatctgttttctccaaggattctgtgactcaaacatttaacttggtcaagagggctgactggagatttttgtcttggtgctgtgggggaacagccaacagctccaacctctgagctgaaactgacttaacatttgtttaatgattaattccaaacagtaagtagctgaacttcttttggaacaattaccatttttccctttcaaaatgagttgcaaacacatgctggrtttgggctctctgtgtggatctgaggtctgggtgggataaggacttctgaatggcacatgggttctgaagatattttatgttttgtaaagaatgggccttagaaatttcctgggaaggaaactttgcttggcaagagctctgaagctctgggtgttctgtttcaggacctgagcactcaaggtctgtttccatgtgccgcttgatatagacagctcctaccacctgcctgcatttgtgcttcacattcaggaaagcagagaggagacatgca

SEQ ID NO: 41664 - DNA, 963 bp, Homo sapiens
cttttaattcacaaaaccatcctatgaagaaagtaccatgttgttaccatcaacagttgaggaaatggtttaaggagcttattcaggatcatgcagctgacaaggagttgagacagaattgaaccccagcctctttaagtttaattcagagttcatggtcctaaaccccacagtggtgacttctggttcaatctttggcccttcaggtccttgagccaaagtgtgactcaggagttctcaatcctggatacacaatcgaactactagggagctttaaaatttttaggattctgacttaattggtctggagtaggtcctgggatgaatattttagctttccaagtgattctactgtgctgcgtgggttgaggacctctactctcttttgggagtcatttaaatgtatttaacctgaagagcttgtagtggtgttggagcaaaggggatggaggagatagcattggatctgttttctccaaggattctgtgactcaaacatttaacttggtcaagagggctgactggagatttttgtcttggtgctgtgggggaacagccaacagctccaacctctgagctgaaactgacttaacatttgtttaatgattaattccaaacagtaagtagctgaacttcttttggaacaattaccatttttccctttcaaaatgagttgcaaacacatgctggatttgggctctctgtgtggatctgaggtctgggtgggataaggacttctgaatggcacatgggktctgaagatattttatgttttgtaaagaatgggccttagaaatttcctgggaaggaaactttgcttggcaagagctctgaagctctgggtgttctgtttcaggacctgagcactcaaggtctgtttccatgtgccgcttgatatagacagctcctaccacctgcctgcatttgtgcttcacattcaggaaagcagagaggagacatgca

SEQ ID NO: 41665 - DNA, 1336 bp, Homo sapiens
gcatgcagaggcttaaatatagttgtgctgggctcagtgcctcctgagccaaaggaggctgccacattcatcctggctcaggcctcatgcgtgttcgttggcackgtttcttcattgtctgcttcagatgtaaatgtctctcaatcagtcatctctctctctctcatctatctacatatatagagaaataatatttatacaatatgtatgattaaatataagcacacacatatataaatatatatccatatatatgtatatatatttacatctggaagaaggctagaaatgaccagcagggctggctgatgagagcttaggacttctatttcttttcttctcattctaaagagtaacttggttttccttcagtgactctctgagtgaggtctgtatgtagaaccttcaagcagatgtcccaggaactatgggaaagtaggaaggcaggagtaaaggttgtggaacaaggaatcagaggtgtaagtgtctgtctcatgccagacatttttactgaagtaattacgtgcacttaaaatcagagtggttctgtcttgacccttctacaaccccccaccctccgagcatgttagggcttctgctctgtgttcttttaaccctgcacccccaaccacatgtcattgcccctctacccagctttgtacctgcttttaaaattgtctgccttctctatgagaccatgagtttattgtggacgggactgaagcagtcttgctcagtgtccagcatgacgtctggcctataataaaccattaacatttttgaatgcacgaatgaatgtactagccctaagttatgccctttcacaccaaaagaaatgaggggaattcaaccaccccaaaggaagtagaatatataagttgtgattactcttagctgattataaaatgtcagaaattatgaactcctccagagttggatatcttcatcttgacccctgaagtgaccagcagcaaaactcttagaatgaaaagggcgcatgagcctatcattttggggtggagggtaagggaagatctggaattgagctattttggtgaacccgtgctgggcttcttcttccaattgcccattcgttgttttatcgtcattcactgctgcattctcagcacacatggaactgagcctggcacataataggtgcttttgttgtcagagttctcaaaaacctgacagaggatggtcttttgctgaacttgccttcttcctataacattttgcttagttttgggaaccggtacaatgaggttagttagacccaggagtgatgaggttaaaggcgagtgccctgagggacccagttcagatcagttgctca

SEQ ID NO: 41666 - DNA, 1336 bp, Homo sapiens
gcatgcagaggcttaaatatagttgtgctgggctcagtgcctcctgagccaaaggaggctgccacattcatcctggctcaggcctcatgcgtgttcgttggcactgtttcttcattgtctgcttcagatgtaaatgtctctcaatcagtcatctctctctctctcatctatctacatatatagagaaataatatttatacaatatgtatgattaaatataagcacacacatatataaatatatatccatatatatgtatatatatttacatctggaagaaggctagaaatgaccagcagggctggctgatgagagcttaggacttctatttcttttcttctcattctaaagagtaacttggttttccttcagtgactctctgagtgaggtctgtatgtagaaccttcaagcagatgtcccaggaactatgggaaartaggaaggcaggagtaaaggttgtggaacaaggaatcagaggtgtaagtgtctgtctcatgccagacatttttactgaagtaattacgtgcacttaaaatcagagtggttctgtcttgacccttctacaaccccccaccctccgagcatgttagggcttctgctctgtgttcttttaaccctgcacccccaaccacatgtcattgcccctctacccagctttgtacctgcttttaaaattgtctgccttctctatgagaccatgagtttattgtggacgggactgaagcagtcttgctcagtgtccagcatgacgtctggcctataataaaccattaacatttttgaatgcacgaatgaatgtactagccctaagttatgccctttcacaccaaaagaaatgaggggaattcaaccaccccaaaggaagtagaatatataagttgtgattactcttagctgattataaaatgtcagaaattatgaactcctccagagttggatatcttcatcttgacccctgaagtgaccagcagcaaaactcttagaatgaaaagggcgcatgagcctatcattttggggtggagggtaagggaagatctggaattgagctattttggtgaacccgtgctgggcttcttcttccaattgcccattcgttgttttatcgtcattcactgctgcattctcagcacacatggaactgagcctggcacataataggtgcttttgttgtcagagttctcaaaaacctgacagaggatggtcttttgctgaacttgccttcttcctataacattttgcttagttttgggaaccggtacaatgaggttagttagacccaggagtgatgaggttaaaggcgagtgccctgagggacccagttcagatcagttgctca

SEQ ID NO: 41667 - DNA, 1336 bp, Homo sapiens
gcatgcagaggcttaaatatagttgtgctgggctcagtgcctcctgagccaaaggaggctgccacattcatcctggctcaggcctcatgcgtgttcgttggcactgtttcttcattgtctgcttcagatgtaaatgtctctcaatcagtcatctctctctctctcatctatctacatatatagagaaataatatttatacaatatgtatgattaaatataagcacacacatatataaatatatatccatatatatgtatatatatttacatctggaagaaggctagaaatgaccagcagggctggctgatgagagcttaggacttctatttcttttcttctcattctaaagagtaacttggttttccttcagtgactctctgagtgaggtctgtatgtagaaccttcaagcagatgtcccaggaactatgggaaagtaggaaggcaggagtaaaggttgtggaacaaggaatcagaggtgtaagtgtctgtctcatgccagacatttttactgaagtaattacgtgcacttaaaatcagagtggttctgtcttgacccttctacaaccccccaccctccgagcatgttagggcttctgctctgtgttcttttaaccctgcacccccaaccacatgtcattgcccctctacccagctttgtacctgcttttaaaattgtctgccttctctatgagaccatgagtttattgtggacgggactgaagcagtcttgctcagtgtccagcatgacgtctggcctataataaaccattaacatttttgaatgcacgaatgaatgtactagccctaagttatgccctttcacaccaaaagaaatgaggggaattcaaccaccccaaaggaagtagaatatataagttgtgattactcttagctgattataaaatgtcagaaattatgaactcctccagagttggatatcttcatcttgacccctgaagtgaccagcagcaaaactcttagaatgaaaagggcgcatgagcctatcattttggggtggagggtaagggaagatctggaattgagctrttttggtgaacccgtgctgggcttcttcttccaattgcccattcgttgttttatcgtcattcactgctgcattctcagcacacatggaactgagcctggcacataataggtgcttttgttgtcagagttctcaaaaacctgacagaggatggtcttttgctgaacttgccttcttcctataacattttgcttagttttgggaaccggtacaatgaggttagttagacccaggagtgatgaggttaaaggcgagtgccctgagggacccagttcagatcagttgctca

SEQ ID NO: 41668 - DNA, 1336 bp, Homo sapiens
gcatgcagaggcttaaatatagttgtgctgggctcagtgcctcctgagccaaaggaggctgccacattcatcctggctcaggcctcatgcgtgttcgttggcactgtttcttcattgtctgcttcagatgtaaatgtctctcaatcagtcatctctctctctctcatctatctacatatatagagaaataatatttatacaatatgtatgattaaatataagcacacacatatataaatatatatccatatatatgtatatatatttacatctggaagaaggctagaaatgaccagcagggctggctgatgagagcttaggacttctatttcttttcttctcattctaaagagtaacttggttttccttcagtgactctctgagtgaggtctgtatgtagaaccttcaagcagatgtcccaggaactatgggaaagtaggaaggcaggagtaaaggttgtggaacaaggaatcagaggtgtaagtgtctgtctcatgccagacatttttactgaagtaattacgtgcacttaaaatcagagtggttctgtcttgacccttctacaaccccccaccctccgagcatgttagggcttctgctctgtgttcttttaaccctgcacccccaaccacatgtcattgcccctctacccagctttgtacctgcttttaaaattgtctgccttctctatgagaccatgagtttattgtggacgggactgaagcagtcttgctcagtgtccagcatgacgtctggcctataataaaccattaacatttttgaatgcacgaatgaatgtactagccctaagttatgccctttcacaccaaaagaaatgaggggaattcaaccaccccaaaggaagtagaatatataagttgtgattactcttagctgattataaaatgtcagaaattatgaactcctccagagttggatatcttcatcttgacccctgaagtgaccagcagcaaaactcttagaatgaaaagggcgcatgagcctatcattttggggtggagggtaagggaagatctggaattgagctattttggtgaacccgtgctgggcttcttcttccaattgcccattcgttgttttatcgtcattcactgctgcattcycagcacacatggaactgagcctggcacataataggtgcttttgttgtcagagttctcaaaaacctgacagaggatggtcttttgctgaacttgccttcttcctataacattttgcttagttttgggaaccggtacaatgaggttagttagacccaggagtgatgaggttaaaggcgagtgccctgagggacccagttcagatcagttgctca

SEQ ID NO: 41669 - DNA, 778 bp, Homo sapiens
cactcagcacttcctgggtggggtgacaactggggagactcctgtgggtggatcatggtaggaggcaggcaagtcaggtgttggtgctggggttcagggtggttgattcttcacccacagcaggcctcctaaagacggaagaggatccagatcctgggagcattgactgggcaagagcagggcagcactgggtgtctgggaaagcaggtggggctcctctccactaaagaccagcgggcttgggtgagggaggtggaagccccagtccaagtgctcactgggccaagatggcgtgggagtagggtagggttagaggaggaaggtggtgatgtgacaggctctagtgcctctgttcaagcctgatctatggtgacataactaattcccgccaccctgaccccttccctggttgtgcgactgaggctgcgcctctacttagacatgagtgagtctgagcttgcggataggctctcagggactccagccaggagagctggggaggcaggggctgaaatctggggtttcccaaccaagtttccaggaaagatgctgaaaattcttatagaaaagtggaaaggcctggtacgtcctgctactatggtggtacctgcaggatttggggtgggatctgagtctgttcctgttagctggtctaaatggggacaggggccagcaaactgctctctgtcctctgcatccatgtcccacagtctggtcctggcagccsaaataactccaccctaccctcagcttcttcactttggtctggactcctaga

SEQ ID NO: 41670 - DNA, 778 bp, Homo sapiens
cactcagcacttcctgggtggggtgacaactggggagactcctgtgggtggatcatggtaggaggcaggcaagtcaggtgttggtgctggggttcagggtggttgattcttcacccacagcaggcctcctaaagacggaagaggatccagatcctgggagcattgactgggcaagagcagggcagcactgggtgtctgggaaagcaggtggggctcctctccactaaagaccagcgggcttgggtgagggaggtggaagccccagtccaagtgctcactgggccaagatggcgtgggagtagggtagggttagaggaggaaggtggtgatgtgacaggctctagtgcctctgttcaagcctgatctatggtgacataactaattcccgccaccctgaccccttccctggttgtgcgactgaggctgcgcctctacttagacatgagtgagtctgagcttgcggataggctctcagggactccagccaggagagctggggaggcaggggctgaaatctggggtttcccaaccaagtttccaggaaagatgctgaaaattcttatagaaaagtggaaaggcctggtacgtcctgctactatggtggtacctgcaggatttggggtgggatctgagtctgttcctgttagctggtctaaatggggacaggggccagcaaactgctctctgtcctctgcatccatgtcccacagtctggtcctggcagcccaaataactccaccctaccstcagcttcttcactttggtctggactcctaga

SEQ ID NO: 41671 - DNA, 593 bp, Homo sapiens
gagttggtgtwcttcttagagtaaggatctgctgggaattccaagaagagaactccccctttccgttggagatcaggggcaggtgcctggaggaggtggtcatatcctgggtagggtttggacttgtcaagacagtgagagcatattccagggtgaggcagtcaaagggacaataagtaagtcccctgttctagagttgtacattctggaagagagggaaccatgataaggaaagccagaaaggtacaccaaggccctgattgtgagaagccttcggtgccagattaggggctggccattcacattgagatccctgagaagatactggagggtgggcagggcaggggaggtagggatggctaggactggaaaacagccaaattacagcacctgggaccaccacctggctcaaaggaaacctgtgtgctgggactgctccccaaggaagagctctggcatcctctgaatggaggcactcacaccccttacctctggcctggaaaggaaagaaccaacccaaccccacagccatggtagaggtaggaaaggagaacaaggccctgggaggcctgctcagatccacaactcacatt

SEQ ID NO: 41672 - DNA, 1573 bp, Homo sapiens
catgtggggcttaacacataggtaatgtgttgatagttgcagcaaaccaccatggcacacgtttacctatataacaaacctgcacatcctgcatgtgtatcccagcactttaaaataaaatgaaataaaataataaagtagatgagcagagagagggatgaggcagccttaacataggcagatggggaggaccatttgcccaagcaacaacttggggctgctatgggcaaaggaagatgaagggaaactgtgagcccctgaaccctgcctacagctcgggagaggagagtgggcaagaatcatgagccgccaagatataattgctgctttcaggccaaagccacacagagctgtccagctgcaggagttgcctttcayggtaacagtcctagaaatgaggacagacaaggtgccagtggggaaaagcagaatctggtttactttaagaatgagcttaagccaggtgtgatgtctcatgcctgtaatcccaacactttgggaggtggaggtgggaggatcccttgaaactaggagtttgagaccaacctgagcaacatagcgatacccccatctctacaataataattattattattaataataattagctgagcatggtggctcttccctgtggtcccagctactcaggatactcaagaggctgaggcaggaggatcacttgagcccaggaggtcaaggctgcagtgagctattatggtgccactgcactacagtctgggtgacaaagtgagaccctttctcttaaaagaagagtttaaaataactgttatttatagagattgtttaaacagcagcaactctttctccccaagcagcaaccagacatactgagaagaaaacatagaacaaattagtaagtgcgggaatccttgcctccgcctacctctactcagtgaccaatccccaggcccatcaagcaggtgcatgccgcttatgtccagggcagggaagacattcggaggctctggcctattagcagctgaaggaaaaaatgggttggctgctcgagaacccccacccagcctgacttctcccagaatgctttgcacccaagctgctcacatttaaactaaactactgtgttaataatatttttgtgtttagcaaaaaaaaaaatagacagatttagacaaaaagcagttctgaagtcccagtgaaataaaaaataaaaaaaaatccaccagtaataataacttttattgaacctttacagtacctcgagagctgtgcacttatcatgcattattttattcacgacaaccttacttggtttactctcttattcactccatgttacaggtgaaaatatagaggtgtagaaaggccacatgacttgagagagccagaactccatgcaggcagcctggctccagagactgtgttactgaccacactattcatcttcccatctgtgtctctcctccaccagactttgagatatcctcaaaagcagtcattgtttgattcatctcagcgcaaggcctgacacacagtaggtatcaataaatatgtaatcgaatcaaataagcctaagactgcctgggagacatgc

SEQ ID NO: 41673 - DNA, 1573 bp, Homo sapiens
catgtggggcttaacacataggtaatgtgttgatagttgcagcaaaccaccatggcacacgtttacctatataacaaacctgcacatcctgcatgtgtatcccagcactttaaaataaaatgaaataaaataataaagtagatgagcagagagagggatgaggcagccttaacataggcagatggggaggaccatttgcccaagcaacaacttggggctgctatgggcaaaggaagatgaagggaaactgtgagcccctgaaccctgcctacagctcgggagaggagagtgggcaagaatcatgagccgccaagatataattgctgctttcaggccaaagccacacagagctgtccagctgcaggagttgcctttcacggtaacagtcctagaaatgaggacagacaaggtgccagtggggaaaagcagaatctggtttactttaagaatgagcttaagccaggtgtgatgtctcatgcctgtaatcccaacactttgggaggtggaggtgggaggatcccttgaaactaggagtttgagaccaacctgagcaacatagcgatacccccatctctacaataataattattattattaataataattagctgagcatggtggctcttccctgtggtcccagctactcaggatactcaagaggctgaggcaggaggatcacttgagcccaggaggtcaaggctgcagtgagctattatggtgccactgcactacagtctgggtgacaaagtgagaccctttctcttaaaagaagagtttaaaataactgttatttatagagattgtttaaacagcagcaactctttctccccaagcagcaaccagacatactgagaagaaaacatagaacaaattagtaagtgcgggaatccttgcctccgcctacctctactcagtgaccaatccccaggcccatcaagcaggtgcatgccgcttatgtccagggcagggaagacattcggaggctctggcctattagcagctgaaggaaaaaatgggttggctgctcgagaacccccacccagcctgacttctcccagaatgctttgcacccaagctgctcacatttaaactaaactactgtgttaataatatttttgtgtttagcaaaaaaaaaaatagacagawttagacaaaaagcagttctgaagtcccagtgaaataaaaaataaaaaaaaatccaccagtaataataacttttattgaacctttacagtacctcgagagctgtgcacttatcatgcattattttattcacgacaaccttacttggtttactctcttattcactccatgttacaggtgaaaatatagaggtgtagaaaggccacatgacttgagagagccagaactccatgcaggcagcctggctccagagactgtgttactgaccacactattcatcttcccatctgtgtctctcctccaccagactttgagatatcctcaaaagcagtcattgtttgattcatctcagcgcaaggcctgacacacagtaggtatcaataaatatgtaatcgaatcaaataagcctaagactgcctgggagacatgc

SEQ ID NO: 41674 - DNA, 1573 bp, Homo sapiens
catgtggggcttaacacataggtaatgtgttgatagttgcagcaaaccaccatggcacacgtttacctatataacaaacctgcacatcctgcatgtgtatcccagcactttaaaataaaatgaaataaaataataaagtagatgagcagagagagggatgaggcagccttaacataggcagatggggaggaccatttgcccaagcaacaacttggggctgctatgggcaaaggaagatgaagggaaactgtgagcccctgaaccctgcctacagctcgggagaggagagtgggcaagaatcatgagccgccaagatataattgctgctttcaggccaaagccacacagagctgtccagctgcaggagttgcctttcacggtaacagtcctagaaatgaggacagacaaggtgccagtggggaaaagcagaatctggtttactttaagaatgagcttaagccaggtgtgatgtctcatgcctgtaatcccaacactttgggaggtggaggtgggaggatcccttgaaactaggagtttgagaccaacctgagcaacatagcgatacccccatctctacaataataattattattattaataataattagctgagcatggtggctcttccctgtggtcccagctactcaggatactcaagaggctgaggcaggaggatcacttgagcccaggaggtcaaggctgcagtgagctattatggtgccactgcactacagtctgggtgacaaagtgagaccctttctcttaaaagaagagtttaaaataactgttatttatagagattgtttaaacagcagcaactctttctccccaagcagcaaccagacatactgagaagaaaacatagaacaaattagtaagtgcgggaatccttgcctccgcctacctctactcagtgaccaatccccaggcccatcaagcaggtgcatgccgcttatgtccagggcagggaagacattcggaggctctggcctattagcagctgaaggaaaaaatgggttggctgctcgagaacccccacccagcctgacttctcccagaatgctttgcacccaagctgctcacatttaaactaaactactgtgttaataatatttttgtgtttagcaaaaaaaaaaatagacagatttagacaaaaagcagttctgaagtcmcagtgaaataaaaaataaaaaaaaatccaccagtaataataacttttattgaacctttacagtacctcgagagctgtgcacttatcatgcattattttattcacgacaaccttacttggtttactctcttattcactccatgttacaggtgaaaatatagaggtgtagaaaggccacatgacttgagagagccagaactccatgcaggcagcctggctccagagactgtgttactgaccacactattcatcttcccatctgtgtctctcctccaccagactttgagatatcctcaaaagcagtcattgtttgattcatctcagcgcaaggcctgacacacagtaggtatcaataaatatgtaatcgaatcaaataagcctaagactgcctgggagacatgc

SEQ ID NO: 41675 - DNA, 614 bp, Homo sapiens
caatgctctggttgggtagagcttagacccttagaaaccattgccccaattctcagagcctggcctgaatgtaaaggcaaacagtgctctggtgagttgtgggtatatattctcaagcccttgagaagtgtctgtccccacatgacaccaggaacmaacatagaatattctcaaccagttcaacaaggtttaaaacattaagcagtatctctcaggcaatccctggtcaacttaattcaatgaaacactattgacactgacaatgttccaggccttgttctggtgatccctgcccccaggaagcttacatagtcgagcagaagagacagacataagaaagatagcccaacttcactctcatcccatcatgatgggtcatgaggctcgctcaagtgcatctaagagtccccagagttcatctaacatatgttcccccaccaccccccaaaagactggttcagcaactacaaggtggaactgaatgattctgacaccctttcttccttagcagccttacactgggcatgatcctagctgccatgccctgccatgtccacccagcatggctgccattccttccagtgaatgtcatgctctctggactccacaggaca

SEQ ID NO: 41676 - DNA, 614 bp, Homo sapiens
caatgctctggttgggtagagcttagacccttagaaaccattgccccaattctcagagcctggcctgaatgtaaaggcaaacagtgctctggtgagttgtgggtatatattctcaagcccttgagaagtgtctgtccccacatgacaccaggaaccaacatagaatattctcaaccagttcaacaaggtttaaaacattaagcagtatctctcaggcaatccctggtcaacttaattcaatgaaacactattgacactgacaatgttccaggccttgttctggtgatccctgcccccaggaagcttacatagtcgagcagaagagacagacataagaaagatagcccaacttcastctcatcccatcatgatgggtcatgaggctcgctcaagtgcatctaagagtccccagagttcatctaacatatgttcccccaccaccccccaaaagactggttcagcaactacaaggtggaactgaatgattctgacaccctttcttccttagcagccttacactgggcatgatcctagctgccatgccctgccatgtccacccagcatggctgccattccttccagtgaatgtcatgctctctggactccacaggaca

SEQ ID NO: 41677 - DNA, 614 bp, Homo sapiens
caatgctctggttgggtagagcttagacccttagaaaccattgccccaattctcagagcctggcctgaatgtaaaggcaaacagtgctctggtgagttgtgggtatatattctcaagcccttgagaagtgtctgtccccacatgacaccaggaaccaacatagaatattctcaaccagttcaacaaggtttaaaacattaagcagtatctctcaggcaatccctggtcaacttaattcaatgaaacactattgacactgacaatgttccaggccttgttctggtgatccctgcccccaggaagcttacatagtcgagcagaagagacagacataagaaagatagcccaacttcactctcatcccatcatgatgggtcatgaggctcgctcaagtgcatctaagrgtccccagagttcatctaacatatgttcccccaccaccccccaaaagactggttcagcaactacaaggtggaactgaatgattctgacaccctttcttccttagcagccttacactgggcatgatcctagctgccatgccctgccatgtccacccagcatggctgccattccttccagtgaatgtcatgctctctggactccacaggaca

SEQ ID NO: 41678 - DNA, 1189 bp, Homo sapiens
tgcatttaaatgaaagagcataatcctagaaaaatttacatcaccaatgtgtcagtaatatgaataaatcccattttgtaagcattaatagaaatataacactaaagaaatacatgtctctaattacttattcagtatattaatccaaagtcaagacttacaagatccacaaacctaagtaaagtagacaacaaatggtgaacatcggtattagtttttggaacagagttctacttagatccctgggtaacataacatgttctaaaattacttgcagaacatatcattaaaacaatgtcaggcctttttttttttttaacgtagaacmagtaagtttttattttacttttttcagtttatttcaaagctggtttatttcattaaatccagctccttatgcaccaaaatgtctttgaagagtggagtccatgctccatgaaaaaaaaaatcattttaaaggcctccaagggaagctattctgtaatttcctttgataaaccatcatagtatataataatcctcatgactggaaaatttacgtttctattttacataaaattcatattccacagttttagcctgaatttttctcttctgtcctttcagacaatagaacacatatttttaatttatttgtatatggggacccttgatattctgaaaaaaaaataaatttatatctttctttcaatacatatattcatttttttttttttttgacctcggaagaggaaggggtccagggcttactggaaggcagtacatgggaagagagtgggtgagctcagctactatatttggtctttgtcctgtggctatcttggccttaatcctcattattatagtgggatcttattctcaggccaggcacttgtatctgcctcagaataattactgagctttgagggcattttttgcagtgtctatgctaccgccaactccctctactttcatcagcaaaatgtaaggctttgcagacaatgcaatatgtgaaaagaaataacacatatcatcagaaccaacactagtcaagggtaaaactttaaggaaacacattcctttaaggaaacagaaacacacacacacacacacacatgcacgtgcacacacatacacgcgtgcgtgcacacacacaccatgttccttatgaggacagtctctctatatatcctatttactactttgtatt

SEQ ID NO: 41679 - DNA, 1189 bp, Homo sapiens
tgcatttaaatgaaagagcataatcctagaaaaatttacatcaccaatgtgtcagtaatatgaataaatcccattttgtaagcattaatagaaatataacactaaagaaatacatgtctctaattacttattcagtatattaatccaaagtcaagacttacaagatccacaaacctaagtaaagtagacaacaaatggtgaacatcggtattagtttttggaacagagttctacttagatccctgggtaacataacatgttctaaaattacttgcagaacatatcattaaaacaatgtcaggcctttttttttttttaacgtagaaccagtaagtttttattttacttttttcagtttatttcaaagctggtttatttcattaaatccagctccttatgcacmaaaatgtctttgaagagtggagtccatgctccatgaaaaaaaaaatcattttaaaggcctccaagggaagctattctgtaatttcctttgataaaccatcatagtatataataatcctcatgactggaaaatttacgtttctattttacataaaattcatattccacagttttagcctgaatttttctcttctgtcctttcagacaatagaacacatatttttaatttatttgtatatggggacccttgatattctgaaaaaaaaataaatttatatctttctttcaatacatatattcatttttttttttttttgacctcggaagaggaaggggtccagggcttactggaaggcagtacatgggaagagagtgggtgagctcagctactatatttggtctttgtcctgtggctatcttggccttaatcctcattattatagtgggatcttattctcaggccaggcacttgtatctgcctcagaataattactgagctttgagggcattttttgcagtgtctatgctaccgccaactccctctactttcatcagcaaaatgtaaggctttgcagacaatgcaatatgtgaaaagaaataacacatatcatcagaaccaacactagtcaagggtaaaactttaaggaaacacattcctttaaggaaacagaaacacacacacacacacacacatgcacgtgcacacacatacacgcgtgcgtgcacacacacaccatgttccttatgaggacagtctctctatatatcctatttactactttgtatt

SEQ ID NO: 41680 - DNA, 1189 bp, Homo sapiens
tgcatttaaatgaaagagcataatcctagaaaaatttacatcaccaatgtgtcagtaatatgaataaatcccattttgtaagcattaatagaaatataacactaaagaaatacatgtctctaattacttattcagtatattaatccaaagtcaagacttacaagatccacaaacctaagtaaagtagacaacaaatggtgaacatcggtattagtttttggaacagagttctacttagatccctgggtaacataacatgttctaaaattacttgcagaacatatcattaaaacaatgtcaggcctttttttttttttaacgtagaaccagtaagtttttattttacttttttcagtttatttcaaagctggtttatttcattaaatccagctccttatgcaccaaaatgtctttgaagagtggagtcmatgctccatgaaaaaaaaaatcattttaaaggcctccaagggaagctattctgtaatttcctttgataaaccatcatagtatataataatcctcatgactggaaaatttacgtttctattttacataaaattcatattccacagttttagcctgaatttttctcttctgtcctttcagacaatagaacacatatttttaatttatttgtatatggggacccttgatattctgaaaaaaaaataaatttatatctttctttcaatacatatattcatttttttttttttttgacctcggaagaggaaggggtccagggcttactggaaggcagtacatgggaagagagtgggtgagctcagctactatatttggtctttgtcctgtggctatcttggccttaatcctcattattatagtgggatcttattctcaggccaggcacttgtatctgcctcagaataattactgagctttgagggcattttttgcagtgtctatgctaccgccaactccctctactttcatcagcaaaatgtaaggctttgcagacaatgcaatatgtgaaaagaaataacacatatcatcagaaccaacactagtcaagggtaaaactttaaggaaacacattcctttaaggaaacagaaacacacacacacacacacacatgcacgtgcacacacatacacgcgtgcgtgcacacacacaccatgttccttatgaggacagtctctctatatatcctatttactactttgtatt

SEQ ID NO: 41681 - DNA, 1189 bp, Homo sapiens
tgcatttaaatgaaagagcataatcctagaaaaatttacatcaccaatgtgtcagtaatatgaataaatcccattttgtaagcattaatagaaatataacactaaagaaatacatgtctctaattacttattcagtatattaatccaaagtcaagacttacaagatccacaaacctaagtaaagtagacaacaaatggtgaacatcggtattagtttttggaacagagttctacttagatccctgggtaacataacatgttctaaaattacttgcagaacatatcattaaaacaatgtcaggcctttttttttttttaacgtagaaccagtaagtttttattttacttttttcagtttatttcaaagctggtttatttcattaaatccagctccttatgcaccaaaatgtctttgaagagtggagtccatgctcmatgaaaaaaaaaatcattttaaaggcctccaagggaagctattctgtaatttcctttgataaaccatcatagtatataataatcctcatgactggaaaatttacgtttctattttacataaaattcatattccacagttttagcctgaatttttctcttctgtcctttcagacaatagaacacatatttttaatttatttgtatatggggacccttgatattctgaaaaaaaaataaatttatatctttctttcaatacatatattcatttttttttttttttgacctcggaagaggaaggggtccagggcttactggaaggcagtacatgggaagagagtgggtgagctcagctactatatttggtctttgtcctgtggctatcttggccttaatcctcattattatagtgggatcttattctcaggccaggcacttgtatctgcctcagaataattactgagctttgagggcattttttgcagtgtctatgctaccgccaactccctctactttcatcagcaaaatgtaaggctttgcagacaatgcaatatgtgaaaagaaataacacatatcatcagaaccaacactagtcaagggtaaaactttaaggaaacacattcctttaaggaaacagaaacacacacacacacacacacatgcacgtgcacacacatacacgcgtgcgtgcacacacacaccatgttccttatgaggacagtctctctatatatcctatttactactttgtatt

SEQ ID NO: 41682 - DNA, 675 bp, Homo sapiens
atcactgtacccttatagtaggtcataaagttgggtagtccatcttctaattttgctttcattcaagattgaattgcctattcttggtgttttgctagaatgtcttttaaaaatagcctctaaatatagttgccccatattcaaaatgagttaaatgtgttaaatataagtattcaacaaatgctatcacagaaaacattaacttgcaacacaaaaaatttaaataacttgagctcaaatagtgtaaaacatttaattttgaatccaataattttagtttggaatatttcaacttgtgaaaaatatttaatgaaattcttaattttatatcaayaaattcatattctgtgccagaataagaggaaagtaaaaataaatccataaactcaaatgacataaagcttccaaaatcattttaagtagacaagagagtggtactttgatgaaaatgaaaaccagagcctgtgaagatatttgaaataaaatataaactatctattcatttcaatagaaaataaatttaattaaagtacatttgattagaaacattttctgtgatctaccatataacttgacatgtgtggagaaagtattttcagttaaaaacaatgtagtttatagcaaagagtccaaaagttttaaaaaaattaaagaaatttaattgtagacaattta

SEQ ID NO: 41683 - DNA, 823 bp, Homo sapiens
gaaataaaaaaattggtaaatctaaactattttgacataaataaaaacagtcactacctctgggtggaggcattgccaacaaaagggcacaagtatattttctgcattgatagaaattttctattttctttttttgttgtttttggatagttgttacttgggtatatgtagtcgttacaattcatctaactgtgcgtataaataagtgcattttactgtttatacattttagctcaataagctagaaatgcattccaagctagagaaaattataaagttgactatagcaattgcatataatatataagcaaataaaaccctcaagcatgagaaagtgataaaactattctaaaattgtatgtgttgcaacgtgaagagctatggctaagaggactgggacagaaggaaaaggggagtggaaagaagagaaagtattccaggtaagaggagattttaggaaaataagagaaataattaagacgtgtgtaggtaatcagtattttctctatcagcactataaagtattatgagataactgtatttgtattcatataagctcctctctttccctgtacataatgtgtataccagaagagaactataaaaaattattctgtttaaaaaaaaaataagtaaaagccaaaagttgtgaaatattagaagggctattgaaaaatgggagaaatatattatttctaaaacaagaattatgtctcctctttgtggaataatttctataccctatatttaggamagaaatggacttgatgtattactgaccatggctgggcatgagaattgtcctcaggatttatttaaaaca

SEQ ID NO: 41684 - DNA, 522 bp, Homo sapiens
ctaccatttttgtaaacaaatttttataggaaaaagccatattcatgtgtttatgccttgcgtagggctgcttttgactacaatggcagactatctggactacaaagccaaaaatgcttactatggagtcctttagtgaaaagtctgccaacctgtaacagttaaatggtctcactttatggcaaatggcttagataacatcttctgctaagatatttttctgggatccacataatgattacagggctcaaaagagaaatgaatttttccatttgttgtgctaagaaagccatcagctaaayggtacctaaacaaactgaaagagtaaatcatctttcaaaagtcctattgtaacctccctgtatatgtgacagcacttgacccagggcagtgataaagaataaataattgggtaaggggtagttgattattttaggagaaattctgtgctaggtgggagttcagcaaacacatacaaatttaggccttcccagatcccataatcaaaactatagtttggag

SEQ ID NO: 41685 - DNA, 522 bp, Homo sapiens
ctaccatttttgtaaacaaatttttataggaaaaagccatattcatgtgtttatgccttgcgtagggctgcttttgactacaatggcagactatctggactacaaagccaaaaatgcttactatggagtcctttagtgaaaagtctgccaacctgtaacagttaaatggtctcactttatggcaaatggcttagataacatcttctgctaagatatttttctgggatccacataatgattacagggctcaaaagagaaatgaatttttccatttgttgtgctaagaaagccatcagctaaatggtacctaaacaaactgaaagagtaaatcatctttcaaaagtcctattgtaacctccctgtatatgtgacagcacttgacccagggcagtgataaagaataaataattgggtaaggggtagttgaytattttaggagaaattctgtgctaggtgggagttcagcaaacacatacaaatttaggccttcccagatcccataatcaaaactatagtttggag

SEQ ID NO: 41686 - DNA, 555 bp, Homo sapiens
taaatgcctatcaatgacagattaaatagagaaaatatgatacatatacatcatggaatactatgcagccataaaaaagaaggagcktaagtcttttgtgggaacatagttggagctagaggctgttatccttagtaaactgatgcaggaatagaaagtcaaatattacatgttctcgcttataaatgaaagctaaatgatgagaactcatgaacacaaagaagggaacagcagacaatgggatctgcttgaggagggagggtaggaggaaggagaggagtagaaaagataactattgggtactaggcttaatacttggatgatgaaataatctgtaaaacaaacccccatgacacaagttcacctatgtaaaaaaccttcacatgtacccccgaacctaaaatagaagttaaaaaaaaaatacagctaaaattgcattgccatgccataccacccataacaaaagccctgaatcagagtcacagagtgcaaactctagagattgtaattctttacaacacagtagaaagcatagaatgacagtaaactctaagt

SEQ ID NO: 41687 - DNA, 555 bp, Homo sapiens
taaatgcctatcaatgacagattaaatagagaaaatatgatacatatacatcatggaatactatgcagccataaaaaagaaggagcttaagtcttttgtgggaacatagwtggagctagaggctgttatccttagtaaactgatgcaggaatagaaagtcaaatattacatgttctcgcttataaatgaaagctaaatgatgagaactcatgaacacaaagaagggaacagcagacaatgggatctgcttgaggagggagggtaggaggaaggagaggagtagaaaagataactattgggtactaggcttaatacttggatgatgaaataatctgtaaaacaaacccccatgacacaagttcacctatgtaaaaaaccttcacatgtacccccgaacctaaaatagaagttaaaaaaaaaatacagctaaaattgcattgccatgccataccacccataacaaaagccctgaatcagagtcacagagtgcaaactctagagattgtaattctttacaacacagtagaaagcatagaatgacagtaaactctaagt

SEQ ID NO: 41688 - DNA, 555 bp, Homo sapiens
taaatgcctatcaatgacagattaaatagagaaaatatgatacatatacatcatggaatactatgcagccataaaaaagaaggagcttaagtcttttgtgggaacatagttggagctagaggctgttatccttagtaaactgatgcaggaatagaaagtcaaatattacatgttctcgcttataaatgaaagctaaatgatgagaactcatgaacacaaagaagggaacagcagacaatgggatctgcttgaggagggagggtaggaggaaggagaggagtagaaaagataactattgggtactaggcttaatacttggatgatgaaataatctgtaaaacaaacccccatgacacaagttcacctatgtaaaaaaccttcacatgtacccccgaacctaaaatagaagttaaaaaaaaaatacagctaaaattgcattgccatgccataccacccataacaaaagccctgaatcagagtcacagagtgcaaactctagagattgtaattctttacaacayagtagaaagcatagaatgacagtaaactctaagt

SEQ ID NO: 41689 - DNA, 596 bp, Homo sapiens
aggttccagcgattctcctgcctcagcctcctgagtagctggggttataggcgcctgmccctgagtccagctaagttttttttttattattcttatttatttatttttattttttaagtagatatggggtttcaccacattggccaggctggtctcacactcctgacctcaggtgatctgcctgcctcgggctcccaaagtgctgggattacaggcttgagccaccacactcagccttgtctttctatttgatccatgtaaaattcagttaaaaccaattccggtttaatgggatctaccccatctgcacctaagtcttctaaactggaaaaaaaaaaagacatcagaaataatggtgtcctttatttgcacagtacttttacacttactatatatatttagagaactccagttcccaaagaccattaacatctgtacttccaaagagttgttttcagccaagagacatgcctcctatatgaatgtcagttctgactccccacacagaaagataggtataaggaaagataataaggaaggtaagacaagggctactgtagccttggtaattggttagctagattagagtcttaaaa

SEQ ID NO: 41690 - DNA, 596 bp, Homo sapiens
aggttccagcgattctcctgcctcagcctcctgagtagctggggttataggcgcctgaccctgagtccagctaagttttttttttattattcttatttatttatttttattttttaagtagatatggggtttcaccacattggccaggctggtctcamactcctgacctcaggtgatctgcctgcctcgggctcccaaagtgctgggattacaggcttgagccaccacactcagccttgtctttctatttgatccatgtaaaattcagttaaaaccaattccggtttaatgggatctaccccatctgcacctaagtcttctaaactggaaaaaaaaaaagacatcagaaataatggtgtcctttatttgcacagtacttttacacttactatatatatttagagaactccagttcccaaagaccattaacatctgtacttccaaagagttgttttcagccaagagacatgcctcctatatgaatgtcagttctgactccccacacagaaagataggtataaggaaagataataaggaaggtaagacaagggctactgtagccttggtaattggttagctagattagagtcttaaaa

SEQ ID NO: 41691 - DNA, 596 bp, Homo sapiens
aggttccagcgattctcctgcctcagcctcctgagtagctggggttataggcgcctgaccctgagtccagctaagttttttttttattattcttatttatttatttttattttttaagtagatatggggtttcaccacattggccaggctggtctcacactcctgacctcaggtgatctgcctgcctcgggctcccaaagtgctgggattacaggcttgagccaccacactcagccttgtctttctatttgatccatgtaaaattcagttaaaaccaattccggtttaatgggatctaccccatctgcacctaagtcttctaaactggaaaaaaaaaaagacatcagaaataatggtgtcctttatttgcacagtacttttacacttactatatatatttagagaactccagttcccaaagaccattaacatctgtacttccaaagagttgttttcagccaagagacatgcctcctatatgaatgtcagttctgactccccacacagaaagataggtataaggaaagayaataaggaaggtaagacaagggctactgtagccttggtaattggttagctagattagagtcttaaaa

SEQ ID NO: 41692 - DNA, 569 bp, Homo sapiens
tttccttagagaactcatctacttccacacttctaggaaagtgagtccaggattcttatctgcagcccacatctctttcctgcactgtgggtcaattggctgatggacaactcctcgctgacatcctgccagcatctcagagcccatcatcagctcctcctcactgggaaatcctctttcctcctccagatgtttctttctttttttttttttttkgaaatggagtttcactcttgttgcccaggctggagtgcaatggtgcgatctcggctcaccacaacctctgcctcccaggttcaagcgattctcctgcctcagcctcactagtagctgggattacaggcatgtgccaccatgcccagctaattttgtatttttagtagagacgagatttctccatgttggtcaggctggtcttgaactcccgacctcaggtgatccgcctgccttggcctcccaaagtgctaggattacaggcatgagccaccgcgcccggccctccagatgtttctatttagttttttgtggcaaaagcactattgaacatggtttctgattctgtgggagag

SEQ ID NO: 41693 - DNA, 2389 bp, Homo sapiens
ggcaggtttttagacacctttttaaaatgtgctcgtgtttggtttgttttgcttactgtcagtcctgggtcaatcaaaggtttgtaagggtgagaatttttatgcactgctatatcgcaagtgcttaaaacagagactggcccagatgaggcattcttcaaatgtttgttgaaatgaatggacaaactcttaggataaatcctaatttgttggcaactgttatttgattttagaaggcaaactgattttattttagagaggggaaggggaggggaggctcattagcctcttggtagaaagaggactatttctgcaaatgaataggtttccaccttaagtagtgacagtccttaacttcttattatggagtgagtcttgaccgctttccaagttcaatagaagttcaagattgcctctcagtgattagggaaattgaagcttttaaagctcctggtctcagtaattcctcagaataaacctctttaaaagggatattgatggaaatgtacaattaccagtaattgaggttttatctgaggggatggagatgatgaaatggttccttcttggaagttgttggcattttggctttatttttcacaaataaagtgaaaccatttaaaacgattgacaacgattatatagtgccatgtggaatacaatagatattaatttgtggttggtttttctgcctgctttaaatgaaatgtattatgtttctgggttccttttttagctgtaaaaatacttcgtcactaaagcatgaaatttaatcagcagttgttcttcaagttcctgaaagctataaaagtttctcatgacttgagtggttttttccctgcccaccagaggagaaagcccttgtagaattctgcagtgttacaagtgttccctacaaaaactgaaaccatcagctcctctttaacaagttggctttttaaaagcacgtaattacaatttaatggtattctgtaaagtggtgctytaggcataatttaaattctttttaatgactatatttcttcaaaactttgaaagaaaaatgtgttctttttgctgcatcctttgtaagaagactgccaacagaggaaaaaggactttacaaattaagaccatcttggtttcatttccacaaagatgagaacaaatcatggtgttaggaaaggatccttagaagaacacaagaatttgaaagcccttggtggttatcactactatatttcatatttccacagaagtgacttagccaagctctgcattttgagcctgctgactttcatttaaaaggaatgaaaggctgaaaatccaggctgctgtgtctgtagataaaggtcaaaccatgtttgagttcttcactgttgtgtccacctaaataaaactgagtaagtaatgaaaaatgtcttaatatttcttgccttccctttagggagagtcatttcatggaagatgtaatgggagatgcattccaaaatgtcttgaggctcattgctgtctgctggaaacataaaattccataggcttcatgctgcttgctaaaatccagctggcagtgactaaagaaagagagtccttgattaagggcccacagattctggaatttctaaagcacaaatcacttgctttctgattgaggattgtttgcctgggcttgggaaaaaaagatcagcaaccatgtgctactaaacatgggttctcctgctcacctctctcaagaggaggactcctttgtacaatggttagtacagcttactattgtgggtaatcagagccatgtgaaattttagtgccattcctggcatatcacaaatatagtaaattctctctaagtgctagctttgactatcttgctcaccagctattcccagggtggcaaccccaggacccttggatgttgtattagttttctattgctccataacaaattaatgcaaacttagcagcttaaagcaatacacatatatcatcttgcagtttcctgggtcaggaatctggacacagctcagctaggtcctgtgctcagggattcacagtgctacagcctagttgtggaaggttgtattctcatctggaaggtcaactggggaaagagctgcttcaaagctgcctcaggttgttggcagaattcattttgcctaactcagaatcaactgatttgggaccttaatcacatctgctaaaaccctccacctttgccatattatcttggctagaatcaagtcacaggtcctgcccacactcttaagtgggagtcatggggctacactacactctgtcagcacagataacctaaatcctacccagtctgtctcagagacctgtagctttacccccttaacagtcttctgaggccggcctctgttcccagtggtgtcattcaggcccttgtctc

SEQ ID NO: 41694 - DNA, 2389 bp, Homo sapiens
ggcaggtttttagacacctttttaaaatgtgctcgtgtttggtttgttttgcttactgtcagtcctgggtcaatcaaaggtttgtaagggtgagaatttttatgcactgctatatcgcaagtgcttaaaacagagactggcccagatgaggcattcttcaaatgtttgttgaaatgaatggacaaactcttaggataaatcctaatttgttggcaactgttatttgattttagaaggcaaactgattttattttagagaggggaaggggaggggaggctcattagcctcttggtagaaagaggactatttctgcaaatgaataggtttccaccttaagtagtgacagtccttaacttcttattatggagtgagtcttgaccgctttccaagttcaatagaagttcaagattgcctctcagtgattagggaaattgaagcttttaaagctcctggtctcagtaattcctcagaataaacctctttaaaagggatattgatggaaatgtacaattaccagtaattgaggttttatctgaggggatggagatgatgaaatggttccttcttggaagttgttggcattttggctttatttttcacaaataaagtgaaaccatttaaaacgattgacaacgattatatagtgccatgtggaatacaatagatattaatttgtggttggtttttctgcctgctttaaatgaaatgtattatgtttctgggttccttttttagctgtaaaaatacttcgtcactaaagcatgaaatttaatcagcagttgttcttcaagttcctgaaagctataaaagtttctcatgacttgagtggttttttccctgcccaccagaggagaaagcccttgtagaattctgcagtgttacaagtgttccctacaaaaactgaaaccatcagctcctctttaacaagttggctttttaaaagcacgtaattacaatttaatggtattctgtaaagtggtgctttaggcataatttaaattctttttaatgactatatttcttcaaaactttgaaagaaaaatgtgttctttttgctgcatcctttgtaagaagactgccaacagaggaaaaaggactttacaaattaagaccatcttggtttcatttccacaaagatgagaacaaatcatggtgttaggaaaggatccttagaagaacacaagaatttgaaagcccttggtggttatcactactatatttcatatttccacagaagtgacttagccaagctctgcattttgagcctgctgactttcatttaaaaggaatgaaaggctgaaaatccaggctgctgtgtctgtagataaaggtcaaaccatgtttgagttcttcactgttgtgtccacctaaataaaactgagtaagtaatgaaaaatgtcttaatatttcttgccttccctttagggagagtcatttcatggaagatgtaatgggagatgcattccaaaatgtcttgaggctcattgctgtctgctggaaacataaaattccataggcttcatgctgcttgctaaaatccagctggcagtgactaaagaaagagagtccttgattaagggcccacagattctggaatttctaaagcacaaatcacttgctttctgattgaggattgtttgcctgggcttgggaaaaaaagatcagcaaccatgtgctactaaacatgggttctcctgctcacctctctcaagaggaggactcctttgtacaatggttagtacagcttactattgtgggtaatcagagccatgtgaaattttagtgccattcctggcatatcacaaatatagtaaattctctctaagtgctagctttgactatcttgctcaccagctattcccagggtggcaaccccaggacccttggatgttgtattagttttctattgctccataacaaattaatgcaaacttagcagcttaaagcaatacacatatatcatcttgcagtttcctgggtcaggaatctggacacagctcagctaggtcctgtgctcagggattcacagtgctacagcctagttgtggaaggttgtattctcatctggaaggtcaactggggaaagagctgcttcaaagctgcctcaggttgttggcagaattcattttgcctaactcagaatcaactgatttgggaccttaatcacatctgctaaaaccctccacctttgccatattatcttggctagaatcaagtcacaggtcctgcccacactcttaagtgggagtcatggggctacaytacactctgtcagcacagataacctaaatcctacccagtctgtctcagagacctgtagctttacccccttaacagtcttctgaggccggcctctgttcccagtggtgtcattcaggcccttgtctc

SEQ ID NO: 41695 - DNA, 1840 bp, Homo sapiens
aaagagtgcacagtggcttttacaagaatactaagaattatttatttgttaaggtaacactatctgctgtagtaggtaaccctctctacccccaaatctgagtagcttaccatattagaagtcttttcctgttctcatagggttccattggtgctgggggtgaggaggggaggtggtaaaggggtttgttccacacaaccattcagagattcatattgatgaagacggccatcttcaacatatagtttccagagttgttctgggctcagtatttagactccaggtggtatatcagaggagagaaggagagtagagaactgtgtggcagatttttatgaaccagatctagaagggacattcatcactgtcactgggatgctgttaattaaaactcgagcatacaaccattcctaagaataaaagaggcagtgggatgttgcttatttgtgagttcattggaaaatcactagcttgtttttgccacaaaatattttttatgttgttacccaatacccccccccactgagacacacacacacactcaacacaaatacaactagagcaaaaaattcattaaataatcctctgtgtgtgatatagtctcatagtttctattctattttattgttttaaagtgctgtcatgacccattaaactgttattatggctgaatgagttttgacttattgtttggaaaacactgccctaaggtataactgtttctcrtaatcttagacagtgagatattgctaatgaggaggaaaacttctcttttaaaatcattttcaaataattgccatttctaataaataattcgtaatcatccgtgggtagaatattaaaataaagttgttaagaaatggaatattaattaatagaaaaccaggaagacttcagtccaatatggacaagcaagatctgctggcaaacgaggaaaattgtgtagggatttgagacaggccaaataaatagcattacttttttcccatctgagtttggaaccactgagaaatagagaagaaaaagcagatgggcattcaaatactggctttattactgataaagttaataatgaaaaatatggcttcctaatcctaaacctcaaacagagcttacctgcccagccacaggcagtgctaagcaacttcaggcctcctgattgcagcctgcccctgaaaaacttacagtatgaaggagcaaacaggaatgatgagtagaccccccaaaataagaggccagtactgaccacactttgacagcccctcatcccataatcacaatttagatcactcctcctccccctaaggagtttgaatgcgagggtggggaagtgtgacggatgcctctcacaagaagccaagggagagaaagctctcccccataaacaccaccaggcagagatggcatgacagcaatgtcattatcaaatgaagcctatcaaagtgctattcacttttctctgctattttctagaaagacaatacatttgcaatttttagaccatcttaagcaaatggaacaatgatttttcaaaactcacatatctgattccataggcttttgtggttctatgctatttccgagaatgggacatgtcattccttcaggaagataagtagcgtacatgccacattccctcccctaacccaggtgctgtatttatgcctttctgttttagttatggtttaggatttttagtttagggtttctcataatctactggcttacaatgatatctcacagcttctactaacccaagcaattcttacgttggtatctgtgggcatcgagtttcttcttatctaactctgcctcttaatgttcccagcacagcgttttg

SEQ ID NO: 41696 - DNA, 1840 bp, Homo sapiens
aaagagtgcacagtggcttttacaagaatactaagaattatttatttgttaaggtaacactatctgctgtagtaggtaaccctctctacccccaaatctgagtagcttaccatattagaagtcttttcctgttctcatagggttccattggtgctgggggtgaggaggggaggtggtaaaggggtttgttccacacaaccattcagagattcatattgatgaagacggccatcttcaacatatagtttccagagttgttctgggctcagtatttagactccaggtggtatatcagaggagagaaggagagtagagaactgtgtggcagatttttatgaaccagatctagaagggacattcatcactgtcactgggatgctgttaattaaaactcgagcatacaaccattcctaagaataaaagaggcagtgggatgttgcttatttgtgagttcattggaaaatcactagcttgtttttgccacaaaatattttttatgttgttacccaatacccccccccactgagacacacacacacactcaacacaaatacaactagagcaaaaaattcattaaataatcctctgtgtgtgatatagtctcatagtttctattctattttattgttttaaagtgctgtcatgacccattaaactgttattatggctgaatgagttttgacttattgtttggaaaacactgccctaaggtataactgtttctcgtaatcttagacagtgagatattgctaatgaggaggaaaacttctcttttaaaatcattttcaaataattgccatttctaataaataattcgtaatcatccgtgggtagaatattaaaataaagttgttaagaaatggaatattaattaatagaaaaccaggaagacttcagtccaatatggacaagcaagatctgctggcaaacgaggaaaattgtgtagggatttgagacaggccaaataaatagcattacttttttcccatctgagtttggaaccactgagaaatagagaagaaaaagcagatgggcattcaaatactggctttattactgataaagttaataatgaaaaatatggcttcctaatcctaaacctcaaacagagcttacctgcccagccacaggcagtgctaagcaacttcaggcctcctgattgcagcctgcccctgaaaaacttacagtatgaaggagcaaacmggaatgatgagtagaccccccaaaataagaggccagtactgaccacactttgacagcccctcatcccataatcacaatttagatcactcctcctccccctaaggagtttgaatgcgagggtggggaagtgtgacggatgcctctcacaagaagccaagggagagaaagctctcccccataaacaccaccaggcagagatggcatgacagcaatgtcattatcaaatgaagcctatcaaagtgctattcacttttctctgctattttctagaaagacaatacatttgcaatttttagaccatcttaagcaaatggaacaatgatttttcaaaactcacatatctgattccataggcttttgtggttctatgctatttccgagaatgggacatgtcattccttcaggaagataagtagcgtacatgccacattccctcccctaacccaggtgctgtatttatgcctttctgttttagttatggtttaggatttttagtttagggtttctcataatctactggcttacaatgatatctcacagcttctactaacccaagcaattcttacgttggtatctgtgggcatcgagtttcttcttatctaactctgcctcttaatgttcccagcacagcgttttg

SEQ ID NO: 41697 - DNA, 1840 bp, Homo sapiens
aaagagtgcacagtggcttttacaagaatactaagaattatttatttgttaaggtaacactatctgctgtagtaggtaaccctctctacccccaaatctgagtagcttaccatattagaagtcttttcctgttctcatagggttccattggtgctgggggtgaggaggggaggtggtaaaggggtttgttccacacaaccattcagagattcatattgatgaagacggccatcttcaacatatagtttccagagttgttctgggctcagtatttagactccaggtggtatatcagaggagagaaggagagtagagaactgtgtggcagatttttatgaaccagatctagaagggacattcatcactgtcactgggatgctgttaattaaaactcgagcatacaaccattcctaagaataaaagaggcagtgggatgttgcttatttgtgagttcattggaaaatcactagcttgtttttgccacaaaatattttttatgttgttacccaatacccccccccactgagacacacacacacactcaacacaaatacaactagagcaaaaaattcattaaataatcctctgtgtgtgatatagtctcatagtttctattctattttattgttttaaagtgctgtcatgacccattaaactgttattatggctgaatgagttttgacttattgtttggaaaacactgccctaaggtataactgtttctcgtaatcttagacagtgagatattgctaatgaggaggaaaacttctcttttaaaatcattttcaaataattgccatttctaataaataattcgtaatcatccgtgggtagaatattaaaataaagttgttaagaaatggaatattaattaatagaaaaccaggaagacttcagtccaatatggacaagcaagatctgctggcaaacgaggaaaattgtgtagggatttgagacaggccaaataaatagcattacttttttcccatctgagtttggaaccactgagaaatagagaagaaaaagcagatgggcattcaaatactggctttattactgataaagttaataatgaaaaatatggcttcctaatcctaaacctcaaacagagcttacctgcccagccacaggcagtgctaagcaacttcaggcctcctgattgcagcctgcccctgaaaaacttacagtatgaaggagcaaacaggaatgatgagtagaccccccaaaataagaggccagtactgaccacactttgacagcccctcatcccataatcacaatttagatcactcctcctccccctaaggagtttgaatgcgagggtggggaagtgtgacggatgcctctcacaagaagccaagggagagaaagctctcccccataaacaccaccaggcagagatggcatgacagcaatgtcattatcaaatgaagcctatcaaagtgctattcacttttctctgctattttctagaaagacaayacatttgcaatttttagaccatcttaagcaaatggaacaatgatttttcaaaactcacatatctgattccataggcttttgtggttctatgctatttccgagaatgggacatgtcattccttcaggaagataagtagcgtacatgccacattccctcccctaacccaggtgctgtatttatgcctttctgttttagttatggtttaggatttttagtttagggtttctcataatctactggcttacaatgatatctcacagcttctactaacccaagcaattcttacgttggtatctgtgggcatcgagtttcttcttatctaactctgcctcttaatgttcccagcacagcgttttg

SEQ ID NO: 41698 - DNA, 1075 bp, Homo sapiens
tagttcaatagactcccacacatttgtcacctagtttcaataatccgcatctgctgctcttattttaccgaatatgctgctcttatttgccctaccatcacatttaaaaaaattgtatttgttgttcttatttattatttatttatttatttatttatttatttatttgttgctggggtattttaaagataattctagacataatatcgtttcactcatatgtatttcagtctaaatatcatacgtatttcagtctaaatatcatatgtatttcagtctaaatatctagttttattttttgaacataatcacaaaatcattatcaaggccttcaaacctcgacaattccccaatatcatcaatttgtgttcatttttcatgattgtcccaatcgtatcttttttaattgttggtttgtgcagttcagaatccrgacaagattctaggaatattgcctatgattaacatgttcttatatttcttttaacgcacaactgtttcctctctttggtgcatttattgaagagattgagaaatgggcctattgtcttgtagaatgattggatttgcctgattatatctttttagtgtcatttaatatgtttctctatccctacaaaaatcagtagttagaactagaggcctgattagattaaagttgatttggtggtgtggggtagagggatttcataggtggtattgcctcatattctagtcttctcatataaaggcatatcaaggatcgtgtatttatcccattttccttaatattaagattactccatgatttagtgttgtggtaggttgaaaaatggtcccccaaaccaaaagatatccacattttaatccccaaaatgtataaacattaacttatatggagaaaaggaggctgagtctttgtagttgtgactaaattaagggttttgagatgcagagattatcctgcatcatctggataccagatctgggactcagaggccattacctgtgtcctttgtgaaaggaaaatatcttgggccccttcaagctgggaaccacacagggcaaatctgcctcccattctactcaaagtcat

SEQ ID NO: 41699 - DNA, 1534 bp, Homo sapiens
aatatttaaactctaataatactcataatataatcttacagtcaaaagttttaaaaagttataaaatttaaacattttataggagttccccaatcatatttttttaattcacagaaatgagtaaacactgaaaaattccaatttgtagcatcctaataataattaggaaaactactctttattgcatgcatacacttcatctgtttattcatcacatattaattacgtatctgctatgtgccaggatctctagtacttactcctattaattattgaagaaactagttacattctggtggcagaaacttagtacattttagctctttttacttaaatggaaaagggttaaaagtggaacaggtttgttctggaaaacaaaatggttaatttcagctgtattcattttgtgatgccagtgaaacactctagtggaattgttgaatatgctgctacagcyaaatgaatctggagctccaaggagagagttctggatgaggcctaatatcttggaagttgttggtatgtgatgcctggcattatattgcctctagctttacatagtcttatgaaaaaggactggaattgtccctgctttatatgtggtaagactgatgattagtcagctacagcgtttaagatacatgcaggaagacatatactttactgacagaatctaggtttagatttgagtatctcttactacaaagcatctactattaattatttctatgaacagtctgaacctgaggactcagccttttagccagttggaaactggatcccaccccacaaaaggcaaggtagtcccttaaagaacaatcacaggtttaatgaaaatgacagatttgtaaaggaaggatagagagatcacagaagacactgcatgggccttggagttgaatagagtctaaaaaaatggagatatccattgtaaaataccagtcttacctttcatactggtggacttttggtacgtattaagtagggtctcgatagacttttgtccagccacatggttctttagcacattgtctagcaagatgagggctttgtcttcaatttcggcataatattttttcttttcctttctcttcaatatcagaactttttttcttcacaagttattcaaattgtcatgaagaataccatggcccccacacctccttctgttcatcctttcttctgatctgtcagtttttctacctcagctaatctaaaatacatgtcctgaatgagtaaaatttaactagtctccttgcattttcccgtaataattaaccaaatagtttacatttcactttttgttttcatttcaattgtttttttagattcagggatacacacgcaggtttgttaaaagggtatattatgtgatgctgaagtttggggtatgatttaacccatcacctaggtagtgagagtagcacccagtatatagtttttcagctcttgccctcctccttcactccttcctctagttgctccctgtgtctattatttccatctttatgtccatgagtgcctactatttagc

SEQ ID NO: 41700 - DNA, 658 bp, Homo sapiens
ccacagcaaggtaatggtacaaaaaaacagacacatagaccaatggaacagaatagagaacgccaaaataataccacacacctgtaaccaactgatatttaacaaagtcaacaacaacaaaaaagaaataacgaaaggattttttattcaataaatgtatttcttgtttaaactgtgctgagaaatcatgacggtgtcttctcctccacatctcctggtcatcctaccttttgattggagatcattcggaaggaatccccttactcccgggaaagctttccttcaactgcctaagattgcattaacagttaatttttacggaaggtgacaatttacttctgctttttgatactctctgagcaaagactgatcacagatatagtctcaggttgtagtagaatatgcatgatagtacagaaaagatatgcccagacagttartaaaaggccagaaataagggggtctgtaatgtgttcaactatgaagatttttaaaaggtcagatattcactttgatttataggttaaagattagaaaaggctcatatttgcaggagaaatggtagttcttcgaatcctccctaaatcttaacatccctgagtgaatgatttcaccccaaacttgttttatctgcaccatgcagggacttcactgcgca

SEQ ID NO: 41701 - DNA, 562 bp, Homo sapiens
tgtactgatgaaatatataggagtaattatttgtcctggggacagtgtaaattattttagaatattattaaacaggggcgttatttatagtcagatttataattaagaaagatggcttgcagaatggacagcaggttgaatggcatacaggaagccaaaattgcctgttacaattctttgccaagactcttaaaactaaggttggatagaattagaattcgtaactaggaatcaaagtaaaaatgaattgggttcaaataatatgagttctttttctgttagtctttcatttccaaacgacttctctttccctccattcatatatgtagctatcttccattggagataataataatcagtaatgtcacccaaagagaaaagaagaatttgacttaaaaggggaaaattagacttaaaatatattaaaaaaatactctcttatctgccttgaagggcaggcattttctgaaataaagacaagaatttagtgaaactattttcctttacccagaaggatccaccccgttccttktttccctaacatccagtgaaagaagtaaat

SEQ ID NO: 41702 - DNA, 632 bp, Homo sapiens
gttcatgcctataatcccagcactttgggagacggaggcgggcggatcacctgagttcaggagttcaagaccagcctgttgattcataatctgaatcaacatgaccacccacagcctattcattatcgtcactactctactattctttaaccaattcaacgccaacatggtaaagccccatctctcctaaaaatacaaaaatgagcctggcatggtggcgggcgcctgtaatcccagctgcttgggaggctgaggcagtagaattgcttgaacctgggaggcggaggttgcagcgagctgatatcacaccagtgcactccagcctgggcaacagagcgagactatgtctcaattaaaaaaaaaaaatatatatatatatgtaaatatatatgtgtaaatatatgtgtaaatatatatgtgtaaatatatatgtaaatatatatgtaaatatatatatatatatatatatatatgtatgtaatggttaaggccaggtatggtggctcatgtctgtaatcccaggaccgggacrtcaagacaggaggactgcatgaggccagcagtttgagaccagtctgggcaacatagcaagaccctgtctctacaaaaaaattttaaaattagccaggtat

SEQ ID NO: 41703 - DNA, 1938 bp, Homo sapiens
tttttttttgctaaagaaatttgttttttcacatttgtgagctccagataaagtatcatttagttcatttgactcattttgcagaacagcatctcatgaaacaatgaatacctgtattaagtatagtttaaaaattatccacattacattcctgttatttttattgtttttgttttgttttttttcgagacagggtctctctttgtcacccaggcttgagggcagcggcatgatcatagccatagctcactgtgcttgaactcctgggcacaagcaatcctcctgccttagcctcctgagtagctgggatgacaggcatgtgccaccacacccggctaatttttgtatattttgtagagatgaggtctcgctatgttgctcaggctacattccagttacttctatttagatcagatatataaactctttataaagatgggtcaaataacacacaaaattatacaatatacaaaaaattattatgcatttcttttgcattacgtatataaagttatcagcatttattgattttgtttagtcatctgttttaagcctgattataactcataactgtaagtgaatatgaagatgcttggccctccattaattcactcttctttttatccagttagcatattgttccttgttagtcattttctttaaaacacacacacacatacacagaaggtaacacagaagggaagtgccataacaggtttgaatagtcaatcacactttactcttcctgtttaccttccattcctctatctcacattaatgttattgttatgctcaatatcatattgttatgctcaatattgttatgctcaataatatctataggcctaaacatgaagaatatcagagaaaaactggttttaaatgctagtaatataacttttggtcagttctacagagtgctagtattttccgataacttctttaaagaaaaattttctctgtttttaggccgggcgcagtggctcacgcctgtaatcccagyactttgggaggccgaggcaggcagatcatgaggtcaggggattgagaccatcctggctaacatggtgaaaccccgtctctactaaaaatacaaaaaattagctggtcgtggtggcgggcacctgtagtcccagctacttgggaggctgaggcaagagaatggtgggaacctaggaggcggagcttgcagtgagctgagatcgcaccactgcactccagcttgggcgacagagcgagactccatctcaaaaaatccgtttttaaattttaaagttaaaaaggtcactaatgtaaagaagttaagaagttaacaaacaaggtcactagttgggcaggcctacaggtagtttttatatgaaaaaattcccccagtatgtctggagactaacatatattaacatgatttatttgttagcgtgctccaactactattgtaacagtaggctaaggcaaaggtccccaaaccccaggctgcagaccagtatagtccgtggcctgttagtaaccaggccgcacagcaggaggtgagtggcaatcaagcttacaaagctccgtctcctgtcagatcagcggtggcattagattctcataggaacgtgaaccttactgtgaactcagcatgtgagcaatctaggttacacactccttatgagaatctaactaatgcctgatgatccaaggtggaacagttccatcccaaaaccatgcccccagtccatggaaaaactgtcttccaggaaaccggtccctggtgctaaaaaggttgaggatctctgtgttaaggaattatttcatccattacttgaaagaacattaaaaagtagccaggtaggctgggtgcggtggctcatgcctgtaatcccagcactttgggaggccgaggtgcgtggatcacctcaagtcaggagtttgagaccagcctggccaactctacta

SEQ ID NO: 41704 - DNA, 573 bp, Homo sapiens
agcactttgagaggccgagctgggaggactgcttgagcccaggagttcaagatcagcctggacaacatagtaagacttcatctctccaaaaaaatgttttttttaattagccgggcacgtggtgtgcacctgtagtctcagctaatcgggagactggggtgggacagctttggtccagtagttcaaggctgcagtgggtggagaatggtaccactgtattccagcctgggcaacagagttagaccctgtttaaaaaaaaaaaaaaaattagaaattctggaacatacaaaaaggatgaaaaattttaaatcactcaaaaatctcagaaagataaggatatatttggatatatttaggtatgtgatggcggatcccagaaatgtgtttatctcaggccaggaagtgggtacatatgaaggaaagggctttggatacccagattggtgtacataagaccagtagggaaaagaaaagagaacagcaggtacttcaagctataaagactcttatcacgctagtgactgcattctggtctgggggaggcaatcggaaagrgctcttaaataaatgaag

SEQ ID NO: 41705 - DNA, 1226 bp, Homo sapiens
cttcattgactcaactttcatggcaataatcacctgcattagctgtttggcaaagtctaactcacattgtaatttattttgtcgtgtatattacttgcttccttatctctgaggctgagaaagagaagacgcttcctctgtgtttctgtccttgccctgtagctgtgttgagttgtgttgatattgcaagagcataacatttagtctgttatgagattctgcccttagaaatacctagggaagggatgcctgtaggcccaagcggagttgaaaattcaaaatgaaraagaacagcgttctcttcgggttcagatttgtagtaatatttattctcttttccataagtaagcctctaggtggcagtcgaaagcctagttgtgagagcgtgagtgtctcataaatgaagtcacaaaatctcaggctgaaaggagtttttctcatctaactaccaattcaaagctagaattccctccctgacataacaacaactatggcaatatttcttccatctcaggggctggtgatgagaaactcccttttttcgaagcactttttccatgtgtggtcagtttattagaatatcgttcttgattttatgtgaaaactgcttccttgtagcttctacctactccagaaagaaactaagtgtatctgggcctagggatgtgagaacagcagagtctgaagatctggagagcgtttgactggctcagagaagcctccttttcacttctattcttcccaagggcttctccccaagagcctggacttcgtttagccaaacccactttctctgatcaaaataacaaagaggccagggcaggcggttcatgcctgtaattccagcactttgggaggttgaggtgggctgatcatttgagcccagggattcaagaccagcctgggcaaaatggtgagaccctgccaataaaaaaaatttaaaaattagttggacatggtggcacatgcctgtagtcccagctactcaggtggctgaggtgggacgatggcttgagcccaggaggcagaggttgcagtgagccatgattgtgccactgcacttcagcctgagcaacagagcaagacctcatctcaaaaaaataaaaataaaataacaaagagagattaatactgcacttcctggtctcaaatgtattctttagaaatatataggacaaggccaggtgtggtgactcacgcctagcactttaagaggccaaagcagg

SEQ ID NO: 41706 - DNA, 1226 bp, Homo sapiens
cttcattgactcaactttcatggcaataatcacctgcattagctgtttggcaaagtctaactcacattgtaatttattttgtcgtgtatattacttgcttccttatctctgaggctgagaaagagaagacgcttcctctgtgtttctgtccttgccctgtagctgtgttgagttgtgttgatattgcaagagcataacatttagtctgttatgagattctgcccttagaaatacctagggaagggatgcctgtaggcccaagcggagttgaaaattcaaaatgaagaagaacagcgttctcttcgggttcagatttgtagtaatatttattctcttttccataagtaagcctctaggtggcagtcgaaagcctagttgtgagagcgtgagtgtctcataaatgaagtcacaaaatctcaggctgraaggagtttttctcatctaactaccaattcaaagctagaattccctccctgacataacaacaactatggcaatatttcttccatctcaggggctggtgatgagaaactcccttttttcgaagcactttttccatgtgtggtcagtttattagaatatcgttcttgattttatgtgaaaactgcttccttgtagcttctacctactccagaaagaaactaagtgtatctgggcctagggatgtgagaacagcagagtctgaagatctggagagcgtttgactggctcagagaagcctccttttcacttctattcttcccaagggcttctccccaagagcctggacttcgtttagccaaacccactttctctgatcaaaataacaaagaggccagggcaggcggttcatgcctgtaattccagcactttgggaggttgaggtgggctgatcatttgagcccagggattcaagaccagcctgggcaaaatggtgagaccctgccaataaaaaaaatttaaaaattagttggacatggtggcacatgcctgtagtcccagctactcaggtggctgaggtgggacgatggcttgagcccaggaggcagaggttgcagtgagccatgattgtgccactgcacttcagcctgagcaacagagcaagacctcatctcaaaaaaataaaaataaaataacaaagagagattaatactgcacttcctggtctcaaatgtattctttagaaatatataggacaaggccaggtgtggtgactcacgcctagcactttaagaggccaaagcagg

SEQ ID NO: 41707 - DNA, 1347 bp, Homo sapiens
atacaaaaagccatgaagtatctgaaagatgtcactttacagaaacagtgtgtaccattccaacgttacagtggtggagttggtaggtgtgcccaggccaagcagtggggctggacacaaggttggtgacccaagaagagtgctgaattttkgctgcacatgtttaaaaatgcagagagcaatgctgaacttaagggttgagatgtagactctctggtcattgagcatatccaagtggacaaagcatctaagatgtgttaccagacctacagagctcatggttagattaagccatacgtgagcattccctgccacatcgagatgatccttactgaaaaggaacaaattattcctaaaccaaaagaagaggttgcccagaagaaaaagatgtcccagaagaaactgaagaaacaaaaacttatggcacaggagtaaattcagcattaaaataaatgcagttaaggccaggcacagtggttcacgcccgtaatcccagcactttgggaggccgaggtgggtggatcacttgaggtcaggagtttgagaccagcctggccaacatggtgaaaccccttctctattaaaaattaaaaaattagctgggcgtggtggtgcgtgcctgtaatcccagctactcaggaggctgaggcaggagaatcgcttgaacctgggagacagaggttgcaacgagccgagatcgcgccactgcactccagccggagtgacagagtgagactctgtctcaagacaataaatgaataaatgcaattaaaagttttaaaaagtcccagatatcacataattttatcttttaaaaagcctttagtttatatcactaaagataaggcaatttttaaacatactacagtatcatcacatctaaaaatattagtaataattcctagataccatcaaataaacagaaagtctagctgtcatacctgtaccctcctctgttgcctccctctcccacagtaatattttttagttttgatttgtccttcaattatttttttatgtaagcaaataaatatagtaaatatttgttgttttttccttcacagagaagaggtaacccattatacacattttctgcatctggattgcacttaaaaattattctcacttgacaccaatacatagaaaactttgttctttttttcagctacatagtactccaacatgtgaaggtactttattcaaccattactctgttgatggacatttgggctattcccagttttttgctcttactagcagtgtcatcatgaaaagccttgtgtatatgaatttcttattttgagagcatctttggaatagattcctagaagtgggattgatgagtca

SEQ ID NO: 41708 - DNA, 626 bp, Homo sapiens
aaaaaaaaaaaaatagataaataataaaataaaataagagaatttccactttcacctatgaacaatgccggccttctccctagtgtgatcagcacccactatcccaaggtcctccctggcaggacactggcaccacccttgcccacaccaccactgcacctccagctctctccccatccttgcytggtgaatgcagcctgtagagctcagaactggccaggtgtgaaagccagatacccgtgcagtcctcacatcctgcacactaatgcagactgtgtccctttttctgaggaaggaaattaaaactgggggaaggacagagaattcccattccaggagcctgggagctctgataggacccaattgatattgactgagatgaaagtggccacatcacctgaggcttgtctgcctggattttccccccattaaccagaaaagaaaggaacctaaagccttgtgataagaaaattcattttctataaagcaggcttcttggaggagatatatcaggacgtgatgtgaatgctgacaccctgacacagtcctgtgtggcttaaccacggggctggttctgagagatgccgcgttaggcgatttcatcgtggtgagaacatcatagagtg

SEQ ID NO: 41709 - DNA, 813 bp, Homo sapiens
agaagcagcagcagtgctgtagcatggttggagctgaatacctcggagagtgagtggtagggaatgaggtcaaagaagtgacaagatctgggtcacaaaaaagcttgtaggttaatagaagtacattgaattttactgtgagcacagtgaagaaatactggagggttttaagacaaatattgccatcatctgacttatattttaaaagtatcactcttaaggctgctgagaataaacttcagagggcaaaggcataagcagagggacaaatcagaaagstatttcagtaattctggcaagaaatgatggcagttcagagcaatggaaactagagaactgctggcattctgtttgttttgatttgtaaaagattttgctaataaagtgaatgtagactacaaaagaaagagaggtataaaagagaactttattttatggcaagaaataggagatattgagtagggaagatagatatgtgattctggaattcaaggcagaagaatggatggagaaagaacttcatataaatgtacactaacccaagccattagaccttgatttttgagcagacatgggatacattacacaaatgaaacctgtatcttaaaaagaattgcagaaattacatctgtcttgataagaagaacacatgcacagttgtgagaggtgggagtgggagtttatggaaattgttttgcaattttttcttatttttttcaggttgtgaaattattctgtaattgtttattttgtttttttccagttgtgaaaatcagaatcattatatgagagtgagaatgagaaatgggagaa

SEQ ID NO: 41710 - DNA, 648 bp, Homo sapiens
ggtccctgaggatcctttaaaagacaggattctctttaaaagctctttaggccaggatcggtggctcayacctgtaatcccagcactttgagaggctgaggtgggcggatcattagatcaagagatcgaggccatcctggccaacatggtgaaaccccgtctctactaaaaatactaaaattagctgggcatggtggtgtgtgcctgtagtcccagctactcaggaggctgagacaggagaattgcttgaacccaggagatggaggttgcagtgagacgagatcacgccactgcactccagcctgggcaacagagcaagactctgtctcaaaaaaaaaaaaacctctttaaaaactgttttgtgcataactataataaaggtataattttccatttactttaaggtctcttatcttattaagctggatgtataccttaactggctcttcttaattcacagattaaggcctttcatgatctgcctctgtcaactaaccagcccctctttccccactttccaggctccttaagccttattcatcactatgccaaactaatcacatacttgttcttacctccacatatatatttgtgcatatgttctgtctactttatccagctgatcaactcttatttgcctttcaaaat

SEQ ID NO: 41711 - DNA, 655 bp, Homo sapiens
ctgttcccctgccaagcctagtacttttctagtcttcctgtctcagtgaatgacatcagcaagtcggaaacctgacagtcatccttgatacctccctttccctaacattccacagccatacttagttcaaacttcccttctttcttaattgactatcgtagtagcctcctcagtaatttccccatattcactcattcactttttcttttttttctttaagagacgaagtcttgctctattgcccaagctggagtgcagtggtgcgatcttggctcaccgcaacctctgcctcccaccaccacgcctggctaatttttcatttttagtagagacggggtttcgccatgttggccaggctggtctcgaactcctgacctcaggtgatccacccacctyggcctgccaacatgctgaatttacccatattcactcttgattccttgtaagtgtcttctctaaagtgatctttttttccttctttttttgagatggagtcttgctttgttgcccaggctggagtgtagtggtgcgatttcggctcacggcaagctctgcctcccaggttcatgccattatcctgcctcagcctcctgagtagctgggattacaggcacctgccaccacgccccactaattttttgtatttttagtagag

SEQ ID NO: 41712 - DNA, 655 bp, Homo sapiens
ctgttcccctgccaagcctagtacttttctagtcttcctgtctcagtgaatgacatcagcaagtcggaaacctgacagtcatccttgatacctccctttccctaacattccacagccatacttagttcaaacttcccttctttcttaattgactatcgtagtagcctcctcagtaatttccccatattcactcattcactttttcttttttttctttaagagacgaagtcttgctctattgcccaagctggagtgcagtggtgcgatcttggctcaccgcaacctctgcctcccaccaccacgcctggctaatttttcatttttagtagagacggggtttcgccatgttggccaggctggtctcgaactcctgacctcaggtgatccacccacctcggcctgccaacatgctgaatttacccatattcactcttgattccttgtaagtgtcttctctaaagtgatctttttttycttctttttttgagatggagtcttgctttgttgcccaggctggagtgtagtggtgcgatttcggctcacggcaagctctgcctcccaggttcatgccattatcctgcctcagcctcctgagtagctgggattacaggcacctgccaccacgccccactaattttttgtatttttagtagag

SEQ ID NO: 41713 - DNA, 993 bp, Homo sapiens
ctgacaatctggggactacaataatgatacatggcttttagtaaaatggatgtgacagtgttttccaaaatataaagcaaaacccagtggcgtgatcttgtggtctcaacaatgttgttattattgtagttttcttctagtcctccttcccttcttcctcctcctccttctattctttttcttctattcctcttggtctcctcctcttctccttattcttcaaggtacaaacagtttcataacttgtgtatctgccggtcctggaatcatcaaatatttgggctacgtgcaatacctgcatcttcctatgggaggcagaccttcctaatccatagacatttctttttcagaaaagcgggtttttttgtttttgttttttggggttttgttgctgttgttgttgttgttttgagacagagtctcactctattgcccaggctggagtgcagtggtgcgatcttggctcactgcagcctccgcctcccgggttccagaaattctcctgcctcagcctcctgggtagctgggattacaggcatgcgccaggacacctggctaatttttgtatttttagtagagacagggtttcaccattttggccaggctggtctcgaacttctgacctcaggagatccacctcactcagcctcccaaagtgctgggattacaggygtgagccaccatgcccagccccgaaaagtgctttaagttttggggaaaacattaatatctaacctctactgaaagcttcttgttattcttgttaagaattacaacactaagttaattcaactttacaaatgtattttacaatatatttataatttaatttgtgcttagttctttgttagccttttacggttttctgtccactgactgagaggatgctgtgagtgagtggagtaactgactgcttgggcaggcagtgctaggcagtgggtggcaatggggttgggtgatgatgagatttaggtgataagatttgggcaggtg

SEQ ID NO: 41714 - DNA, 993 bp, Homo sapiens
ctgacaatctggggactacaataatgatacatggcttttagtaaaatggatgtgacagtgttttccaaaatataaagcaaaacccagtggcgtgatcttgtggtctcaacaatgttgttattattgtagttttcttctagtcctccttcccttcttcctcctcctccttctattctttttcttctattcctcttggtctcctcctcttctccttattcttcaaggtacaaacagtttcataacttgtgtatctgccggtcctggaatcatcaaatatttgggctacgtgcaatacctgcatcttcctatgggaggcagaccttcctaatccatagacatttctttttcagaaaagcgggtttttttgtttttgttttttggggttttgttgctgttgttgttgttgttttgagacagagtctcactctattgcccaggctggagtgcagtggtgcgatcttggctcactgcagcctccgcctcccgggttccagaaattctcctgcctcagcctcctgggtagctgggattacaggcatgcgccaggacacctggctaatttttgtatttttagtagagacagggtttcaccattttggccaggctggtctcgaacttctgacctcaggagatccacctcactcagcctcccaaagtgctgggattacaggtgtgagccaccatgcccagccccgaaaagtgctttaagttttggggaaaacattaatatctaacctctactgaaagcttcttgttattcttgttaagaattacaacactaagttaattcaactttacaaatktattttacaatatatttataatttaatttgtgcttagttctttgttagccttttacggttttctgtccactgactgagaggatgctgtgagtgagtggagtaactgactgcttgggcaggcagtgctaggcagtgggtggcaatggggttgggtgatgatgagatttaggtgataagatttgggcaggtg

SEQ ID NO: 41715 - DNA, 993 bp, Homo sapiens
ctgacaatctggggactacaataatgatacatggcttttagtaaaatggatgtgacagtgttttccaaaatataaagcaaaacccagtggcgtgatcttgtggtctcaacaatgttgttattattgtagttttcttctagtcctccttcccttcttcctcctcctccttctattctttttcttctattcctcttggtctcctcctcttctccttattcttcaaggtacaaacagtttcataacttgtgtatctgccggtcctggaatcatcaaatatttgggctacgtgcaatacctgcatcttcctatgggaggcagaccttcctaatccatagacatttctttttcagaaaagcgggtttttttgtttttgttttttggggttttgttgctgttgttgttgttgttttgagacagagtctcactctattgcccaggctggagtgcagtggtgcgatcttggctcactgcagcctccgcctcccgggttccagaaattctcctgcctcagcctcctgggtagctgggattacaggcatgcgccaggacacctggctaatttttgtatttttagtagagacagggtttcaccattttggccaggctggtctcgaacttctgacctcaggagatccacctcactcagcctcccaaagtgctgggattacaggtgtgagccaccatgcccagccccgaaaagtgctttaagttttggggaaaacattaatatctaacctctactgaaagcttcttgttattcttgttaagaattacaacactaagttaattcaactttacaaatgtattttacaatatatttataatttaatttgtgcttagttctttgttagccttttacggttttctrtccactgactgagaggatgctgtgagtgagtggagtaactgactgcttgggcaggcagtgctaggcagtgggtggcaatggggttgggtgatgatgagatttaggtgataagatttgggcaggtg

SEQ ID NO: 41716 - DNA, 1625 bp, Homo sapiens
gcctgccttggccttccaaagtgctaggattacaggtgtgagctaccacrcccagctggctatgttcatttttaaggcaactttaaaaaagtactagttggctgaaaagctgattgatgctggcaccccctcctgggcagacacagaaagtcccaggggcacagccacagcaatgggcagccagcagggatgggcaggggctctaagccctccctggccaaggacaaggctagtgctttccccttgaacagtctggggctgggtggaggctgggacccagagggaagccccacacccatcaccccaacctggctcccagtagactcccacctttaggcacagtgtccaatagcttccccctcttcctgtactggttactatcgatttctccttggcttctgagcctaactggaggagcactctcgcctagaaatctggctccaaggtaataccatcctcccaaagacggagagaaggggtcccgggaacgggtaagatggagtggacatactccacctctctctcccactgaatgcagctacaaaacctggacagaatgcaaggagcggctacttgaggcctctgaaaactaaagaggagcaggcagatagggaagaagaccagacttggaagcaccagccaaccagcagtgagttctccattgtttttctccagcctaactcaacacagcctggaactccaaaggagtcactggggcacggacagaaagaattccaggacaagccctctagtcctgactcaagcagcagaaagggagtatctaatgctcagagaaggcagaaatcccatttttgtttgttctcttttcttctttgccttgtgccccagcccacaagcagtcctatggcaaccaggggcagcagcagttgaagaaaagctgccaagtcaaaattcgagggaggagctgtgatcccaaaagtgtgggccaaaccctgtgtgttgctcttctgtctgtccccctgccaggcgaccctggacagagaaagctgccaagtcaaaactcagaggaggagctgtgatcccaaaagtgtggccaaatcctatgtgttgttctttccctgtccccctggcaggtggccctggacacagtcgtagaagcacacaaagcagaacaaggtaactgaagccccagcttcctggctggaggacagaaaagggagccccagaggagatcgggaaaatgatgctgcaggttattgacgaacgcccaggctcagctctaagctgcagatgctaggatctgatcctaattaccacaccgaaggctgagaactaaactaacagaccacctgccaagtcccaggctgactgctgactggcacacacccgggaaaagtccaaacagcactgccatcttcaaaatcgggactaacattggaaccagagtccacagaaggcagatgggaacctgcagcctaaacctaaccaggtcaattgctactaaattgcaatgctgagaaaatatcaacattgtccatagatttaaacaagacccagagactcatagcagaatgttcaggatgcagtccaaaatgactccgtagccccctggtctcctaactatggactgtccccacccactagatgctttgtgcagggacctg

SEQ ID NO: 41717 - DNA, 1625 bp, Homo sapiens
gcctgccttggccttccaaagtgctaggattacaggtgtgagctaccacacccagctggctatgttcatttttaaggcaactttaaaaaagtactagttggctgaaaagctgattgatgctggcaccccctcctgggcagacacagaaagtcccaggggcacagccacagcaatgggcagccagcagggatgggcaggggctctaagccctccctggccaaggacaaggctagtgctttccccttgaacagtctggggctgggtggaggctgggacccagagggaagccccacacccatcaccccaacctggctcccagtagactcccacctttaggcacagtgtccaatagcttccccctcttcctgtactggttactatcgatttctccttggcttctgagcctaactggaggagcactctcgcctagaaatctggctccaaggtaataccatcctcccaaagacggagagaaggggtcccgggaacgggtaagatggagtggacatactccacctctctctcccactgaatgcagctacaaaacctggacagaatgcaaggagcggctacttgaggcctctgaaaactaaagaggagcaggcagatagggaagaagaccagacttggaagcaccagccaaccagcagtgagttctccattgtttttctccagcctaactcaacacagcctggaactccaaaggagtcactggggcacggacagaaagaattccaggacaagccctctagtcctgactcaagcagcagaaagggagtatctaatgctcagagaaggcagaaatcccatttttgtttgttctcttttcttctttgccttgtgccccagcccacaagcagtcctatggcaaccaggggcagcagcagttgaagaaaagctgccaagtcaaaattcgagggaggagctgtgatcccaaaagtgtgggccaaaccctgtgtgttgctcttctgtctgtccccctgccaggcgaccctggacagagaaagctgccaagtcaaaactcagaggaggagctgtgatcccaaaagtgtggccaaatcctatgtgttgttctttccctgtccccctggcaggtggccctggacacagtcgtagaagcacacaaagcagaacaaggtaactgaagccccagcttcctggctggaggacagaaaagggagccccagaggagatcgggaaaatgatgctgcaggttattgacgaacgcccaggctcagctctaagctgcagatgctaggatctgatcctaattaccacaccgaaggctgagaactaaactaacagaccacctgccaagtcccaggctgactgctgactggcacacacccgggaaaagtccaaacagcactgccatcttcaaaatcgggactaacattggaaccagagtccacagaaggcagatgggaacctgcagcctaaacctaaccaggtcaattgctactaaattgcaatgctgagaaaatatcaacattgtccatagatttaaacaagacccagagactcatagcagaatgttcaggatgcagtccaaaatgactccgtagccccctggtctcctaactatggactgtccccacccactagatgcyttgtgcagggacctg

SEQ ID NO: 41718 - DNA, 652 bp, Homo sapiens
tggaatttaattaaatcttattaaatccattgtatcacattaaatctcaagttgcattcattaaaatggtagttctctggacttttggatttcacagagtagcaaaatttgcaaatacgtttaagcattgagttaattttattaagtaaatatgtatgggtttttttttaacacctatctcttattatcctactattataaaagacatttaaactcaaaaagaagagggcatgcaatctcagaatacgtcaaagtgacacaaataaattcctttatgaggccaggcacggtggttcacacctgtaatcccagcactttgggaggccgaggcgggcggatcacctgacgtcaggaattagagaccagcctggccaacatggtgaaaccctatcaatactaaaaatacaaaaattagctaggcatggtggtgggcacccataatcccagctactcaggaggctgaggcaggagaatcacttgaacccaggaggtagagtttgcagtgagccaagattgcaccactgcactccagcctgggcgacaagagtgaaactccatctcaaaaaaaaaaaawttccttttatgaaaaactcattgcattgttcttatttttctcgtattgtacaaatcagtaaaatccttgtcagccact

SEQ ID NO: 41719 - DNA, 563 bp, Homo sapiens
ataatactagtacacattttgtagggttattacaggatttagtgatttaaaacatttacgccaatgcttgtgataaatcctcaataaatggtaattattctcattgtagttagctgaggtgatacatgtaaagcttttagcacagtggcaggctcacagtgagaacacaataaatatgagacaatcattttctacactaacccttattaagaagtgcaagccgaagaagccagagtcagagaaataaagcagagaaggagggagaacaaatacaagagagttcattaccaagcaagccatagttgcctggcaagttgattactcagtctctgtatcagtctrttctcacactgctataaagatactacctgagactgggtaatttataaagaaaggaggtttatttgactcacagttttgcttggctggggtggcctcaggaaagttacaattatggtggaaggtgaaggggaagcaaggcacatcttacataacagcaggagagagagagaatgaggaaacgccacactttaaaactatcagctctcataagaactcactca

SEQ ID NO: 41720 - DNA, 595 bp, Homo sapiens
ttgcccaggttggagtccactgacacgaacccagctcactgcagcctcaacctcctgggctcaagcaatcctcccaactcagcctcccaagaagctgggattacaggcacataccacctcacccagctaatgtttgaattttttgcagagacagtgtcccactatgtttcccagtttattttcaaatgcctgggctcaagcaatcctccaactcagcctcctgaaatgctgggattacaggagtaagccaccacgcccagcctaccaattcttcaaacaaattaattcaacaaataattattgcctttctactgtgtgacaagcctggtgctaggtgtggggttagagtggggagcaagatggagatgatgctgcattatcagagtttattatctagaaattaggtaagcatttaaagggtgataagtgttaacatgaagaatggtagcaggaatggataagtgtactggccagcatcctscccacacatcccctcacctctgataagtttctttcttactaagcagaaaggaaagcctgcacactcacaaatgtgggaatatttaaaatgaaaaccttgcaagatgatagtgca

SEQ ID NO: 41721 - DNA, 1161 bp, Homo sapiens
gagaagcaagagcctgttcctgagccccaccctcacttcaatcctctgtggcaggagaacctattaatccaccagctgagtctatcaaaatagtatcataaattgatttaagtgaatatatgtcagtatcttttattcattcggcaagtatacaccaagtgtctacaaagtggtagatgctctgctaagccctcaagttacaaacacataatccttccttggaagagttcatagactagttaaaaacagatgaaataaataattataatgtgataaattcaacattaagatatggggcatattacagttgtgtgtcaggggtctctaacacaacttgggaattcaaataaatctacatgaattaagtagttcaagaaactcytttaattgcatttgaaaattttaattgagtatgttggttgagtactagccagtgagtagaagtgggagatagaaaaccttttgattcctagttattagcatagctagtcagactgacactcaaatttaaaaaaaaatagaatacatttcttatttctctagaatcagcttttgatactaaatagctccaccatgcagtgtgagattttagaaaattcaattaacctttctaagactcattttccctatctctaaaatgaggggtcacaataccttacaaagattttttgaggattaaatgaaataaaacatttaaatgtggtggagtcagaactcaacccagtctaaaatcaagactcttgacaataatgactgctgcctactctatcagtcttactacataataaaataatcttgatttaaaaactaaaaaggtcattaatggagaacctcttcttcatcaatataacaatataattcctgttatattgaattaaaaaaactaaggtgagatcatcgtcccctatagtttcatcaggacatcatctttatctcctatagcagggcatccataagttgcagtatatggagactgattgaatgagaggttatatttgactgagaaatcaatgaccaggaagagggcaccaaggtcacagagactgtattaccctgaccaatcttgctcccttggaaaacctgagtcttccatcatatcacacctgccaattccccagtagtcttaattatggacacagctatttgtcttcaaatatcaca

SEQ ID NO: 41722 - DNA, 504 bp, Homo sapiens
gcctttcaccttccaccatgattgtgaggcctccccagccacgtgaaactgtaagttcaataaacaatttcttttgtaaaatgcccagtctcaggtatctctttatcagcagcatgaaaacagacttgtacagatgtaggttgtgaaaaagggacacaactgttttttaaagatagatgtccagttttcccaatataacttattgaacaatccattttttcccacttaatcaaattgccaactatattataaactaaattcctttatgtgtcttgtctattttcagaatctatagtctttaactttgatatatcttaatttttattttagttattaaaaytttgtatgatgtcttaataaatggtaagcctggatctctctcattattgttctttttataaattttccttgctattattgctcattaatttttcatttaaatttaaaaatcagattttcttgcataaaatttttgttatttttatttaaaatttttagtataaa

SEQ ID NO: 41723 - DNA, 703 bp, Homo sapiens
gagaactgctctataaaaccataaaatattactcctataaatatttttgaatattctctttgtgcccttgcagttgaaatactcccttcacctcacaaaaacacaggttttatttctatcaccatagactttttagaatttgtgtttactttctttgggtcaaaatagtgtctgtggattttatctatcgtgctttatgtgtcagaaatttacttattttcaatttctaactattattcaattatataaatagatcatagtgtaacctaacccaggtttggttgcttgccacttgagaataaagctctggagagacaagagttgttgggaggaaaagcgagtctatttggaaagccagcaaaccaagatgatggtagaytatcatcctaaagtacaatgttaagtcaacataaatgttaggctatttttaggttaagggcagggggaagagaaaggggttgagatcaagagctaacccatgacctcagacatctgggcatgagcaaggacctgaggaggttgggaatttcttggttaggtcccagtgctcctataaatctttaacaaaagagttgtttacatgttttacacactttccctttaatcccagagttagttttaaaaactgtgattgtctttttgcatattatctcagtgctctaaaattaccctagcccacatgtaggcatggctagaggcttct

SEQ ID NO: 41724 - DNA, 1620 bp, Homo sapiens
catagaatagtgcctgacatacagtgtttgaaaagtctttcctatcattattattatatatagcttgagagtattaagtagaggacagggaaatcatgtgaaacataagaaccgaaaaggagattcagaaggtcaggcctatcaatcaaacaatgagattcagtcatgtgttaataacaggaagtcagtccctagacagtgagacaactgggttaagtgccaaagaactcacatgggtttgtgatcagtaaataaggtaacatattaaagcaccaacacaatgcctggctcatagaagatatgcaaaaatttacctatttttttcatcatcttcatcaaattttcaggaagcccttgggaataagaggacgtttactctctgtttatacaacatgagtccataaagcacaagaataytccttctaccctgaaatagcacataacaaagtactctgaggttctactttcagaaagcttttgacattcttgtctataactggaaagcacaaatatgtttttgctcagcaatcatacactgtaatttggcattctgtggtatggccccatgacagtcatttgcagtgtaaattcgagtcacatcccagcaattttgctatcactcttactgtaaagtcaccttgcaggttttctctatgaggctgtatttttcaaatttattgctaagctgatttgttttccatttgcttattgatgaattttgctttaaccagagtatttgttcagtggttagtaataagaccaggaaatctttacaaggcaaaccttatgagccagcaaggataacagataaaactgatggggatccagctctcattgttcattctgcagcttctattccaggcacttatcaatttattccactgataagaatggctagctaaaaacaaagtcatggagagtgaaaaaccatacatctgtgtccattatttattcatgcacaagtcacatgaatgaaaaatgttaactattaacaccaggagagcaatcttttatgataattgtgccattgctttctttaccattcaccctcacagagcgctacatgcaacaaacaaaatgggagtttggtaacaagttattagtggcttctcctccaaagcataagtttagggaccagagcaaatattttctgacttctcaggcctatatagttggaaggaaatatacacacagtataattcagttcaaactagtctacatatacaaatgtgttctgtatacaaagttgcatgaatatgtttccatggtttatattctaggttttaaaggttgtataccattctaaagtgatacaatattaagaaaatatataaaatagaaaaaaatattaaaatgcttattgttttacatctcaccaaaatatactcactgttaatattttagtgtattttaagtgctttttttaatgtctgaggtttggttcacacacacatttatatatacagttgagtcttgaacaatgtgaaggttaggggcaccaactcagtgcagagatgaaatccatgtataattttttactttaaaaaacttaaccactaatagcctagtgttgactggaagccttactgataacataaacagtcaatttacatatattat

SEQ ID NO: 41725 - DNA, 533 bp, Homo sapiens
ttttagtagagagggagttttgccacattggccaggctggtcttgaactcctggcctcaagcaatccgcccacctcggcctcccaaagtgctgggatttcaggcatgagccacyacacccggccgtgttttctttattagattgaactgatgaggcaaaagacgtcctcctgccctcagtaaaagccactcttcacttcttttcaccactaatataaataatctctggtgataacctttaatccttgagcttgggtaagaaagtttgatatcactcttctatccagcagaacttcagtttctcagacttttctgctacttagaaaaatcaccgccctcagcagcctcccttgggcaacccagccacgcccaccaccaccaccacctgagcctctgacacctggctcagctgaggccagaatcattctcaccatggtcatgtaggtggcctctgatttttcacttggttcttcttcctcgatcacctcccgtacaattattggggagtaaatgtgtttctagagggggaaaatg

SEQ ID NO: 41726 - DNA, 533 bp, Homo sapiens
ttttagtagagagggagttttgccacattggccaggctggtcttgaactcctggcctcaagcaatccgcccacctcggcctcccaaagtgctgggatttcaggcatgagccaccacacccggccgtgttttctttattagattgaactgatgaggcaaaagacgtcctcctgmcctcagtaaaagccactcttcacttcttttcaccactaatataaataatctctggtgataacctttaatccttgagcttgggtaagaaagtttgatatcactcttctatccagcagaacttcagtttctcagacttttctgctacttagaaaaatcaccgccctcagcagcctcccttgggcaacccagccacgcccaccaccaccaccacctgagcctctgacacctggctcagctgaggccagaatcattctcaccatggtcatgtaggtggcctctgatttttcacttggttcttcttcctcgatcacctcccgtacaattattggggagtaaatgtgtttctagagggggaaaatg

SEQ ID NO: 41727 - DNA, 533 bp, Homo sapiens
ttttagtagagagggagttttgccacattggccaggctggtcttgaactcctggcctcaagcaatccgcccacctcggcctcccaaagtgctgggatttcaggcatgagccaccacacccggccgtgttttctttattagattgaactgatgaggcaaaagacgtcctcctgccctcagtaaaagccactcttcacttcttttcaccactaatataaataatctctggtgataacctttaatccttgagcttgggtaagaaagtttgatatcactcttctatccagcagaacttcagtttctcagacttttctgctacttagaaaaatcaccgccctcagcagcctcccttgggcaacccagccacgcccaccaccaccaccacctgagcctctgacacctggctcrgctgaggccagaatcattctcaccatggtcatgtaggtggcctctgatttttcacttggttcttcttcctcgatcacctcccgtacaattattggggagtaaatgtgtttctagagggggaaaatg

SEQ ID NO: 41728 - DNA, 552 bp, Homo sapiens
ttattggtaggaatgcaaactagtacagccactatggagaacagtatgtgtgtagtcctgttaagtaagcaacaatgaggaggggtcccagctggggaggacccaggtgaggaagaacaatgaacaactgttctgagacatagctaatcaaacaacctgagggcacaatgacttctatgggcacaatgacttctttcacaggtagccccctccagcaccaccctataaaacttcccttcagcccctgcctctttgcagacagtgccttctctgctgtgctgcccattacaaccttgcaacatgttttcataccttctctaataaatctgcctttctttcctatgactgtcttggtaaatacatttgctgccggtgacatcggccctagctagtcactacccrcaacattttggtgatccaaaaggggattgcttggggacctctcccctactctgtcccttgcctctccaactccactatctcagtgaacagcatccaagtttggagacagctgaaggtcctggccagggctgctccctgtggaccagaagg

SEQ ID NO: 41729 - DNA, 532 bp, Homo sapiens
tactgaaagtgtaatatgaagccatggcaacattttgaaacacatgagaaatattttggttttataacttgaactgcgtggaaaggttggtaaagggaaagactacaagaaaatccatctattcagaccatccagatagagggtgtaacagctctatggatgtggcatgataatttgttggaatgtggggttggaggggcggtacagatagaggaagattgaaacttttgctatgtatgtgtatatatatactatctcctgcctcacctgagattatgagctcagtgaagaccagggtcttttataattcatcttatacagacagagcccagcttagacatgacacataataggtgatcagtaaatagacttgcatgtgtgtgtgtgtgtgtgtgtgtgtgtatgtgtgtaaaacagaataaatatttttctgtatctctattgcagaataaataattctctttagwatggcatttgagatgcaataaagtatggctcaaagctatattttcaaccaacatttctcccacca

SEQ ID NO: 41730 - DNA, 450 bp, Homo sapiens
tttttccatttattaataaaatatgataattctagctaagatttatgatcagcctaagatagccagcttttccacaatgatttggcataataattattaaaaaactcaatgtcttattcattcagctttatatcaggattacatttctatgatgcttagaaaattacaaagtcttaaaaatgagtgtttccctgtaataccagcactttgggaggccgaggcaggcggatcatgaggtcaggagatcaagatcatcctggctaacacagtgaaactctgtctctactaaaaatacaaaaaattagccgggtgtggtggtgggcacctgtagttccagctactcaggaggctgaggcaggagaatggcgtgaaccagggaagcagagcttgcagtgagccgagatagcgccactgtactccagcctgggtgacagagtgagacttmgtctc

SEQ ID NO: 41731 - DNA, 505 bp, Homo sapiens
aacagcagtgacctgctgtgtttctgctctgtgatattatctgagagacctgatggttggttccctgagamaggaactcaggtaagacaaaggaaactttctcaagttttaagactgagaggatcaatttctatgcttattcaaagaaacaacatcagctttacgggacattgggccggtttcacaagtccagaatggggttgtttgcttgcaaatttcactccaatcttgcttgaggctaagccctgagtacagcataacctactcccatcaatacttactccactgtagatattgtctaagatgaaaagaaagaccagctgtaaggaatacagttttcaggttaggttagacttcaggagaaaccctaaacccagcatttactagatgtataaactcaggcaagttatttttcttctataagtctctttgcaagtaaaatggagctcgtgatcaatattccatagaatttctatatatgataataaatacactatagcggaag

SEQ ID NO: 41732 - DNA, 505 bp, Homo sapiens
aacagcagtgacctgctgtgtttctgctctgtgatattatctgagagacctgatggttggttccctgagaaaggaactcaggtaagacaaaggaaactttctcaagttttaagactgagaggatcaatttctatgcttattcaaagaaacaacatcagctttacgggacattgggccggtttcacaagtccagaatggggttgtttgcttgcaaatttcactccaatcttgcttgaggctaagccctgagtacagcataacctactcccatcaatacttactccactgtagatattgtctaagaygaaaagaaagaccagctgtaaggaatacagttttcaggttaggttagacttcaggagaaaccctaaacccagcatttactagatgtataaactcaggcaagttatttttcttctataagtctctttgcaagtaaaatggagctcgtgatcaatattccatagaatttctatatatgataataaatacactatagcggaag

SEQ ID NO: 41733 - DNA, 530 bp, Homo sapiens
tggcttcaggtcttagatttaactctttgatccatcttgagttgattttaatataagatgtggctttcaggccacaaccctcccaatctaccagcaaagctgaggcacccaagtcctgtgctagtcactgcagcacacttcccactagcttcacattttgccacaatatcttgattcaggtctataataaactagatgcaaattctggcaattttgcttatttccaagaaaagttttacttagtaattaaagaggactggcaaggccacagagagagaaaacagcctgtctacaacttttcctttttcttttttctttcctcaaatttctttacatttgtttcttattctcttcctctccacttgatcttaggaactacagaaataaaatatctataatggaagatggattctcctttccctaaaawctttggcatcaatgtactcccaggaactggtgagagaagagagacagaccctcttatattgttttatattgttttatactcatagaagaaaagaaaagtgaaa

SEQ ID NO: 41734 - DNA, 557 bp, Homo sapiens
attgcaaaatcatattcaaaaaactaaggaaccaataaagaatatgggaatatctgggatttgagtgagatttaggcattccatgtgttttggattcaaagctgaagccataactcagtttagtcctcatttgctaattaccttagaaatggtattgaaatgtgccttgatttcattgcttaaaatatgcatggataatattatgtatatgtacctcatagtgaggataagatcagataaaataacattcttagaacaacggctgctatgtaatgggtgttgtacamatggtagttcttatttgtgcagcctaacaatgatgaaaaaaattgaccaatatgaaagtaagaaaattccaggagggtacagtgtgagtaacttggtcaaagtgtagtctattacgcatgtttgaggaggatgtccaagagtgaattgattctagagtgcattaggatatgtagaaagacgtaagtaggaagaaaaatagtgactatcttggatggaatctgtgtgttaggcgaggcaacctcaattatatttaatatttggaagtgaac

SEQ ID NO: 41735 - DNA, 557 bp, Homo sapiens
attgcaaaatcatattcaaaaaactaaggaaccaataaagaatatgggaatatctgggatttgagtgagatttaggcattccatgtgttttggattcaaagctgaagccataactcagtttagtcctcatttgctaattaccttagaaatggtattgaaatgtgccttgatttcattgcttaaaatatgcatggataatattatgtatatgtacctcatagtgaggataagatcagataaaataacattcttagaacaacggctgctatgtaatgggtgttgtacacatggtagttcttatttgtgcagcctaacaatgatgaaaaaaattgaccaatatgaaagtaagaaaattccaggagggtacagtgtgagtaacttggtcaaagtgtagtctattacgcatgtttgaggaggatgtccaagagtgaattgattctagagtgcattaggatatgtagaaagacgtaagtaggaagaaaaatagtgactatcttggatggaatctgtgtgttaggcraggcaacctcaattatatttaatatttggaagtgaac

SEQ ID NO: 41736 - DNA, 613 bp, Homo sapiens
tgaaaactattgataaaaattgaaaatattamagaagatgattatctttatgcctactatgtgccattcaccattctacaggcttcatacaggtaaaatacctataatcatgtttggctttcctcctactaccagtactagctgtgataattcagcatcaaagtatttgacctctgctagggctcagtatacaacttctctagtcatttattagtgcttactgcacacagagaccaataagaacaaaattgggaggtgggttggttacatgagcttctgagccataaaaggttggctcctagcattcttgttaattattttatattctctggccctcgtttgtcatatttgtttttcttataatacagatatttttataagtagacttagtgactaatggaattacctttctaaaggacagcaagccacacacctatgcccatttatctattgtttccaaggagttggcatcattttatattaaattgctaattgttattaattaccttgacatttctgggaagcacattaatcttagcagagtcattttgtatttcagtgggagcatcacttgcctcccatcagaagaaatttctttcttgagggctattca

SEQ ID NO: 41737 - DNA, 1070 bp, Homo sapiens
taggtattagatctcaagggaagaatacaagttgatggcagttccacaaagaaggaatgagaatcatgcttggagtccattagatcattgatacatatctcagtacttccatatccacaaatagtggcacatgaaaaagtgcagtcctatgaagaatgccacaaggaactgtaagcttgagacaattaaggttatcccaccagattaaatagctctagcagctaagttctgacagaaggccaaaggaatggaaaaaagtaagtggaatgatgatccatgattatcagcctaatttttgtgaccagctacagaggcagggacaatcacagtgggttattggcttaaaccattttctctactctaaccgtatcctcacacacaactttctctctgactcctttctctctttctctctstctctcttttactcttcctttcctttccttttttcttctttctttctttctctctttctttcttctcactctttcacccagacttgagtgcagtgattcaatcataactcactgcagcctgaatttcctggcttaaaggaatcctcctgccttggcctctcaaggtgctgggattacaggtgtcagccaccattcttggctcagctttcttatatgtagagcacagacggtggctagtttcataatgagatttcaatgatatcactgaatatcactgaagtgaacaccctgcagtgacacagtgactaacatgactgttttctctttgtggtaacatagattgtatgtatgtttctcacttaaagaaagacactggtagtggtgggtggcaaaattgataccagatctattctttgctattcaaaagactgcttttacttttgtaggctcaggagaggcaagaacagagattttaggctattgatttccctcaccttctccctgacagatcatgggacagtagtgccttgatagggacagtggctgtgttgctctaccaatgaccacggtttccctcagatgattaaactctcctggccacaacttccagaaagtcttctcccttccactgtccttttggtcatccacttgagt

SEQ ID NO: 41738 - DNA, 1070 bp, Homo sapiens
taggtattagatctcaagggaagaatacaagttgatggcagttccacaaagaaggaatgagaatcatgcttggagtccattagatcattgatacatatctcagtacttccatatccacaaatagtggcacatgaaaaagtgcagtcctatgaagaatgccacaaggaactgtaagcttgagacaattaaggttatcccaccagattaaatagctctagcagctaagttctgacagaaggccaaaggaatggaaaaaagtaagtggaatgatgatccatgattatcagcctaatttttgtgaccagctacagaggcagggacaatcacagtgggttattggcttaaaccattttctctactctaaccgtatcctcacacacaactttctctctgactcctttctctctttctctctgtctctcttttactcttcctttcctttccttttttcttctttctttctttctctctttctttcttctcactctttcacccagacttgagtgcagtgattcaatcataactcactgcagcctgaatttcctggcttaaaggaatcctcctgccttggcctctcaaggtgctgggattacaggtgtcagccaccattcttggctcagctttcttatatgtagagcacagacggtggctagtttcataatgagatttcaatgatatcactgaatatcactgaagtgaacaccctgcagtgacacagtgactaacatgactgttttctctttgtggtaacatagattgtatgtatgtttctcacttaaagaaagacaytggtagtggtgggtggcaaaattgataccagatctattctttgctattcaaaagactgcttttacttttgtaggctcaggagaggcaagaacagagattttaggctattgatttccctcaccttctccctgacagatcatgggacagtagtgccttgatagggacagtggctgtgttgctctaccaatgaccacggtttccctcagatgattaaactctcctggccacaacttccagaaagtcttctcccttccactgtccttttggtcatccacttgagt

SEQ ID NO: 41739 - DNA, 613 bp, Homo sapiens
gatgagaaatagtgtaaagaaatgaactaagcataatgctcaaaaagattgcctttaaaaaagaagcactagggaaattatgaataattaaataattcagataaaggtaaaaccaagcaaaaagtttgtaaaaaggaaaatagtgaggttgtcttaaaaatccaaaaatttattctaaagacattaataaccaaaaccmaaaccaaaaaaaaaattcagtcttcccttccactccaacttcaagtcatttgtctctgcatttgcaaagaggccactggcaaccatagacaaataatatagcttatgtgcagtttatatgaggctttgctgtgctttttgtaaaaataggtggtccaaggtttctattccttacaacaaggcaaatgatagaaaattagcatcaggcagcaaatcatgaaatgaaattgtacttcaaaaacctgtgaactcccaaaggatgaaaattcatcatcagacttgcacgactttgccaggtcattctgaaacccaaaagaaaagaaagagctgaaggagcactttgagtctcactgcccttcagggaaagagaatgcagagcctggacagcagaaatcagaggatctgcagcaggggc

SEQ ID NO: 41740 - DNA, 613 bp, Homo sapiens
gatgagaaatagtgtaaagaaatgaactaagcataatgctcaaaaagattgcctttaaaaaagaagcactagggaaattatgaataattaaataattcagataaaggtaaaaccaagcaaaaagtttgtaaaaaggaaaatagtgaggttgtcttaaaaatccaaaaatttattctaaagacattaataaccaaaacccaaacmaaaaaaaaaattcagtcttcccttccactccaacttcaagtcatttgtctctgcatttgcaaagaggccactggcaaccatagacaaataatatagcttatgtgcagtttatatgaggctttgctgtgctttttgtaaaaataggtggtccaaggtttctattccttacaacaaggcaaatgatagaaaattagcatcaggcagcaaatcatgaaatgaaattgtacttcaaaaacctgtgaactcccaaaggatgaaaattcatcatcagacttgcacgactttgccaggtcattctgaaacccaaaagaaaagaaagagctgaaggagcactttgagtctcactgcccttcagggaaagagaatgcagagcctggacagcagaaatcagaggatctgcagcaggggc

SEQ ID NO: 41741 - DNA, 635 bp, Homo sapiens
attcttagaatatactaatgctggataagcatgtgctagatgagaatttaaatgagtttttaggaacacaagtatgaatatgaaggtttccaaaaataccttcactcacagccccttgtaaaaaaaaatgtctaaaattgcaccattagcgatacagacctcagatttctagaaggactgccagccattgggaattcccatcaaaatacacttcagaacctcaaaccaatattactgaagacctcagcaggaagtaattgctatgggtaagcagccaaggttctgcagaaataagagaagggtggagaagtgggagaaatagggaagtgagttgtgctgaatggtccctggaaggcttcacacacaggagacgtttgagtccaattctcgactttcctttggccaaaagtatgtgaagttagaaatctaatgctatttctacattctaaaacattcccagaaacaatgtttgttttatgtttttgtttccctgkttttctactatgattgaaagggagggagggcagcctcccaccaacctctcctggagctgtggactcctctgggctttgtgctctgcaggcaggcaatctgcacctgccccctgcattctggcttcattcagacatctgggc

SEQ ID NO: 41742 - DNA, 1153 bp, Homo sapiens
tgtgagtaggctgggcctcccctgggcagggttctccaagggcccggtttcccggcccttacctttcctgatgccctgacatcatcattcttgtgggagacagcagcctgtatgtggtgtggggcgtggatcgagtgtagctgtgaaatccatatatatgaaatgtcctgcgggatacagtcttagctgacttttttttactctgaactcttatttgaattgttttttgtgcatatatttctgctaccacagagattgtactatacaaataaaaaaatwaaaacccaacctcaagctgtcacccttggatgtgtcctgaatctcaggcagggctcctggtacctgaaggagcccacggagggctccatctgcacccactcagccccttagcttagcagtgctccgctgctctcagctggcatcccagcagcatgtggccccatcatcagccctcctccacctcctcctcttcttccccagcacactctggtttccctgcttctagcccagaagcgaagagccctggaggacgttggagactgggagcagtgctggtgcctggggatgctgagcggctgggcaggagggaggcttttgctgttcagccttctagagagttacagttttaagcaggtgaagccaaactgaatgaagcagtaaaggtgttgcgctcctgcacaggagctccagtggcttctcactcaccgtcttcctgtgcccaggccactgctggcctcactcagccctcgcctctgcctggtccacacgagctcgcttgcagtctcctcgcagagatacatgtggagccgatcttccaatactgggctccttcactttgccccactgtcagctcagtcacagtctcaggccttcctattctacccaggacactgccattccctaaaccaccctgggcccggccctggcccatcgtttctctccatgcagcttaactttcctggagcccctggtggtctctacatcaggccataagctcacgtggacaaggatgggctcgggcctgtgctgttcagtgcccagtcctccacgcaggtgacccaccccatccctatgtctccctatgtccatgccccagaggtgcccaccccagtgccttatgtgccattctcttggcaaactggacttctctagc

SEQ ID NO: 41743 - DNA, 761 bp, Homo sapiens
cccagcactttgggaggctgaggcaggtggatcacctgaggtcaggagtttgagaccagcctggctaacatggtggaaccccgtccctaccaaaaaatacagaaattagccaggtgtggtggtgggcacttataatcccagctactcgggaggttgaggtaggagaatcgcttgaacccaggaggcagaagttgcagtgagcccagactgcaccactgccctccaacctgggcgacagagtgagaccttgtctcaaaaaaaagataaaaaagtgacttgtcggaagtcacacgataaggaggtgggccgaggatcggaacccagccctgccctgctggaaactcttcaaggcctgaacagtcctcggtaccacattcctttccccagcttcaaggccctcctggaactgtcccccagcctgccgcgtgaccttgggcagatgatgtgacctgacctccgtcttctcacctatgaagtgggttgggggcggttggtcttgggaattaggggagcccgtacatgccaagggcaccccagagcccggcacttagccggcgctcataagagctcatcccacgacctgtgaaccccctaacaggcccactcctttggatcactgactgcagttccagggacccaacccagcaccttccccaccttcccagtgatctccgaccctaactaggccggtggcgcagagcgggcggcgcatgcgccctgagagccggctccccrctgcacctgaaggacacggaggccgc

SEQ ID NO: 41744 - DNA, 1245 bp, Homo sapiens
tgcatgggagggaaagaaatctgctgaagaagtggggctgaagaccaagccttgacaagctttgtaccacactaatgtgtattcgaaagtttccttacagacaaatgtatgtttagaaaatttgtaattaaaaactcaaatatatagaaaatttgaaatcagtgtaagattgaaccatagaaaactactgtttttaggtcaaaatggtctaatattgacaatttcctatggttcaacctaaatataagaaagactcctgtatcttcatgtagattgagcaattgctaatattttgccatatttgcttcatctttcttcttgcaatattttaaagttaattacacccactatggcatctctttcataaatatttaatatatacctttacaaattatatatgtttctacagaaacacaatatggtcctcatgcttaatataatcaacaaacattcctttacatcacccaatactcagctgacagatattcaaatttctccagttttttaaaacatgtattttacacctgatttattcaaacttggatcctatcaagaaccatatattgcacgtggttgctatatttcttacataaaagatgtctttaaaagagtagttgcaggcaaagccattcgggctatgttttacctataaaattatgaccttaatatattctaagtgaaaaaataatttgtgtggttcatggattcatttctgtaataagaatcatatatagtcaaagtctgctcatatttttagttaggtaaactgaggtatggaacggttacttgctttgctatagctcacacagtttgtcattaatatgtcaccattttataagtcctttacagtcaaartaaagccacaaccaccaacaaagcaacaacacaggtatatattactgagttacagttttctacacatctccagagtgtggctaatgctggtgaggagcacaccaccccttaacaagagtgatgtggcctcggaacaggtgtgccacacagcaagtggctgacagcttatcttgcaaaaggaagtctgtccagctgctaggaaaatgcaggaaacaccatgtcccctgtctactctgtcctcaggatcatagaaatgggctgtaagaaaccctgctaggggcagcctacttgcagtcagttgctgtgctccaaactcaactcatgacctcctgaccagggtggtgacggctgtgcagttgaatcatgagttgtataagtcaattaaatgca

SEQ ID NO: 41745 - DNA, 1245 bp, Homo sapiens
tgcatgggagggaaagaaatctgctgaagaagtggggctgaagaccaagccttgacaagctttgtaccacactaatgtgtattcgaaagtttccttacagacaaatgtatgtttagaaaatttgtaattaaaaactcaaatatatagaaaatttgaaatcagtgtaagattgaaccatagaaaactactgtttttaggtcaaaatggtctaatattgacaatttcctatggttcaacctaaatataagaaagactcctgtatcttcatgtagattgagcaattgctaatattttgccatatttgcttcatctttcttcttgcaatattttaaagttaattacacccactatggcatctctttcataaatatttaatatatacctttacaaattatatatgtttctacagaaacacaatatggtcctcatgcttaatataatcaacaaacattcctttacatcacccaatactcagctgacagatattcaaatttctccagttttttaaaacatgtattttacacctgatttattcaaacttggatcctatcaagaaccatatattgcacgtggttgctatatttcttacataaaagatgtctttaaaagagtagttgcaggcaaagccattcgggctatgttttacctataaaattatgaccttaatatattctaagtgaaaaaataatttgtgtggttcatggattcatttctgtaataagaatcatatatagtcaaagtctgctcatatttttagttaggtaaactgaggtatggaacggttacttgctttgctatagctcacacagtttgtcattaatatgtcaccattttataagtcctttacagtcaaagtaaagccacaaccaccaacaaagcaacaacacaggtatatattactgagttacagttttctacacatctccagagtgtggctaatgctggtgaggagcacaccaccccttracaagagtgatgtggcctcggaacaggtgtgccacacagcaagtggctgacagcttatcttgcaaaaggaagtctgtccagctgctaggaaaatgcaggaaacaccatgtcccctgtctactctgtcctcaggatcatagaaatgggctgtaagaaaccctgctaggggcagcctacttgcagtcagttgctgtgctccaaactcaactcatgacctcctgaccagggtggtgacggctgtgcagttgaatcatgagttgtataagtcaattaaatgca

SEQ ID NO: 41746 - DNA, 1056 bp, Homo sapiens
ctgtacggctctagagccctgggtttcagggtagtaaagtccttactggactttgacctcatccacagtcttgtttctgttcttagttgccacagggcttcaagaggagggctaatgtgagtaataagtaaacaagacgtcgtcagtgagtacaatctgtaacataattacaagtattaaaatctcatatttttattatccgaaacattccctaaaggagaagttctcccaggaactttggaaatttaatgcgagatttctagacctgtgacattatcaaccacgaggcatgagaatctatggtggctctccatgtaaataccgatggcacggcttcctgttatttccatctcttaattcctgatatgagcagattcttacctgtttgctcctgaatttagccctgaggacaatcttttcttcttagctatcagaacaagaacactggagttgattatctttctaagctcagatagaagcagagtccaaatctataacagtctttttcatcaatgaggaatatgagtgtgatggtgatggcaggaaggtaaaagaaggaaaatatcccagaaatagatttggaaaaatatcttgtgtctccctatttctgctttctagagacagtgatgccctagcagtattgaaaacagctagcaccttgatcttggttcctaaataccatccactactcaagagaactaggttttcttggagacaggcttgacttcaggactggaaagagaaggcagaagtgcgtctaaaatgttctgtcatgccagagmgaaagaaaatgtgcaaaaaataatgagcacacatcaaaatagcacagggccagcttgatgggacactatctggccaaatctaggacaaatgaaatcaaaacaaataacataaattgattataatctgttgaatagaataaaatgtcatggtcccatgcttataatttaaaaaaaaaaaaactaaataaatgttgtaaaggggaaagttcttccttacataaatatgtcaactaataactatataaggaatgatggcatcagggaaaaaaagcca

SEQ ID NO: 41747 - DNA, 530 bp, Homo sapiens
tactgagaatgtattacatgatctcctctcctttgcttacccccaactccactctcctaccttaggtgttagatcaatctaaagttaagtcactagaatttggatcttgtgatatttcactgactatacaggtctgattattttataaggaacaaagttgtagcgttttatctagacataaagctagttyttttttagtcacctagaggttctacccatgaacctccatgaaaaatttacattaagatgagtctaaatatattatccatagaaagaatctaaggttatatctgttgggataaaatgactaatgctgaaccttgagatgaattaaaacaagaacagattaactagggccaatcaaagagtctgtctatagcaaaacactgaatagttaggttgatattatatggaaagcttttgtttggttctctcatattttcaattggtcagtgtcagagaaagaattgccagttgtcctttctttaagacaaggtggactcatcctcaggaaaaaagggcaacattta

SEQ ID NO: 41748 - DNA, 1078 bp, Homo sapiens
aatggcccaaccttmctaatgtaacttatctgaaacacctaagtttcatttaagtttatttcttatttatttagagacagagtcttgctctgtcgcccaggccagagtgcagtggcacgatctcagctcactgaaacctccccctcctgggttcaagtgactctcctgcctcagcctcccaagtagctgggactataggcgtgtgtcaccatgcccagctaatttttgtactaatatatatatagatatgtatatatctatatctatatattttttttgagatggagttttactctttcgcccaggctggagggaagtggagcgaactcagctcactgcaacctctgccttcctggttcaagagactctcttgccccagcctccctagtagctgggattacaggcacgtgtcaccacacctggctaagttttgtatttttagtagagacggggtttcaccctgttggccaagctggtctcgaactcctgaccttaggtgatccacccaccttggcttcccgaagtgctatgattacaggtgtgagccactgcgcctggcctaaattttgtatttttagtagagacaggatttcaccatgttggtaaagctggtttcaaattcctgacctcaagtgatcggcaaagtatcccaaagtattgggaggcaaaggcaagtattacaggcatgagccacttacccagccaatttctaatttatttttactgatacataataattgtacatatttatggagaacatgcgatattttgctccctgaatgctatgtgtaatgattacatcagagtactaggatatcgatcacctcaaacatgtgtcaattctttttgttgggaaccttttgaatcttctattttgaagtacacaataaattattaactatagtcaccctgatgtgctactgaatactataacttattccttctatcaaagtgtatgcttgtgtgctcattaaccaacctctcttcatttatttttattgttgcctaacataatgaaattatttccagtgagaagcaacaagggttcagaggaatgttttcttttcttctgtaaatc

SEQ ID NO: 41749 - DNA, 537 bp, Homo sapiens
tagctctgttgctcaggctggagtgcagtggctctatctcagctcactggaacctccacctcccaggtttaagaggttctcgtgcctcagcctctggaatagctgggactacaggcatgcgccgccacacctggctaatttttgtatttttggtagaggcaggctttcaccatgtgggccaggctggtctcaaactcctggcctaaagtgatccacccgccttggcctcccaaagcgctaggattacaggcatgagccaccgtgcctggcctcctttgcttttaaaaaccttgaaattaattgctcttgtccccagtatttarcttctctcattttcattattgagatataatttatgtgtcataaaattccctttaaaaatgtacaattagtggctgggtgtggtggctcatgcctgtaatcccagcactttgggaggctgaggtgggtggatcagaggtcaggagatggagaccatcctggctaacacggtgaaaccccgtctctactaaaaaacaaaaaattggccgggcgcgg

SEQ ID NO: 41750 - DNA, 580 bp, Homo sapiens
aacattatgttgtacattttaaatatatgcaatatctgtttgtcaagtatacctaaayaaagttggaaaaagagagttcaatatccagaaacgttatcttttaagaattagggaacaagcagatacagaatgacattctaaggtaggaattagtctcagagagatttgtggtcaataccagaatgaaggttggacaaagatactggcaaatacgtgggtaactttgaaacaacattgtgtaaaacaataataattcctacgtttgtaaggaggaaaagaataaaaacaaaatgctgaactagaaaagcttatacattgatagaagagtgatcatagttaatgcattttatgactcttgtttcgttggagaggacagtaaaatatattgactctcctttgaatttaagttaagaatgcattttaaataggaattcagccacgttggaggattattgacattttcttaaacggttaaatatacatctaccctatgacccaataactttattactagatatttatctaaaagaaataaaaatcttggatttgaaagaaagagcatttaacctgtttatagcag

SEQ ID NO: 41751 - DNA, 507 bp, Homo sapiens
tatgaaagagaattactgaataaatgagtgagatagttcctttgggctccaacattctatggctctttgaaataataagctgctatattaagaaccataaaatgaaactagttggctttacacagtatccccattaatagaaagataaggacaacagtggtttaatgtattgagtccttactaaatgccatgcagtgagttaatactttctatgaattgcctcatttaatacctacaatgactccaggtactgctaatgttatcctgatctgacagatgagaacagtgaaactaagaaattagacaaatacccaaccagtgagtggcagtgagctgcagttcaaagtcaaggctatttgacaccaaagcccatagttctttaaaaagaaagaaaaattaaaaataaggtgatgctgatarcttgtagttctctcagtctattctaaggcttcacaaaggccacctcggtatttaatagaacaaagactatctgagccagtaggaacc

SEQ ID NO: 41752 - DNA, 1183 bp, Homo sapiens
aagctcaagtgaaatggaaatgaaagaacatgggatttgcagttagccttggatttacatccttactagcactgtaaccttgggtaagtaaattaaattctctgagtctttgttttcatgtctgtaaattagggacattaacacctagggttggtatgacaactaactgagctaagggtatgtgaaacatctaccttggtgtgcaaactccataaatgttaaatgtttgagttagtctaaactgagtctaaatttcttctttgccgcatrctagctaagaaatgttaggctagctctttaaagtctcccagccccaatttcttcccttgtaaaataggtataatagtacttacatcacagggttggtgtgaggatgaaattgactcatgtatgtacactgcagctcaaatgtcttctcacaaaggcctttcttgcccaccccctactagcccagcataagtcaccattttcctcactgcgtttattattatctgaagttgtctagttttttattatccatgaggggcatgaaccttgtttgtcttgtttatcgcaccgtcaccagtttctagaatagtgccttacccatagaaaatgcttaataaatatctgtaaatgaatttatataaaagatgttcttaatagtgacagctattattagatattttctcaactctggcttgtcctgaatattttttaaaaatagattttaattagactctgcctcagaaagaactcaagtgaaatattttttaatatgccctatattttctatatatttgagatttataaaagtaccctatcagataggaattattgtaatggggaaaacaaactagtttaaaattttaaaatataaataggctgggcatggtggctcaagcctttaatcccagcacttcaggaggccaaaatgggaggattgcttgagccctactgatgaaggtgccctatatatataaagccctagatgtaaggggcaccttcatcagtaaggaacaggactgtaagacatctataaaggaaagaatgaggtaggcctctatatggatgactatccataatacagtaatgtaagtgggggaaaaagttatagaatacatatagcactgacctatttatgtaaaatggttataagtatataaacgtatatctatatgtgtaagtgtgtatatatttgcag

SEQ ID NO: 41753 - DNA, 996 bp, Homo sapiens
gatccagatggcggggattgctgttgagaatatgacatagatgtgagtgttgtgtaagggtgcttgcaggtacgtcatgagagtggaatggaaagaggagaaatcaaaggttggaaaccactaagtttggtcataaattagtccttgaggaggcatagaatgagcaaaggatcatcgtagccacatctgagagagccaagcaaagggaagccaagcagtgcagtcctttcttcactagtgtctttatattggcagcacgtccattcagtccaccttgtaggcaagcataaagaaaccctttagccgaagagttccctattttttcttattttctaaatttcttattaaaaaaaaatttgctatcacatagttctgtatagttccagtggataataaatcactcgttctcaaattgaatcacattcaaagttcactactcctactattctaaaaagaggcgccaccttggtagcagcccacatgtgtaagtatgttcttgkttcaaactgtgaatccctttgctgtgaattctgctggtttatgtaccctgaagccatttatgagccagtctgtgcgtgcaggaccttctttgtttttgtttttctgagaggaagtttcactcttgtcacccaggctggagtacaatcgtgcgattttggctcactgcaaactctgcctcccaggttcaagtgattctcctgcctcagcctccccagtagctgggattacaggcacgtaccaccgtgcccgactaatttttgtatttttagtagagacagggtttcaccatattggccaggttggtctcgaactcctgacctcaggtgcagagccttctattcttggtggtttgatatttttggaatgttgtgatgcattcttgctcctctctcaataaaaactgaacttatggtaacttacttgcttagctgggcggaaggaatggcagttgccctggcaacctgaggcatgtagaaagcgacagatttctctgca

SEQ ID NO: 41754 - DNA, 1831 bp, Homo sapiens
atagtgaaagtcgcatgcatctttatgattatgtacacagatttcataagttgtaaatgataacatgttcagatgctacatacctgcaggatggatgcattttccccatgatctgattaaaaggacaaagatctgtgtgattattagactcatacagatcttctgcctggacttttcccttgggaagactgaactggaatttaatatttaaactttaaaatgcaaactttactttgtaaatctttgtgaaatgtctgtcaattagtgacatttacttaaaattagagcaatcttcttgacccacttcagaggaaaattaagagtgacatcaagtgactgcagttctccttagtaaacagctatgtgagatggtaaggctgagaatctttgaggacatctgaagcatgctgagctggtgaagatctcaaaggggaagtgggataaggtcacagcctgtgagctgtgacccattttaaaacatccccatttcagagatttgaaaactctggtagcttacctaattttttcaatgtcatatgagattgtcagaggcagtgttttattaggtttcttgcttcttaactatttctctatatttctctccaaaatgtagaaaactatgaaattctaactgaaggtagtttattaatgtcacctattgttcatagcattgaaaagcacagttccatatgaatatagtgatcaattttacaacattcaacacacatttaaagaacagcaactgtataatatcactttgtgcagtgctgtgaagatatagaaacactgccatggccatctaggagttcaggatctagtagaaagggcagataaaacgtaaatacaggggatgacagctataaatgttgtaagtacaaacagtatgttctgataatattctcagggagaataaggtaaaagattttccccattcccatcttggtttgctgttgatcaatataatattaaaactgcaactacctctgatatattcattccagaaattttgctagttcatttctgcaactataaaatatcaaagttcacatgaatttttataagaatattttgtccatatttttctacctgacttctggttctcagccatagaaatgtgctgccagaataggttgtatagcttccaaaactgatggaaaattatcaaaaattaacaaattacaaacatggtttatcccatctaagataaatgaaaccagaatgcatgaacatggctggttctcaaaacagcatctataaattctcaataaaaagttcccaattagattacagatgacgtactttgtaattccttacatttctcctgattttatgttcaacataaagaaatcaatcatgacatccccatctagaggcaaaccaaaatgtaattttgtataaaaacgttaatctttgtagttagtacaaatgctataaattttctgttataatatcatagttcattttatgttaaaatggagaaaaatcatctgtgtggaaaaattaaattttacctcaaatgatagttaacattgagatgcatcaagactactaagaaacaaggatatccttacattcaaaatggtaaagttgatacattgatacacattggatattttaatwcatttatatatatatataacattgatactcaatataaccatcaaggtaatctgaaagtaatatcactgttgtataactggaatgtgacaattatagtgataatttactatgtatgctgttagtgaaaaagatgataagaattttactttcatagtgtgggaattgaacaatgagatcacatggacacaggaatgggaatatcacactctgg

SEQ ID NO: 41755 - DNA, 1831 bp, Homo sapiens
atagtgaaagtcgcatgcatctttatgattatgtacacagatttcataagttgtaaatgataacatgttcagatgctacatacctgcaggatggatgcattttccccatgatctgattaaaaggacaaagatctgtgtgattattagactcatacagatcttctgcctggacttttcccttgggaagactgaactggaatttaatatttaaactttaaaatgcaaactttactttgtaaatctttgtgaaatgtctgtcaattagtgacatttacttaaaattagagcaatcttcttgacccacttcagaggaaaattaagagtgacatcaagtgactgcagttctccttagtaaacagctatgtgagatggtaaggctgagaatctttgaggacatctgaagcatgctgagctggtgaagatctcaaaggggaagtgggataaggtcacagcctgtgagctgtgacccattttaaaacatccccatttcagagatttgaaaactctggtagcttacctaattttttcaatgtcatatgagattgtcagaggcagtgttttattaggtttcttgcttcttaactatttctctatatttctctccaaaatgtagaaaactatgaaattctaactgaaggtagtttattaatgtcacctattgttcatagcattgaaaagcacagttccatatgaatatagtgatcaattttacaacattcaacacacatttaaagaacagcaactgtataatatcactttgtgcagtgctgtgaagatatagaaacactgccatggccatctaggagttcaggatctagtagaaagggcagataaaacgtaaatacaggggatgacagctataaatgttgtaagtacaaacagtatgttctgataatattctcagggagaataaggtaaaagattttccccattcccatcttggtttgctgttgatcaatataatattaaaactgcaactacctctgatatattcattccagaaattttgctagttcatttctgcaactataaaatatcaaagttcacatgaatttttataagaatattttgtccatatttttctacctgacttctggttctcagccatagaaatgtgctgccagaataggttgtatagcttccaaaactgatggaaaattatcaaaaattaacaaattacaaacatggtttatcccatctaagataaatgaaaccagaatgcatgaacatggctggttctcaaaacagcatctataaattctcaataaaaagttcccaattagattacagatgacgtactttgtaattccttacatttctcctgattttatgttcaacataaagaaatcaatcatgacatccccatctagaggcaaaccaaaatgtaattttgtataaaaacgttaatctttgtagttagtacaaatgctataaattttctgttataatatcatagttcattttatgttaaaatggagaaaaatcatctgtgtggaaaaattaaattttacctcaaatgatagttaacattgagatgcatcaagactactaagaaacaaggatatccttacattcaaaatggtaaagttgatacattgatacacattggatattttaatacatttatatatatatataacattgatactcaatataaccatcaaggtaatctgaaagtaatatcactgttgkataactggaatgtgacaattatagtgataatttactatgtatgctgttagtgaaaaagatgataagaattttactttcatagtgtgggaattgaacaatgagatcacatggacacaggaatgggaatatcacactctgg

SEQ ID NO: 41756 - DNA, 1831 bp, Homo sapiens
atagtgaaagtcgcatgcatctttatgattatgtacacagatttcataagttgtaaatgataacatgttcagatgctacatacctgcaggatggatgcattttccccatgatctgattaaaaggacaaagatctgtgtgattattagactcatacagatcttctgcctggacttttcccttgggaagactgaactggaatttaatatttaaactttaaaatgcaaactttactttgtaaatctttgtgaaatgtctgtcaattagtgacatttacttaaaattagagcaatcttcttgacccacttcagaggaaaattaagagtgacatcaagtgactgcagttctccttagtaaacagctatgtgagatggtaaggctgagaatctttgaggacatctgaagcatgctgagctggtgaagatctcaaaggggaagtgggataaggtcacagcctgtgagctgtgacccattttaaaacatccccatttcagagatttgaaaactctggtagcttacctaattttttcaatgtcatatgagattgtcagaggcagtgttttattaggtttcttgcttcttaactatttctctatatttctctccaaaatgtagaaaactatgaaattctaactgaaggtagtttattaatgtcacctattgttcatagcattgaaaagcacagttccatatgaatatagtgatcaattttacaacattcaacacacatttaaagaacagcaactgtataatatcactttgtgcagtgctgtgaagatatagaaacactgccatggccatctaggagttcaggatctagtagaaagggcagataaaacgtaaatacaggggatgacagctataaatgttgtaagtacaaacagtatgttctgataatattctcagggagaataaggtaaaagattttccccattcccatcttggtttgctgttgatcaatataatattaaaactgcaactacctctgatatattcattccagaaattttgctagttcatttctgcaactataaaatatcaaagttcacatgaatttttataagaatattttgtccatatttttctacctgacttctggttctcagccatagaaatgtgctgccagaataggttgtatagcttccaaaactgatggaaaattatcaaaaattaacaaattacaaacatggtttatcccatctaagataaatgaaaccagaatgcatgaacatggctggttctcaaaacagcatctataaattctcaataaaaagttcccaattagattacagatgacgtactttgtaattccttacatttctcctgattttatgttcaacataaagaaatcaatcatgacatccccatctagaggcaaaccaaaatgtaattttgtataaaaacgttaatctttgtagttagtacaaatgctataaattttctgttataatatcatagttcattttatgttaaaatggagaaaaatcatctgtgtggaaaaattaaattttacctcaaatgatagttaacattgagatgcatcaagactactaagaaacaaggatatccttacattcaaaatggtaaagttgatacattgatacacattggatattttaatacatttatatatatatataacattgatactcaatataaccatcaaggtaatctgaaagtaatatcactgttgtataactggaatgtgacaattatagtgataatttactatgtatgctgttagtgaaaaagatgataagaattttactttcatagtgtgggaattgaacaatgagatcacatggacacaggaakgggaatatcacactctgg

SEQ ID NO: 41757 - DNA, 531 bp, Homo sapiens
gtctgcagccccacacctggtgatggggacacaagatatgccaggccctgtccttgctagaagagtcactgtatagaggacctatgtcccctgcactgggcctggcaccaaggaggtacctatttagttgtcagtcaaaaagctggttaaatgtgagacggaaggaaaaaaagaaccaatcaaagcatcttacaccacacaactgcagagccacttctgaaagcctgaattctgcctctgaataataattagcctcttcccaatttacagaaaaaaaaattacaaaaaaaagactcaattaggtacttttctctcacaaatttttcttaaacctctgatatccatttgcacatttctrtaccatatctagtgtaagatgacctcaaatctggcacaggatactaatttcatcactgtcatgaacatcactactcttcacagtcttctgcaaagaacagcagtctctgcttccaggcaggtccgagaacctggggcctaaacttttcctcccttccttcaaatgtcgaggtt

SEQ ID NO: 41758 - DNA, 547 bp, Homo sapiens
agcacatgcaatccacctccacgcatgctgcccacaaaccagccccaggcccagacccagataacctgtttcctgaaccactcctgcccctccaggacccacggatccaggatccaaagcccagccaccctgggggcagaggccctttcacgctgcccagggtcctgcttctctgaggtagctgccaaaccagcttgttcttctaaagcagccgctaagggaaggacggtagcccggaggtgggatctggggcaccacaattacatgcctgagctctgactcacgcaccacctcccccattgccagctcctgcagccagcagggcaaccccccacccaggaattgggaaaagagatggtaccracaggccacgggaagcagaggggccaggagaggtgaggaggagactgcagaccagcattgcaggcttcagaggatgctgacaccttgtctactagggacactgaggctgcaaggacggaggcctacctacatcacatagaggcagagccagggctgggacctgagcctcctggtgccaatataa

SEQ ID NO: 41759 - DNA, 707 bp, Homo sapiens
catgagggctaacccaggctgacatcaccagtgaaagtgagagtcacatagtcagagtcttaggatttagtcagtacagccaggaagggcaacctgtttatttgttcctggaatgtgttgaccaacgcaagttcccccaagtgatccctgagcaccktctatggaaacacagagtgggtgggctaggaagaaaagccaaattcaactcaggtggggatgggccacagtggctttgatgtcctctatgggcatttggtgcctccatggccttgaactaacctctgcccttaagccttgtcccacctcctactcgtcactgatgccctccgggctgggtgggtgggctgggagggagaactacagcaggttaccagggcctctagggctgggagggacctggactggttggagagattgcccaaagccaagtcatctgggagaacaatgggggcgggagctctgtgggattttgcctctagaagctgacagagaaagacctggggctagagaagcagtggagcacagtggggctctcagaaggcactgccccttgctgaccacacagcctgggattcccccttctgcacacccctttctcacagctgtcacttgctggtgccaggtcctgggcaatcagcaccttacatgagtctgttgactcaggagggagaggtatgaattctccagcatctttgcccctggagggt

SEQ ID NO: 41760 - DNA, 707 bp, Homo sapiens
catgagggctaacccaggctgacatcaccagtgaaagtgagagtcacatagtcagagtcttaggatttagtcagtacagccaggaagggcaacctgtttatttgttcctggaatgtgttgaccaacgcaagttcccccaagtgatccctgagcaccgtctatggaaacacagagtgggtgggctaggaagaaaagccaaattcaactcaggtggggatgggccacagtggctttgatgtcctctatgggcatttggtgcctccatggccttgaactaacctctgcccttaagccttgtcccacctcctactcgtcactgatgccctccgggctgggtgggtgggctgggagggagaactacagcaggttaccagggcctctagggctgggagggacctggactggttggagagattgcccaaagccaagtcatctgggagaasaatgggggcgggagctctgtgggattttgcctctagaagctgacagagaaagacctggggctagagaagcagtggagcacagtggggctctcagaaggcactgccccttgctgaccacacagcctgggattcccccttctgcacacccctttctcacagctgtcacttgctggtgccaggtcctgggcaatcagcaccttacatgagtctgttgactcaggagggagaggtatgaattctccagcatctttgcccctggagggt

SEQ ID NO: 41761 - DNA, 1256 bp, Homo sapiens
gaaaaggaggctcaatgattttattttctattttaaataaaaattgactttctttagtctgtattctgctgaagcctcagtgattttaagcaagtggtccaaggccacccagccagtatgatgccgaagtgggctgaagccctggttgctctgattcctgggccctgctctctctgattcctgggccctgctctctctgattcctgggccctgctctctctgattcctgggccctgctctctctgattcctgggccctgctctctctgattcctgggccctgctctctctgattcctgggccctgctctctctctctgattcctgggccctgctctctctgattgattcctgggccctgctctctctctctgattcctgggccctgctctctctgattgattcctgggccctgctctgtgagcccttggggtcacacccaggctgacctccctgtgtgtacagacccaggttgatgaacacccctgtggtcttcccaggcttcrtctgggtccagaagcatctactgagcaggtggaactgttgcaggtcagagatgttgcagggtgaccccattctgtccctgttttagcagtgaaagtcgcacatccctcattcctgggcaaatcaagacagtcaccctagagctgtggtccagccaggtcctgttgctgcccctttgggcacccagaacctgatccctcacaacctgctgttttccaggcatttgtgcaccacctcccaatccttgggatcctccaggctgtggttagaggctgggacaggggttaaggtactatgaaaatgaggctcaggctgggcgcagtggctcacgcctgtaatcccagcaacttgggaaaccaaagcagggggatggcttaaggccagcagtttgggaccagcctgagcaacataacaagaattgtctttacaaaaaaaaaaaaagctacccaggcatggtggcaggcaccagtagccccggctactgaggaggctgaggcaggaagacaggaagatcacttgaccctgggagtttgaggctgcagcgagctatgatcgtgccactgcactccagcctcggttgcagagtgagacctcgtctcttaaaaaaaaaattaggctcatcaatgccagcaagaagtaacagcccaaatcaagtaagaccttgatttgtctttacaatggcctcgaaagacagcagcccccacgttcattttgactctccatggtcccctgactctctgtatatcctgtgacc

SEQ ID NO: 41762 - DNA, 1240 bp, Homo sapiens
ctgagagaagttggcgcaagtagagagggaagtaagcaatggggagatgaggctggtggagtcagcaggcagagagcaataacaaaggggctggaacgccaggctagggatgtagggcttggtcatgctggcaaccgggagccagagagggctctggacagagggaagggccacaaggtttcttagcgtcaagttcaacaagtaaaggcaaaactgccttctcccagccctcaggctccagagaccagtcccaacttcctgggcccaacttgcctactcccaacccctgggcctgaagaagacagggcaccctcaagtccrcagcctgaacttcagcctccagctcaccctcttctttgttcttccaaccagtctctcagccatagtctgatgccatttcttttgcagggaatgcccatgcttcaccctctgaagcctgctgcctgcccagtccctcacctggttccctgccaagtagcacctttattcttcttttatagatgaggaaacagaggctcagagagggagagtaacctgttaaagccacacagctttaccctagaatttgataatgatgggtggatagaactctgtgccagctgtgtggtctcgggaacgtcacttagcctctctgtgctgagtcctcatctgtgaaatggggtacctatcacaacataaggttggtgtgaggtttacaaagagactgtactgtgccaccaacatcccttagctccccaggccagttagcggctttcacatggtccctaccccactcccccgcggcacacattcaactttcattcatacatcagttccctccaacaccttctctgcgcctggtcctgtgcacacactgaagacggctccttggccaagcacagggctcacacctataatctcagcactttgggaggtcgaggcaggaggatcgccggaacccaggagatcgagaccagcctggaaaacatagggagaccctgtctctacaaaaaatttaaaaattagccagatgtggtggtgcacgcctgtagtcacagctactccggaggcacaggtgggaggatctctttagcctggaagttcgaggctgcagtgagccgtgatagtgccactgcactccagcctgggccacagagcgggaccctgtctcaaaataaaatgaaatagaaaataaagacggctcctgcacccaacgcgcggggtgggaaggggcgggagcggactgcagatgcatcacgat

SEQ ID NO: 41763 - DNA, 1240 bp, Homo sapiens
ctgagagaagttggcgcaagtagagagggaagtaagcaatggggagatgaggctggtggagtcagcaggcagagagcaataacaaaggggctggaacgccaggctagggatgtagggcttggtcatgctggcaaccgggagccagagagggctctggacagagggaagggccacaaggtttcttagcgtcaagttcaacaagtaaaggcaaaactgccttctcccagccctcaggctccagagaccagtcccaacttcctgggcccaacttgcctactcccaacccctgggcctgaagaagacagggcaccctcaagtccgcagcctgaacttcagcctccagctcaccctcttctttgttcttccaaccagtctctcagccatagtctgatgccatttcttttgcagggaatgcccatgcttcaccctctgaagcctgctgcctgcccagtccctcacctggttccctgccaagtagcacctttattcttcttttatagatgaggaaacagaggctcagagagggagagtaacctgttaaagccacacagctttaccctagaatttgataatgatggrtggatagaactctgtgccagctgtgtggtctcgggaacgtcacttagcctctctgtgctgagtcctcatctgtgaaatggggtacctatcacaacataaggttggtgtgaggtttacaaagagactgtactgtgccaccaacatcccttagctccccaggccagttagcggctttcacatggtccctaccccactcccccgcggcacacattcaactttcattcatacatcagttccctccaacaccttctctgcgcctggtcctgtgcacacactgaagacggctccttggccaagcacagggctcacacctataatctcagcactttgggaggtcgaggcaggaggatcgccggaacccaggagatcgagaccagcctggaaaacatagggagaccctgtctctacaaaaaatttaaaaattagccagatgtggtggtgcacgcctgtagtcacagctactccggaggcacaggtgggaggatctctttagcctggaagttcgaggctgcagtgagccgtgatagtgccactgcactccagcctgggccacagagcgggaccctgtctcaaaataaaatgaaatagaaaataaagacggctcctgcacccaacgcgcggggtgggaaggggcgggagcggactgcagatgcatcacgat

SEQ ID NO: 41764 - DNA, 1240 bp, Homo sapiens
ctgagagaagttggcgcaagtagagagggaagtaagcaatggggagatgaggctggtggagtcagcaggcagagagcaataacaaaggggctggaacgccaggctagggatgtagggcttggtcatgctggcaaccgggagccagagagggctctggacagagggaagggccacaaggtttcttagcgtcaagttcaacaagtaaaggcaaaactgccttctcccagccctcaggctccagagaccagtcccaacttcctgggcccaacttgcctactcccaacccctgggcctgaagaagacagggcaccctcaagtccgcagcctgaacttcagcctccagctcaccctcttctttgttcttccaaccagtctctcagccatagtctgatgccatttcttttgcagggaatgcccatgcttcaccctctgaagcctgctgcctgcccagtccctcacctggttccctgccaagtagcacctttattcttcttttatagatgaggaaacagaggctcagagagggagagtaacctgttaaagccacacagctttaccctagaatttgataatgatgggtggatagaactctgtgccagctgtgtggtctcgggaacgtcacttagcctctctgtgctgagtcctcatctgtgaaatggggtacctatcacaacataaggttggtgtgaggtttacaaagagactgtactgtgccaccaacatcccttagctccccaggccagttagcggctttcacatggtccctaccccactcccccgcggcacacattcaactttcattcatacatcagttccctccaacaccttctctgcgcctggtcctgtgcacacactgaagacggctccttggccaagcacagggctcacacctataatctcagcactttgggaggtcgaggcaggaggatcgcyggaacccaggagatcgagaccagcctggaaaacatagggagaccctgtctctacaaaaaatttaaaaattagccagatgtggtggtgcacgcctgtagtcacagctactccggaggcacaggtgggaggatctctttagcctggaagttcgaggctgcagtgagccgtgatagtgccactgcactccagcctgggccacagagcgggaccctgtctcaaaataaaatgaaatagaaaataaagacggctcctgcacccaacgcgcggggtgggaaggggcgggagcggactgcagatgcatcacgat

SEQ ID NO: 41765 - DNA, 1240 bp, Homo sapiens
ctgagagaagttggcgcaagtagagagggaagtaagcaatggggagatgaggctggtggagtcagcaggcagagagcaataacaaaggggctggaacgccaggctagggatgtagggcttggtcatgctggcaaccgggagccagagagggctctggacagagggaagggccacaaggtttcttagcgtcaagttcaacaagtaaaggcaaaactgccttctcccagccctcaggctccagagaccagtcccaacttcctgggcccaacttgcctactcccaacccctgggcctgaagaagacagggcaccctcaagtccgcagcctgaacttcagcctccagctcaccctcttctttgttcttccaaccagtctctcagccatagtctgatgccatttcttttgcagggaatgcccatgcttcaccctctgaagcctgctgcctgcccagtccctcacctggttccctgccaagtagcacctttattcttcttttatagatgaggaaacagaggctcagagagggagagtaacctgttaaagccacacagctttaccctagaatttgataatgatgggtggatagaactctgtgccagctgtgtggtctcgggaacgtcacttagcctctctgtgctgagtcctcatctgtgaaatggggtacctatcacaacataaggttggtgtgaggtttacaaagagactgtactgtgccaccaacatcccttagctccccaggccagttagcggctttcacatggtccctaccccactcccccgcggcacacattcaactttcattcatacatcagttccctccaacaccttctctgcgcctggtcctgtgcacacactgaagacggctccttggccaagcacagggctcacacctataatctcagcactttgggaggtcgaggcaggaggatcgccggaacccaggagatcgagaccagcctggaaaacatagkgagaccctgtctctacaaaaaatttaaaaattagccagatgtggtggtgcacgcctgtagtcacagctactccggaggcacaggtgggaggatctctttagcctggaagttcgaggctgcagtgagccgtgatagtgccactgcactccagcctgggccacagagcgggaccctgtctcaaaataaaatgaaatagaaaataaagacggctcctgcacccaacgcgcggggtgggaaggggcgggagcggactgcagatgcatcacgat

SEQ ID NO: 41766 - DNA, 1240 bp, Homo sapiens
ctgagagaagttggcgcaagtagagagggaagtaagcaatggggagatgaggctggtggagtcagcaggcagagagcaataacaaaggggctggaacgccaggctagggatgtagggcttggtcatgctggcaaccgggagccagagagggctctggacagagggaagggccacaaggtttcttagcgtcaagttcaacaagtaaaggcaaaactgccttctcccagccctcaggctccagagaccagtcccaacttcctgggcccaacttgcctactcccaacccctgggcctgaagaagacagggcaccctcaagtccgcagcctgaacttcagcctccagctcaccctcttctttgttcttccaaccagtctctcagccatagtctgatgccatttcttttgcagggaatgcccatgcttcaccctctgaagcctgctgcctgcccagtccctcacctggttccctgccaagtagcacctttattcttcttttatagatgaggaaacagaggctcagagagggagagtaacctgttaaagccacacagctttaccctagaatttgataatgatgggtggatagaactctgtgccagctgtgtggtctcgggaacgtcacttagcctctctgtgctgagtcctcatctgtgaaatggggtacctatcacaacataaggttggtgtgaggtttacaaagagactgtactgtgccaccaacatcccttagctccccaggccagttagcggctttcacatggtccctaccccactcccccgcggcacacattcaactttcattcatacatcagttccctccaacaccttctctgcgcctggtcctgtgcacacactgaagacggctccttggccaagcacagggctcacacctataatctcagcactttgggaggtcgaggcaggaggatcgccggaacccaggagatcgagaccagcctggaaaacatagggagaccctgtctctacaaaaaatttaaaaattagccagatgtggtggtgcacgcctgtagtcacasctactccggaggcacaggtgggaggatctctttagcctggaagttcgaggctgcagtgagccgtgatagtgccactgcactccagcctgggccacagagcgggaccctgtctcaaaataaaatgaaatagaaaataaagacggctcctgcacccaacgcgcggggtgggaaggggcgggagcggactgcagatgcatcacgat

SEQ ID NO: 41767 - DNA, 1331 bp, Homo sapiens
ggcacacatatgcgctggggccagagtctggatgggattctggcttggcctgttctaagctgtgtggcttttggaggtcactttacctctccaagactgtctccccatccaccatatgaggataccggctcccagccactggcaccatggcggacccagggaaggggaggcaccattctgccactttcccattcattcctgagaatggttcctcctcagattatagggtcagaactgaaacctagacccagcgcacttgtccccaccctcctgctggcaattcagagacaacacacatcaagatggcagctttaatcacattggccaagggccctaggttccctctgttcaggcccacttagccacacacccaccctggccatatccagaacacttctaccaggtgggccctgccctgtggccactgatgtgggaacctgaggtcacatcagtctgtggactcctgggttaggtgacccttctgccttgaggtctgctggacacctgggcatgggatccagtagtcctgagctcactcttttggccatctccagctgctcctagrggacgtggctcaggcccgctcctggggcagggggttggcggtggcatgaggtgggttggggaggaggacgtgtctccacattgcagctggcttcctcctgggctgaacctccttgtgctttgagactgacaggaagagcagagttgcttcaggtagaggctcggcccaggcccttggggcaggataacagcagagaactcaggtgcctcctggcacagacaggaggacagatggcacaggtgagcatccacacactccattgccacagggggtatggcatggcccatgacccatcaaagcttccaggtcgggatacaggagagggcctcagaagagggggaccaagccctaggccccatacttcccagaaggagccccaggcctgcaggggcatctgaaaggatggagtcctggcccagctgggcctcaggagacagggagtccccctcaagagaggctgcggctgacaaggggctggagcccacaaggaggctgtggagcccgctcccagagcactccgagttcagacacacttccaccagctctcctaggctccccagcttctgtgtcaggtacaggtgggacagacatgtcttcagctaacgcccactccgctctatgagggtcttggtgtggctgccaccccctcgggggcccacaggggtggcggtgctgttggcatatgtgtcataactgttgtctgaacatacggagagcacatcggagacctctacaccatcgctgatctctgctgggccagagggag

SEQ ID NO: 41768 - DNA, 1331 bp, Homo sapiens
ggcacacatatgcgctggggccagagtctggatgggattctggcttggcctgttctaagctgtgtggcttttggaggtcactttacctctccaagactgtctccccatccaccatatgaggataccggctcccagccactggcaccatggcggacccagggaaggggaggcaccattctgccactttcccattcattcctgagaatggttcctcctcagattatagggtcagaactgaaacctagacccagcgcacttgtccccaccctcctgctggcaattcagagacaacacacatcaagatggcagctttaatcacattggccaagggccctaggttccctctgttcaggcccacttagccacacacccaccctggccatatccagaacacttctaccaggtgggccctgccctgtggccactgatgtgggaacctgaggtcacatcagtctgtggactcctgggttaggtgacccttctgccttgaggtctgctggacacctgggcatgggatccagtagtcctgagctcactcttttggccatctccagctgctcctagaggacgtggctcaggcccgctcctggggcagggggttggcggtggcatgaggtgggttggggaggaggacgtgtctccacattgcagctggcttcctcctgggctgaacctccttgtgctttgagactgacaggaagagcagagttgcttcaggtagaggctcggcccaggcccttggggcaggataacagcagagaactcaggtgcctcctggcacagacaggaggacagatggcacaggtgagcatccacacactccattgccacagggggtatggcatggcccatgacccatcaaagcttccaggtcgggatacaggagagggcctcagaagagggggaccaagccctaggccccatacttcccagaaggagccccaggcctgcaggggcatctgaaaggatggagtcctggcccagctgggcctcaggrgacagggagtccccctcaagagaggctgcggctgacaaggggctggagcccacaaggaggctgtggagcccgctcccagagcactccgagttcagacacacttccaccagctctcctaggctccccagcttctgtgtcaggtacaggtgggacagacatgtcttcagctaacgcccactccgctctatgagggtcttggtgtggctgccaccccctcgggggcccacaggggtggcggtgctgttggcatatgtgtcataactgttgtctgaacatacggagagcacatcggagacctctacaccatcgctgatctctgctgggccagagggag

SEQ ID NO: 41769 - DNA, 812 bp, Homo sapiens
ctgctttggaaggaggtgctgggtctgccgggctgccactcactctggaagtctggccccctgcatgtggtgggtattattttctcgataagactccagcccctgagccagactccagtgctgaccccagtccctcccagaggcagccagtggggatctggatctggtgtccagtttggccacatgctgcctgtgcatcttggaggggtcaccagtcccctctgtgcctcaaaggtatggatgcccatgctgctggttattgtgaggaccaattggagcccagccttcccagtgggggcaggggaactcttctgaggggcttaaaacgatggcccctcctgtctccatgactcagattaccatctcctgggctccctccagcagccaggggacataagtggtatgctgaagcaggaaggtggccccagcgaggatggttttctttagtagaaaaaggtcaaatatatgcagaagtggagaaaagcatataatgactcacataatgaagaaggatgtaatgaatccaatcccatacttatctacgtttggccattcttgcttcatctgttccctacttttttttctggggtagtaaagcaaatcttaggcatcgcatcgtcttacccataggcacttcaggatgtatctgtaacacatgaggacttcagaaagatgcatagcmacaatgctgttattacacccagccaatattaaggataatgattccttaatattatctaaaatggaatccatgttcaatttccttttattgtctcgaaaatatctttttacagtttagttgttaaaaatca

SEQ ID NO: 41770 - DNA, 812 bp, Homo sapiens
ctgctttggaaggaggtgctgggtctgccgggctgccactcactctggaagtctggccccctgcatgtggtgggtattattttctcgataagactccagcccctgagccagactccagtgctgaccccagtccctcccagaggcagccagtggggatctggatctggtgtccagtttggccacatgctgcctgtgcatcttggaggggtcaccagtcccctctgtgcctcaaaggtatggatgcccatgctgctggttattgtgaggaccaattggagcccagccttcccagtgggggcaggggaactcttctgaggggcttaaaacgatggcccctcctgtctccatgactcagattaccatctcctgggctccctccagcagccaggggacataagtggtatgctgaagcaggaaggtggccccagcgaggatggttttctttagtagaaaaaggtcaaatatatgcagaagtggagaaaagcatataatgactcacataatgaagaaggatgtaatgaatccaatcccatacttatctacgtttggccattcttgcttcatctgttccctacttttttttctggggtagtaaagcaaatcttaggcatcgcatcgtcttacccataggcacttcaggatgtatctgtaacacatgaggacttcagaaagatgcatagcaacaatgctgttattacacccagccaatattaaggataatgattccttaatattatctaaaatggaatccatgttcaatttccytttattgtctcgaaaatatctttttacagtttagttgttaaaaatca

SEQ ID NO: 41771 - DNA, 1199 bp, Homo sapiens
gcatacaaaagttatgtttatactgtgctgtagtctattaaatgtgcaatatcattatgtctaaaaaagcatatgcctttatttaaaatactttattgctaaaaaatgtcaacacaaagaaattaaatgagcacatgctactggaaaatggtgctaataggcttgtttaatgcaggattaccacaaaccattaaattattttttaaaaatgcaatatctgtgaagcaaaataaaataaagtatgctcatataatgtaacacctagagaacccactaaaaaactatacaaagatatctaataataacgctatattacaaaatcactgtagatgcaccataatgggattatttttaaaaagttcaagtgacccacagaaacgctggaaaaagaaaagagataaacaaaaaagaaaatgaacacttaatttaaaaaaatggcagacaactttaacgtatcaatgaccacataaaacataaacaattttctcggtttttcaaacaataaaggtcatgaattcctcttataaaagtgaaagtttagaagtttagaaaataatgttctrgttcacctaatgccacacccatgaataactatacttgaattgatgtgcacactttctggcatttatccagaaataaataaaaagaatgaaagcagccaggtgcagtggctcatgcctgtaatcccagcactttgggaggccaaggtgggcggatcacctaaggtcaggagttcgagaccagcctggccaacatggtgaagccccgtctctactaaagatacaaaaaattagctaggcatgcagcatgcacctgtaatcccagctcgggaggctggggcaggaaaattgcttgaacctgggaggcagaggttgcagtgtgctgagatggcaccactgcactccagcctgggcaacagggcaagattccatctccaaaaataaaaaagaatgaaagctagagacagtaggagtgacagagagtttagttttttcaaggagtccacaatttacatatttttctacaacatgcttttctcttttgactccataagagtatatatttatctcactgctttagactagatattaataaataatatgagtctactaaaatttatacaattctatttcctaattttgctattagaaggttttcattaacttattttcaatgcaagttacataatattatagata

SEQ ID NO: 41772 - DNA, 657 bp, Homo sapiens
tttwaaaaaacgaaacaacaacaaaaaactgtaggtagtctttattttccctgtctttttcagctccctcctgaacttccaaaatgtcttcatttatgctctgaggctgggttaatcactctattctccatgctgcctagtgtattgtatagatgtttattctagaagttattacattatattatacttaattgctaatatacatttcttccactatatttaaatcttatcaatgatagctttgacttatcactttgcccttgacgcataacctaatgcttggtcatttgagtgctcaaagtgtgctgaatggataacaattattatattgaaagccaacattcagtttacagtatttccagaactaagttcttcacgtctattgattcactcaataatccccacaaactatatggatatgtaccattatcatccacatttaaagatgagaaaactgaggtacagaatacttacataacttgcctaaagttgcacagctaaatatggcaaagctgggatatgaaacctaggcaaggagctccagagcatctaacttttttttttttttttttctgagacggagtctcgctctgtcgtccaggctggagtgcagtggtgggatctcggctcactgcaagctccgcctcccgggttcac

SEQ ID NO: 41773 - DNA, 657 bp, Homo sapiens
tttaaaaaaacgaaacaacaacaaaaaactgtaggtagtctttattttccctgtctttttcagctccctcctgaacttccaaaatgtcttcatttatgctctgaggctgggttaatcactctattctccatgctgcctagtgtattgtatagatgtttattctagaagttattacattatattatacttaattgctaatatacatttcttccactatatttaaatcttatcaatgatagctttgacttatcactttgcccttgacgcataacctaatgcttggtcatttgagtgctcaaagtgtgctgaatggataacaattattatattgaaagccaacattcagtttacartatttccagaactaagttcttcacgtctattgattcactcaataatccccacaaactatatggatatgtaccattatcatccacatttaaagatgagaaaactgaggtacagaatacttacataacttgcctaaagttgcacagctaaatatggcaaagctgggatatgaaacctaggcaaggagctccagagcatctaacttttttttttttttttttctgagacggagtctcgctctgtcgtccaggctggagtgcagtggtgggatctcggctcactgcaagctccgcctcccgggttcac

SEQ ID NO: 41774 - DNA, 521 bp, Homo sapiens
caatatttttctaagcttttcttttctggaacaatggcagaaaaaattaggagggggattgctgaaattgacagaatctgtcatctttcagaaaactaggaagtgacaaattaaaaaattgtcttgtttgtgccagatgtgtacaactgctgattcagaaatatacaaagtcttggactaagaaaaaaagaggaagaatgtatattaatagatagacctccatcttaggaatagggagatgttgaatgaagcccctagcttccygacaataaaaagtgtataaaatataagtagaagtcttaagaacaaaaatgtagcaaggcacacttgagagctttcttagtactgatccacacagaaaaaaaggtaaagatgacccttggtccttgggcttgtgtctgcaagggtctccagttcagaatatttctaaaagggaaatctagatggtcagtgggccagatttagtgttgtgtgcaaggagggccttgccttaaaaacaggagtctctttgcttcttgggg

SEQ ID NO: 41775 - DNA, 1155 bp, Homo sapiens
tgcattaactcagtaaagctgtgttttctagagagtatgtgctgtcaaataccctgtaccattctctttataagcacagttatgctgctctatgtattctcatcttcaggtggaagaaatcatcttcttaaaagcagcccccagccctggtcccagcttgttataccctgggtttttgtttatgtgttttttttttatcgtaaccttacttctaatgcaagaaaaggcccctttctagagagaacatcagctatgctatacttkggtgctctgaagttccttatctttacccatctgaatattttcaatagaagacactttttttccatctttctacttatttaactggcttcttggttttctctctttccagtagactgcaagattcataagaacagagtccatagcccacatacaatgatcaatgtatatgtatacaggcctagcacataatagacactcaataaatgtctatagggtaaacaaacaaaaacatgtatggtctcacagcaaccgatatattctggtgcttacatcctaaatctcacaaatagggcgaaattttccacagatatgcacaatgactagaggagcaataatattaaagcaaatgtgtcctgtgcagtcattctcgcccagctgtatttgtgtacattgggcacagaattcccttccagctgcccctccctcccattttatagtcttgtttgggtttgatttagtgggtgtgaaagtctgaattgtttagctttgctgtggaatagagacctatctcagtgacccttactgcttacctgcagtcaccctaccctccttatctgcagcaccatgtttttgatctctgtgatatggcaatattttcccatagccccctggaatgagaaaaccagctcataaagtgaaaagtgatccgagctcagcacgccctgccctgataggcaccaccagcaacatcagacagcgggaactcccactgaatagaggtttggacaactgcaaggttttactgctttctccccttcccctatctattcagcctaatggcaagccacttggccccagccctctatccctgccacgccagtccattgggttacaaacatgccccattcatctccacattcacattccctcttcatcttttctccttccagt

SEQ ID NO: 41776 - DNA, 1155 bp, Homo sapiens
tgcattaactcagtaaagctgtgttttctagagagtatgtgctgtcaaataccctgtaccattctctttataagcacagttatgctgctctatgtattctcatcttcaggtggaagaaatcatcttcttaaaagcagcccccagccctggtcccagcttgttataccctgggtttttgtttatgtgttttttttttatcgtaaccttacttctaatgcaagaaaaggcccctttctagagagaacatcagctatgctatacttgggtgctctgaagttccttatctttacccatctgaatattttcaatagaagacactttttttccatctttctacttatttaactkgcttcttggttttctctctttccagtagactgcaagattcataagaacagagtccatagcccacatacaatgatcaatgtatatgtatacaggcctagcacataatagacactcaataaatgtctatagggtaaacaaacaaaaacatgtatggtctcacagcaaccgatatattctggtgcttacatcctaaatctcacaaatagggcgaaattttccacagatatgcacaatgactagaggagcaataatattaaagcaaatgtgtcctgtgcagtcattctcgcccagctgtatttgtgtacattgggcacagaattcccttccagctgcccctccctcccattttatagtcttgtttgggtttgatttagtgggtgtgaaagtctgaattgtttagctttgctgtggaatagagacctatctcagtgacccttactgcttacctgcagtcaccctaccctccttatctgcagcaccatgtttttgatctctgtgatatggcaatattttcccatagccccctggaatgagaaaaccagctcataaagtgaaaagtgatccgagctcagcacgccctgccctgataggcaccaccagcaacatcagacagcgggaactcccactgaatagaggtttggacaactgcaaggttttactgctttctccccttcccctatctattcagcctaatggcaagccacttggccccagccctctatccctgccacgccagtccattgggttacaaacatgccccattcatctccacattcacattccctcttcatcttttctccttccagt

SEQ ID NO: 41777 - DNA, 1155 bp, Homo sapiens
tgcattaactcagtaaagctgtgttttctagagagtatgtgctgtcaaataccctgtaccattctctttataagcacagttatgctgctctatgtattctcatcttcaggtggaagaaatcatcttcttaaaagcagcccccagccctggtcccagcttgttataccctgggtttttgtttatgtgttttttttttatcgtaaccttacttctaatgcaagaaaaggcccctttctagagagaacatcagctatgctatacttgggtgctctgaagttccttatctttacccatctgaatattttcaatagaagacactttttttccatctttctacttatttaactggcttcttkgttttctctctttccagtagactgcaagattcataagaacagagtccatagcccacatacaatgatcaatgtatatgtatacaggcctagcacataatagacactcaataaatgtctatagggtaaacaaacaaaaacatgtatggtctcacagcaaccgatatattctggtgcttacatcctaaatctcacaaatagggcgaaattttccacagatatgcacaatgactagaggagcaataatattaaagcaaatgtgtcctgtgcagtcattctcgcccagctgtatttgtgtacattgggcacagaattcccttccagctgcccctccctcccattttatagtcttgtttgggtttgatttagtgggtgtgaaagtctgaattgtttagctttgctgtggaatagagacctatctcagtgacccttactgcttacctgcagtcaccctaccctccttatctgcagcaccatgtttttgatctctgtgatatggcaatattttcccatagccccctggaatgagaaaaccagctcataaagtgaaaagtgatccgagctcagcacgccctgccctgataggcaccaccagcaacatcagacagcgggaactcccactgaatagaggtttggacaactgcaaggttttactgctttctccccttcccctatctattcagcctaatggcaagccacttggccccagccctctatccctgccacgccagtccattgggttacaaacatgccccattcatctccacattcacattccctcttcatcttttctccttccagt

SEQ ID NO: 41778 - DNA, 814 bp, Homo sapiens
gggggtgaggggaaaggggagcaagagcattaggccaaatatctaatgcacgtggggcttcaaacctagaggatgggttaataggtgcagcaaaccmccatgatacatgtatacctgtgtaacaaacctgcacgtacggcacatgtatcccagaacttaaaaaaaaaaaagcaaacaaacaaaaaaccatagtagtatgtttttaaataataatatacgttaattgttattacttaataacataagcagctaatatttactagataccacattaaatactttaataaaacatatatatacatatggtgcctacatgtgtgcaagacactgttctagaaactgaaagaaacaagattttggctctcctgggacctacttactcctgggagagacagacaaaaaaatcacaaaaataattaagataattttagacattaatgaatattgcagagcaaattggctgggtttggtggctcacacctgtaatcccagcactttgggaggcccaggcaggtggatcatttgaggtcaggagtttgagaccagcctggccaacatagtaaaaccctggctctactaaaaatacaaaaaattatctcggtgtgatggtgggtgcctgtaatcccagctactcgagaggctgaggcaggagaattgcttgaactggggaagtggagcttgcagtgaggaaatggagatcgtgccactgcacgccaacctggacaagagagcgagactctgtctcaaataataagcacttatttaataaatggtgctgggaaaactggctagccatatgtagaaagatgaaact

SEQ ID NO: 41779 - DNA, 814 bp, Homo sapiens
gggggtgaggggaaaggggagcaagagcattaggccaaatatctaatgcacgtggggcttcaaacctagaggatgggttaataggtgcagcaaaccaccatgatacatgtatacctgtgtaacaaacctgcacgtacggcacatgtatcccagaacttaaaaaaaaaaaagcaaacaaacaaaaaaccatagtagtatgtttttaaataataatatacgttaattgttattacttaataacataagcagctaatatttactagataccacattaaatactttaataaaacatatatatacatatggtgcctacatgtgtgcaagacactgttctagaaactgaaagaaacaagattttkgctctcctgggacctacttactcctgggagagacagacaaaaaaatcacaaaaataattaagataattttagacattaatgaatattgcagagcaaattggctgggtttggtggctcacacctgtaatcccagcactttgggaggcccaggcaggtggatcatttgaggtcaggagtttgagaccagcctggccaacatagtaaaaccctggctctactaaaaatacaaaaaattatctcggtgtgatggtgggtgcctgtaatcccagctactcgagaggctgaggcaggagaattgcttgaactggggaagtggagcttgcagtgaggaaatggagatcgtgccactgcacgccaacctggacaagagagcgagactctgtctcaaataataagcacttatttaataaatggtgctgggaaaactggctagccatatgtagaaagatgaaact

SEQ ID NO: 41780 - DNA, 520 bp, Homo sapiens
gctaaaatctatagcctcatgcctataatcaaggccccacaggaagccttgaggtaaaaatgccatttaatttaccaaattccaatccttttctatttctaaatgtttccaaccatatgttgggcttcacaaggaaaataagtagtatcccatttttttcctacctttgtttataaccagctaagggatagccaatggattccacaggttgaagattaaacwattgcctttattgccactgaagctcttgaaaaataaggctttacaaaggtcatgtgggctttcaagagattctctacattgcatgaacacttcctctcctcatcacctccaatcaaagttcagactttataggagttgtgcagtggtggagttagggtgcatgaagagtttgccaagctacagagccaaggcataagataagttactcttcaagggagtgagggactgaaaacactgtgggaatgctccctaatagagatctttccataacagaacagcaagtctaggcactgggaac

SEQ ID NO: 41781 - DNA, 520 bp, Homo sapiens
gctaaaatctatagcctcatgcctataatcaaggccccacaggaagccttgaggtaaaaatgccatttaatttaccaaattccaatccttttctatttctaaatgtttccaaccatatgttgggcttcacaaggaaaataagtagtatcccatttttttcctacctttgtttataaccagctaagggatagccaatggattccacaggttgaagattaaacaattgcctttattgccactgaagctcttgaaaaataaggctttacaaaggtcatgtgggctttcaagagattctctacattgcatgaacacttcctctcctcatcacctccaatcaaagttcagactttataggagttgtgcagtggtggagttaggrtgcatgaagagtttgccaagctacagagccaaggcataagataagttactcttcaagggagtgagggactgaaaacactgtgggaatgctccctaatagagatctttccataacagaacagcaagtctaggcactgggaac

SEQ ID NO: 41782 - DNA, 692 bp, Homo sapiens
atgtgaatacacattacagcattgaggacattatgcaacatgaaaaaaaagccaatcacaataagataactactgtatgagtccacttayatgaggtgcctaaagcagttgaagtcagagacatgaggtacctaaagcagctgaagtcacagagacagaaagaagagtggttgctaggagctgggggaagggggaatggggagttgattaatgggtgattaatggctttcagctttgtaagatgaaaagacttctggagattggttacacaacaatgtgagtgtacttaacactattgaattctacacttaaaaatagttaatatgaaaaattttatgttacgtgtatttcaccacaattaaaaataaaaaaagaaagcttatctaacttctggaaatgagtcgttttcaacaagaatatgaacagaaccaggcagttctatctcaacccttcttccaagagctgatttgccgaaatacttcgaacatctaagtgctctcatagttccccactttctaaaatatgatggacaataatacctaattaatatctcattaaggggttgggattgagagaagccatttagaccaagaaaagcatacacctgtcacagagaccagccacctgcctctccctaaatcaggaaggaaaactgcagctcatacattcacctctggtgctggggaagtgct

SEQ ID NO: 41783 - DNA, 692 bp, Homo sapiens
atgtgaatacacattacagcattgaggacattatgcaacatgaaaaaaaagccaatcacaataagataactactgtatgagtccacttatatgaggtgcctaaagcagttgaagtcagagacatgaggtacctaaagcagctgaagtcacagagacagaaagaagagtggttgctaggagctgggggaagggggaatggggagttgattaatgggtgattaatggctttcagctttgtaagatgaaaagacttctggagattggttacacaacaatgtgagtgtacttaacactattgaattctacacttaaaaatagttaatatgaaaaattttatgttacrtgtatttcaccacaattaaaaataaaaaaagaaagcttatctaacttctggaaatgagtcgttttcaacaagaatatgaacagaaccaggcagttctatctcaacccttcttccaagagctgatttgccgaaatacttcgaacatctaagtgctctcatagttccccactttctaaaatatgatggacaataatacctaattaatatctcattaaggggttgggattgagagaagccatttagaccaagaaaagcatacacctgtcacagagaccagccacctgcctctccctaaatcaggaaggaaaactgcagctcatacattcacctctggtgctggggaagtgct

SEQ ID NO: 41784 - DNA, 692 bp, Homo sapiens
atgtgaatacacattacagcattgaggacattatgcaacatgaaaaaaaagccaatcacaataagataactactgtatgagtccacttatatgaggtgcctaaagcagttgaagtcagagacatgaggtacctaaagcagctgaagtcacagagacagaaagaagagtggttgctaggagctgggggaagggggaatggggagttgattaatgggtgattaatggctttcagctttgtaagatgaaaagacttctggagattggttacacaacaatgtgagtgtacttaacactattgaattctacacttaaaaatagttaatatgaaaaattttatgttacgtgtatttcaccacaattaaaaataaaaaaagaaagcttatctaacttctggaaatgagtcgttttcaacaagaatatgaacagaaccaggcagttctatctcaacccttcttccaagagctgatttgccgaaatacttcgaacatctaagtgctctcatagttccccactttctaaaatatgatggacaataatacctaattaatayctcattaaggggttgggattgagagaagccatttagaccaagaaaagcatacacctgtcacagagaccagccacctgcctctccctaaatcaggaaggaaaactgcagctcatacattcacctctggtgctggggaagtgct

SEQ ID NO: 41785 - DNA, 466 bp, Homo sapiens
ttttctattgcggactccctgtcatccaggttttggtttgaacgcggtggtgtgccggtaaatgtttaacaggcagctgtcccgggaaaaaggaagccatgatgtggggcatttaccaatttgtgtaaatattccaccatggcctaaagatacgggagtgatgtcaatcagctcaccaacttgtggaaattttaataattcattcttctgagctgttagctgcctccagtttagcagtgcttgagatgatgtttttcctctgaagtaagctcyaatgatggttaaacctgtttgtttgttttaaatttctgtcttaaccatatcactagcatagaatcttttcttcttcatttacttacttacttacttgactattgaatgattcctgcacccccactcaaccaacacacacacacacgcgcacacacacacacacccctacctaagtttcatgaaagcaaggacc

SEQ ID NO: 41786 - DNA, 578 bp, Homo sapiens
ggaccgagggttgggacacctaggcctccctcaaagccctttaacagcctgactgtaggaactggaggaaagtgtggcccctcccttgcctctgtgactttgttgtctagcaggaattgtaaggaattgtaatcgcrctctctccctccctgcttgccctaacctgactgcagggactgcgagctctaaggaggagaaacatcatggggagtgatatgtgagcctcggaaggcttcatcattcactctgaaatgctggcaccgagtcaagttagttcttatgtgacattaaaaacctcacttcagtgaggaaaacaaacagataaagaatagcagctaatgactttggaaggctagagagcatctgaagtattgtttttttaaatgcaatagattttaaaaggcatttccaataatgaatatgtcatccaattactgcactcttctcattctgaacacctgtcccagtgattctcaatccccaaagtgacttttatttttaacgatatttattatcatgagtgttatcacattagatgaaatcagctggagatagaggctgcattcactgatggcatg

SEQ ID NO: 41787 - DNA, 1223 bp, Homo sapiens
cattctatccccttccacttcatgtctctccttgaccctctcacaagctgacgtatttcagctatcttccttactgcctgcctcctcagaagtgttgtctgctctgttctgagctgtatccgtagtgctagaacggtgcctttcatatacagggtgttcagtaaacttctgttgttgaatgaataagtaaacaagagaaattgatctgatagagaggtaagagaaggaggaagtgtgagagtctgtgtggagggtggtgtgaccaagtgtgacaaagggcacagagataggaggggacgtgaggggtgtcgatgaggtccgcagtrtgatgtgctctgtagatgttatcatttgagacaatagaacacaggagtgttcacggaggattccacaggacaacatgcctgtgaaagcaggagtccactggatattatgatgaacagagaaacaaatgtacagacacccccaacccatgccatatcaggaggcagtgcatcccaggtggttgagcgaagacgttttcagcaagattctgagggaaaggaagagttcacattgatggggaaggctgtccaggcatgagaaacaccagggagaagggacaagagcagtgaaccatttgtttatctttttataatgaaacatccacgcttgggtgctctatccaacaaccagcttgttttcctatcatggatgaggcaaaggcatctagtccagcttggatgaaaatgctcagagcccaggtgcactgcctggcaggcacagagtgggatgtttctgttcccacaacctctgtccttctgctcgcctccaggacagacacgcttaggctcctcgtacttatctgtgtgcaaacaccacacagacactcggcgagacagccagtggtctgcattttctaatgtgagcttatgctgtgcaaacagctttattgtcagcccgcatgcacagaaaggcccacagcaaacagatgctcagccccaccccttcttactggggtcctcgtgagacattcggagcacaaggtattaacattccccacccacaataagtacatttcatgcctcatattcacctcctataccctgctccatacaactttgcccagcgtatagcactcttaattctttccaatcattcctatagccgaccatactctctctctgtgtgtgtgtgtgtgtgtgtgtgtgtgtgtgtgtgtgcgcgcgcgcgcgcgtacatgc

SEQ ID NO: 41788 - DNA, 1223 bp, Homo sapiens
cattctatccccttccacttcatgtctctccttgaccctctcacaagctgacgtatttcagctatcttccttactgcctgcctcctcagaagtgttgtctgctctgttctgagctgtatccgtagtgctagaacggtgcctttcatatacagggtgttcagtaaacttctgttgttgaatgaataagtaaacaagagaaattgatctgatagagaggtaagagaaggaggaagtgtgagagtctgtgtggagggtggtgtgaccaagtgtgacaaagggcacagagataggaggggacgtgaggggtgtcgatgaggtccgcagtgtgatgtgctctgtagatgttatcatttgagacaayagaacacaggagtgttcacggaggattccacaggacaacatgcctgtgaaagcaggagtccactggatattatgatgaacagagaaacaaatgtacagacacccccaacccatgccatatcaggaggcagtgcatcccaggtggttgagcgaagacgttttcagcaagattctgagggaaaggaagagttcacattgatggggaaggctgtccaggcatgagaaacaccagggagaagggacaagagcagtgaaccatttgtttatctttttataatgaaacatccacgcttgggtgctctatccaacaaccagcttgttttcctatcatggatgaggcaaaggcatctagtccagcttggatgaaaatgctcagagcccaggtgcactgcctggcaggcacagagtgggatgtttctgttcccacaacctctgtccttctgctcgcctccaggacagacacgcttaggctcctcgtacttatctgtgtgcaaacaccacacagacactcggcgagacagccagtggtctgcattttctaatgtgagcttatgctgtgcaaacagctttattgtcagcccgcatgcacagaaaggcccacagcaaacagatgctcagccccaccccttcttactggggtcctcgtgagacattcggagcacaaggtattaacattccccacccacaataagtacatttcatgcctcatattcacctcctataccctgctccatacaactttgcccagcgtatagcactcttaattctttccaatcattcctatagccgaccatactctctctctgtgtgtgtgtgtgtgtgtgtgtgtgtgtgtgtgtgtgcgcgcgcgcgcgcgtacatgc

SEQ ID NO: 41789 - DNA, 1223 bp, Homo sapiens
cattctatccccttccacttcatgtctctccttgaccctctcacaagctgacgtatttcagctatcttccttactgcctgcctcctcagaagtgttgtctgctctgttctgagctgtatccgtagtgctagaacggtgcctttcatatacagggtgttcagtaaacttctgttgttgaatgaataagtaaacaagagaaattgatctgatagagaggtaagagaaggaggaagtgtgagagtctgtgtggagggtggtgtgaccaagtgtgacaaagggcacagagataggaggggacgtgaggggtgtcgatgaggtccgcagtgtgatgtgctctgtagatgttatcatttgagacaatagaacacaggagtgttcacggaggattccacaggacaacatgcctgtgaaagcaggagtccactggatattatgatgaacagagaaacaaatgtacagacacccccaacccatgccatatcaggaggcagtgcatcccaggtggttgagcgaagacgttttcagcaagattctgagggaaaggaagagttcacattgatggggaaggctgtccaggcatgagaaacaccagggagaagggacaagagcagtgaaccatttgtttatctttttataatgaaacatccacgcttgggtgctctatccaacaaccagcttgttttcctatcatggatgaggcaaaggcatctagtccagcttggatgaaaatgctcagagcccaggtgcactgcctggcaggcacagagtgggatgtttctgttcccacaacctctgtccttctgctcgcctccaggacagacacgcttaggctcctcgtacttatctgtgtgcaaacaccacacagacactcggcgagacagccagtggtctgcattttctaatgtgagcttatgctgtgcaaacagctttattgtcagcccgcatgcacagaaaggcccacagcaaacagatgctcagccccaccccttcttactggggtcctcgtgagacattcggagcacaaggtattaacattccccacccacaataagtacatttcatgcctcatattcacctcctataccctgctccatacaactttgcccagcgtatagcactcttaattctttccaatcattcctatagccgaccatactctctctctgtgtgtgtgtgtgtgtgtgtgtgtgtgtgtgtgtgygcgcgcgcgcgcgcgtacatgc

SEQ ID NO: 41790 - DNA, 604 bp, Homo sapiens
tgaaaatgagaagaatatctgagtgtttctttctcttatgttttcatccgtaccagagaataatgaagcttgtctttaaaatttttaaacggaagctttggtcaggctgggtggtttacagagattaacttaacctccttgtagtgttcagaaactaaccagaaggctctccgaagccaagcaattttataattaagtggtaactgtttttttttttttggagggctttttctttcctgggtagcctagagaaagataaacagctgcaggaatcaataagcatcaaggtcataggctgaattatttactgattctctgttgtttatctaaaactttcctctctacaaggaaaaactgtgtctacttcacrgaagatttagaacgtacctggtttagtttcacggttgttgttactgtctttacccttttaatggctgagcaacatcactgccttcctaacagagcctcgcaaatgggaaggatctgatgacccggctcattcaccaagctgggtcaggatgggggaagcctgaatgggctctgagcagtaggaagcacaaggtgggtgaggtgaaccacaaaagatgtgagccaactgcacaca

SEQ ID NO: 41791 - DNA, 609 bp, Homo sapiens
ccaaggatttaactctcagagtagtcctattacccctgtgaattctgtgtgtgtgtgtgtgtgtgtgtgtgtgtgtgtgtgtgtgtgtgtgtgtgtgtgtagagacttccctggctagggctcagccctaatgaggctgaagtcttgggtctgacctgcagatgacaagttaattgcactctgttctgggggcacagagtgtgcctttcaccctgattagctgcttgtgcatgtggccattggccttgcagcttgcagtggcaaccctgggtgcaagcctgatgaaatccatacaagttcatctctgagtagaacgacaagtgggaggtcaggggagcgcccacgtaagggtggaggcaatctgggtgagggtgggggaatatacgggatacttacaaaccagcgctcccctgcagcagggataggtctgccaatccattttctgcccactgccctcttctgttcacactcttgactcttaaactttgtggttagagttggtgcaagtgcttaagtgggctgggatgggggtagaggtgttgcaaaaatgcctaccgagctttattggaagttctaactagatatctgaacacattttggkagtcggca

SEQ ID NO: 41792 - DNA, 787 bp, Homo sapiens
acagaacccacggccatgcctaccccgaagctgactggcagggcctccagccagcgaggggcaagggcctggctgtgggcccgagggaggccaagggaggcctggctccccagctcgggtgccacggagctccacagctggctgcacccagatctccygaggtggagcaaggatgaagtcccagcctcattatcctgcttcaaatcctctccatgcctgcacatgctggatgctgttatctccattttacggacaaaggaatggagctgaggaaggggagacagccgagaaacagctcacaggcagcaaggctgggaagcgaccccaggggctcttggctgcagagtttgtacttgacagacttgaagatggtgtcgcttaaaaaaagacaaaaggaggacttgtctttctgtgcctggcttctttcactaagcatggtgtcctccaacatgtttgttcatgttatcacgtgcggcaggattccttctttttgaaggctgaatcatattctatcgtatgcgtagaccacatgttaaaacccattcatgtgttgctgggcccttaggttatctccacatctcggctgtcgtgagtagcgccgccatgaccatggcagtgcagataactctttcagatcctgatctctactcttttggagaaacaggcataagtggggttgctgaatcgtgtggtggttctgtgattccctagaggcatctaaaatagtcctactcctagaagcaagaatagaatggtggctgtagggtgggggtataaatgttagtta

SEQ ID NO: 41793 - DNA, 1279 bp, Homo sapiens
gcatgcccagggctgagatgctcatcatttttgttgtgatcggtataccacagcaactagtgaggttgatgaaatgcaaggaaaatgcagtggaaagctatcaaacactgtacaaacaagatgggtagcactacaaaagcagtattttgttgttgttgtttcattattgttattctacctcttagtttaggtccattttagagtgacaagagacaccatgagaaaaaaaaatccagggattccttcttttacttatggggagctttgacataattgagaaatatatgtttgtgaaacattactaaaaggttaaatgagcatttacacacacacacacacacacacacacacacagtgagcctggaaaataygtttgtgaagagataattgattctactattccacttgccccctagaaaaaagaaagggagaatgagggaatccccaaatcaaataacattcccttcaaatacaaaacttggagcgaataagcaattgactttcccatttggtgccttaattcctgtctgttagatttcctgctgtttcttgccggaaaatgttattatctatcactcttctggaatgaacagggtggagtacatctctctgaatctcactctccctcttccttgccctgataagcatggcagagctgggggctgttgacaggattcacattttcaactgataaagtgccatttacactatgaatgccaaaagagtggtgggtagtggtactcaaacatcactgtctaaggggggaaatagaccaggactcccaaacttagagagaatgccggaatgctggtgtccaagaacataaaaaggaggaagggaaaaagggagagttccaattagcattcatgtcagttattcctggtgaaattgtgggatcacagctttgtggattaaggattaagagcaaatttggctttgtaaatctccctccttgggataaatatctgttgaggattttctaaaccagtcacatatttctttaacaccccaatatttttactttcctttaataattagcttctatataaaaggcctgtttgcaattttttttgccctacattttagaggtaaaatgtccactgccaatttaattagttctcttgcctcccacctgtctctgacctggcagatgagcaatggaccaactagtaacatccctcagtgagctcactggtcagtctgggcccattattctgccagcttccacagaactggatccaatcttcagggatcatggtgcaataagcaaccagctttg

SEQ ID NO: 41794 - DNA, 540 bp, Homo sapiens
tgcccagctaatttgtttttttgtatgtgtgtatgtatttttagtagggacagggttttgccatgttgatcaggctggtttcgagctcctaggctcaagcaatcttcctacttcaacctccgaaagtgctaggattataagctagggtttctcaccatgtccagaagagaaaataatttttgagctgaaacctagaaagagtttgccaaaggaaaaatgccaataatcctcttgagtaagaaagacacagyaaaggcttatgtggaatggagaaaattggaaatagccgctatagagaatgggaggaatagaaaaacagggacagaggactgtcattttttttggtaggtctgggtgaggtgagagatcatgaatttgtgaaagcaccactgtatagaaatatatgattttccccaacagcagcaagtgtaaactcttaagatgtgaattttttctggagtggagtttttccaggagaatgtgataggaggacagtggggtaaggaggttgaagagtctgacagtgatagatgaagccat

SEQ ID NO: 41795 - DNA, 565 bp, Homo sapiens
gattttgtccacctgacatccacttcattgagtgggaattctgcccaaagaattactgaagaatgaattcccctgtttatttagagcttgatatcttcataaccattttgactaacattaaccatttagtcattaggacccaggagcacagataattggtattgaggttcacatatgtggtgaatttcaagcaaagaggtctcaaatatgaataagtgaatagtgcccttaaagcttcttattcagaatctacaaagtgatgaaacaaaggcaaaaaaaaaaaaggtgggatccccgaaactmgaaaaaccctagaagaaaatctaggcaataccattcagaacataggcacatgcaagggtttcatgatgaaaacgccaaaagcaatggcaacaaaagcaaaaatgacaaatggggtctaattaaactcaagagcttctgtacagcgaaagaaactatcatcagagtaaacagacaacctgcagaatgggagaaaatttttgcagtctattcaactgacaaaggtctaatatccagagtctacaaggaacttaaatttacaaga

SEQ ID NO: 41796 - DNA, 565 bp, Homo sapiens
gattttgtccacctgacatccacttcattgagtgggaattctgcccaaagaattactgaagaatgaattcccctgtttatttagagcttgatatcttcataaccattttgactaacattaaccatttagtcattaggacccaggagcacagataattggtattgaggttcacatatgtggtgaatttcaagcaaagaggtctcaaatatgaataagtgaatagtgcccttaaagcttcttattcagaatctacaaagtgatgaaacaaaggcaaaaaaaaaaaaggtgggatccccgaaactakaaaaaccctagaagaaaatctaggcaataccattcagaacataggcacatgcaagggtttcatgatgaaaacgccaaaagcaatggcaacaaaagcaaaaatgacaaatggggtctaattaaactcaagagcttctgtacagcgaaagaaactatcatcagagtaaacagacaacctgcagaatgggagaaaatttttgcagtctattcaactgacaaaggtctaatatccagagtctacaaggaacttaaatttacaaga

SEQ ID NO: 41797 - DNA, 1179 bp, Homo sapiens
cttcatcttccytctttcatttatgtttaacggtatctgtcctggagggtgtcagtggataacagaataaagccttctctaaccactccagaccagagagattaccctccattaatggtaattcctaaaatgtgcattgcaactttccagcctataaagtgtttttccacatcggctgtttcacagaatccttaaaacaatcctatcaataggtattattattcccattctgttgataagcaaactgagactcagagagagaagtggtttgcccaaggccacatagctgataaatgatggagctgagactggaatcataatggtctgacttcaaggtctagactgcttccagtatatcacaacagcctctcaactcctgcagatcctgaatagatcctgaacagagctctcccacttacccatgtcctgctctgtgatggtgcttctgtatagtcttaggtgtgtatttaattcctccaactcttgtgcaagctcaatgagaacagggactgactcttcttcggtgtttctttggatctctccagcaataagctcaagattgaccatgaagcagcttctcagaaatgaatggggtatttgttgatgttcccagaaatgcgaactgaaaagaccaactaggtgaaacattctgaagtgagagagcagttaggctgagcatagaaggctcctctctctatgagttctcatctctactcccactgctagagctctgtttgaaacatatttgatgatctaggtatctcagtagggcagcaatgaacaataaataggaatcatgagtttgcagcctctcgaaattcctgcgtggagacctatgggtgacccccagacagacaggaggaaggaaagaaaaatctcaagattgccagaactatgtctggcacatcctaaacacccaataaatatttgtgattgaatgaatgagagacaagaggacagggccagtggggataagaagaaaactgtgctagatcaaaaccagttgcctgggcaatctcagaggtctttctgtctgtgtagggagtcctggggttgcgctggggttggcatgggatgtctgtgttaatataggaagcctaggtactcaggcttgttaaactagttttatttcctgcgacttcttcatcttggcccttcctctctgacgtgtctcttatt

SEQ ID NO: 41798 - DNA, 1179 bp, Homo sapiens
cttcatcttccctctttcatttatgtttaacggtatctgtcctggagggtgtcagtggataacagaataaagccttctctaaccactccagaccagagagattaccctccattaatggtaattcctaaaatgtgcattgcaactttccagcctataaagtgtttttccacatcggctgtttcacagaatccttaaaacaatcctatcaataggtattattattcccattctgttgataagcaaactgagactcagagagagaagtggtttgcccaaggccacatagctgataaatgatggagctgagamtggaatcataatggtctgacttcaaggtctagactgcttccagtatatcacaacagcctctcaactcctgcagatcctgaatagatcctgaacagagctctcccacttacccatgtcctgctctgtgatggtgcttctgtatagtcttaggtgtgtatttaattcctccaactcttgtgcaagctcaatgagaacagggactgactcttcttcggtgtttctttggatctctccagcaataagctcaagattgaccatgaagcagcttctcagaaatgaatggggtatttgttgatgttcccagaaatgcgaactgaaaagaccaactaggtgaaacattctgaagtgagagagcagttaggctgagcatagaaggctcctctctctatgagttctcatctctactcccactgctagagctctgtttgaaacatatttgatgatctaggtatctcagtagggcagcaatgaacaataaataggaatcatgagtttgcagcctctcgaaattcctgcgtggagacctatgggtgacccccagacagacaggaggaaggaaagaaaaatctcaagattgccagaactatgtctggcacatcctaaacacccaataaatatttgtgattgaatgaatgagagacaagaggacagggccagtggggataagaagaaaactgtgctagatcaaaaccagttgcctgggcaatctcagaggtctttctgtctgtgtagggagtcctggggttgcgctggggttggcatgggatgtctgtgttaatataggaagcctaggtactcaggcttgttaaactagttttatttcctgcgacttcttcatcttggcccttcctctctgacgtgtctcttatt

SEQ ID NO: 41799 - DNA, 1179 bp, Homo sapiens
cttcatcttccctctttcatttatgtttaacggtatctgtcctggagggtgtcagtggataacagaataaagccttctctaaccactccagaccagagagattaccctccattaatggtaattcctaaaatgtgcattgcaactttccagcctataaagtgtttttccacatcggctgtttcacagaatccttaaaacaatcctatcaataggtattattattcccattctgttgataagcaaactgagactcagagagagaagtggtttgcccaaggccacatagctgataaatgatggagctgagactggaatcataatggtctgacttcaaggtctagactgcttccagtatatcacaacagcctctcaactcctgcagatcctgaatagatcctgaacagagctctcccacttacccatgtcctgctctgtgatggtgcttctgtatagtcttaggtgtgtatttaattcctccaactcttgtgcaagctcaatgagaacagggactgactcttcttcggtgtttctttggatctctccagcaataagctcaagattgaccatgaagcagcttctcagaaatgaatggggtatttgttgatgttcccagaaatgcgaactgaaaagaccaactaggtgaaacattctgaagtgagagagcagttaggctgagcatagaaggctcctctctctatgagttctcatctctactcccactgctagagctctgtttgaaacatatttgatgatctaggtatctcagtagggcagcaatgaacaataaataggaatcatgagtttgcagcctctcgaaattcctgcgtggagacctatgggtgacccccagacagacaggaggaaggaaagaaaaatctcaagattgccagaactatgtctggcacatcctaaacacccaataaatatttgtgattgaatgaatgagagacaagaggacagggccagtggggataagaagaaaactgtgctagatcaaaaccagttgcctgggcaatctcagaggtctttctgtctgtgtagggagtcctggggttgcgctggggttggcatgggatgtctgtgttaatataggaagcctaggtactcaggcttgttaaactagttttatttcctgckacttcttcatcttggcccttcctctctgacgtgtctcttatt

SEQ ID NO: 41800 - DNA, 631 bp, Homo sapiens
ccaactaatcctgacattttttaaagccatcatttcaactctcaggaaaggaatctgcaaaatccaaaagtgaggaagttcctaatgatagtttcaaaacccaagacccatagacaactattggtttaagagaataatgggagctacaatgcttcaagaaacccccccaaccaacccacgctgagcctgggaaatcctttcaatacattagcttaccccgtcttcataactcagggacaggtatcatcattgttcctattttgcaaagaaaaagctgacacacaaggagatgaagcaactcagttgaagtcacacaccaaggcagagctggaatttgaagccagttctttcttactctaaactctacattctaagcttggcatggtggctcatgcctgtaatcccagcactttgggaggtcaagatgggaggatcgcttgaggccaggagtttgagatcagcctggtcaacatagcaaaaccccatctctaaaaatataaaaataaacaagaaataaactccacacttttatgataatattctactaccttggctaacagagaaatacmaattttggggtatggactatcttttttccctatttagcctctttcatttgactctttttctc

SEQ ID NO: 41801 - DNA, 509 bp, Homo sapiens
caatgtggaaggaggaagattggttcccattgtgaataaggaaaaaatgagtcctggggttctgaaggcagcttgagatattttgagcrtttcacctctgaagtaagagtgcaaccctccaattcaaaagtgtaatttctagtccctttgttgaaaagtcagttatgaaactttacagtttcacttttggctttcggctgaacttttcagagcctttaaggcaaggtgggtaagtatttttagagatggtaacgaggcctgggggctatgcacacagctggagctcagcagatgtctcagaggagaaagatgagaacctcagtcatggtcaagacccctctccgaatggcttctcatccctcagacccacaagagaggtgcatcgtaagctcaagacacctgagacaccttaattctcttccccagccctctctctgtcccttgaaaggatgcaatgcgctggggagatgaaaccagtttgcatcttaggaaggatctggattgttttc

SEQ ID NO: 41802 - DNA, 509 bp, Homo sapiens
caatgtggaaggaggaagattggttcccattgtgaataaggaaaaaatgagtcctggggttctgaaggcagcttgagatattttgagcatttcacctctgaagtaagagtgcaaccctccaattcaaaagtgtaatttctagtccctttgttgaaaagtcagttatgaaactttacagtttcacttttggctttsggctgaacttttcagagcctttaaggcaaggtgggtaagtatttttagagatggtaacgaggcctgggggctatgcacacagctggagctcagcagatgtctcagaggagaaagatgagaacctcagtcatggtcaagacccctctccgaatggcttctcatccctcagacccacaagagaggtgcatcgtaagctcaagacacctgagacaccttaattctcttccccagccctctctctgtcccttgaaaggatgcaatgcgctggggagatgaaaccagtttgcatcttaggaaggatctggattgttttc

SEQ ID NO: 41803 - DNA, 540 bp, Homo sapiens
tgcagctttgcctggcttattcagactaatacaaagatataactaactgatagcagttccctttgtgagactaggtttgggtattagagaagaygagggagaaagtacaggctcttgaactcagctgggaggaaattcagtttggagaggaggcaggggtgccactagctgatttagcgacttttgtattaattcagaaaagaaattcgtaggtttacaattctatatgctgtacatgtgcactgaaactgaacagttaagtaaatggatggcagatggtgggagccaggcgtttcactgttggagtgggaggttacagataagcaaaaggagggggctagaatgatccagatccacgtggtaatgaattagtgttggagacatcagtatgaacttatatttagcttaatatagatatagatgttatgtatggaaatatttatagctatgtatatgtgagggctaatatacacacagatatttcccagctatatctcctgagaaagcctactagcaacaacattacagtagcaacaagca

SEQ ID NO: 41804 - DNA, 540 bp, Homo sapiens
tgcagctttgcctggcttattcagactaatacaaagatataactaactgatagcagttccctttgtgagactaggtttgggtattagagaagacgagggagaaagtacaggctcttgaactcagctgggaggaaattcagtttggagaggaggcaggggtgccactagctgatttagcgacttttgtattaattcagaaaagaaattcgtaggtttacaattctatatgctgtacatgtgcactgaaactgaacagttaagtaaatggatggcagatggtgggagccaggcgtttcactgttggagtgggaggttacagataagcaaaaggagggggctagaatgatccagatccacgtggtaatgaattagtgttggagacatcagtatgaacttatatttagcttaatatagatatagatgttatgtatggaaatatttatagctatgtatatgtgagggctaatatacacacagatatttcccagctatatctcctgagaaagcctactagcaacaacattrcagtagcaacaagca

SEQ ID NO: 41805 - DNA, 612 bp, Homo sapiens
cgtggctcgcccatggggacagggctggaaatggaagcacaggtttcctcttggcacctagctgtcagaactgtccccaggcatcccagcaggagggagacaaacaagcattctcatccggcaagctgatgtctgcatatgcaaatggactgaaggaccctcagccttgaatcctattcagaaacagtctacagagtgcctacctgtgccaggtgcattcacagaaatgatttcatttcatacaacagctctgtgaagcagctaggtattatttacctaagatttgttataaggacgctcaagttcagggagggtaaacaactcacccaacgtcacacatctagctgtggctgagacaggtctcaatcgatccagaaagtttatttaargatgcatgcccaggaagtaggtctgtgcctttttccaaagatgattttgagggcttcaatatttaatggggaaagggacgatgttaggaaaagaggaagaaatttttaaaaggtgtgggtaaatcagagacaaatggttgcattattttgagtctttgatcagcctttcactgaatacacaattatatgtgagagagggtagaagaataaccatttatgcctt

SEQ ID NO: 41806 - DNA, 612 bp, Homo sapiens
cgtggctcgcccatggggacagggctggaaatggaagcacaggtttcctcttggcacctagctgtcagaactgtccccaggcatcccagcaggagggagacaaacaagcattctcatccggcaagctgatgtctgcatatgcaaatggactgaaggaccctcagccttgaatcctattcagaaacagtctacagagtgcctacctgtgccaggtgcattcacagaaatgatttcatttcatacaacagctctgtgaagcagctaggtattatttacctaagatttgttataaggacgctcaagttcagggagggtaaacaactcacccaacgtcacacatctagctgtggctgagacaggtctcaatcgatccagaaagtttatttaaggaygcatgcccaggaagtaggtctgtgcctttttccaaagatgattttgagggcttcaatatttaatggggaaagggacgatgttaggaaaagaggaagaaatttttaaaaggtgtgggtaaatcagagacaaatggttgcattattttgagtctttgatcagcctttcactgaatacacaattatatgtgagagagggtagaagaataaccatttatgcctt

SEQ ID NO: 41807 - DNA, 583 bp, Homo sapiens
cctgcggagtgtccatcccagttcaggctaaaaatcagtggtggatcaacaggatctgtcacgggtgctaatggcaaagccaagagggtttttctgcatctcataaaaggtaaagggtaaaagttacaagacaaggaaatagatgtgaaaaagaatcaatttgcgggtacaccattcatgaatcaataacttttgctaatcaatcctagttggttaaaaagatctttttgaccaagatycacccactagattccataggcattaagaatccagctcagaggtagagtaagctgcctgtgtgatttcaaggacctcgtgtggtcttgtgccccaaactaccttcttacctgccctggagttacttaaaatccttgtcttacagatggaccctttgcattgggaaacctacttcccaatgctcatgtgttcatttacattgtcattcatcaagaaatagttagtgagaacctactgggtgccagggaccaagcatagggactatagtgtggtcaaaataggaagaggagaggtaagaatgggtatgtttgaagagcttacagtatacataggaaacaaggaaata

SEQ ID NO: 41808 - DNA, 583 bp, Homo sapiens
cctgcggagtgtccatcccagttcaggctaaaaatcagtggtggatcaacaggatctgtcacgggtgctaatggcaaagccaagagggtttttctgcatctcataaaaggtaaagggtaaaagttacaagacaaggaaatagatgtgaaaaagaatcaatttgcgggtacaccattcatgaatcaataacttttgctaatcaatcctagttggttaaaaagatctttttgaccaagattcacccactagattccataggcattaagaatccagctcagaggtagagtaagctgcctgtgtgatttcaaggacctcgtgtggtcttgtgccccaaactaccttcttacctgccctggagttacttaaaatccttgtcttacagatggaccctttgcattgggaaacctacttcccaatgytcatgtgttcatttacattgtcattcatcaagaaatagttagtgagaacctactgggtgccagggaccaagcatagggactatagtgtggtcaaaataggaagaggagaggtaagaatgggtatgtttgaagagcttacagtatacataggaaacaaggaaata

SEQ ID NO: 41809 - DNA, 1098 bp, Homo sapiens
tttattagagcaatcagaaaaaagatcacataattaccaagatgttgctttatgggcaaggggtacggccacatatgccttcattgatgtgaataataccaccctgggcattactatcacccagatttcacagatgctaaacccccagcatagcagttaggagcatggactgtggatcataggagattggggttgaagcctggcactgctacttattagctcttggttctcaagcaaattgtttattttgtatgggcctcactgtctgcacctrtaaaacagggacagtgatatttactttcaggatgttgggtaagtatcaaatacccggcatgatgctcactgatagctgttggcttaggctcaattttgaggtcactattatcccacctattcactggtgtgagatcaccttcaccaaggtaatgttccatgaggacggtgatggccagagaaatgttggactgaatcagggcacagctttcttggaggctatgctcaatatttattgtcaatctctctgcctctctctgtctctctttctctctcttaagtcagtctctctgtctctctctatctctctctctttctctctctctctctctttacccaaccacttttcttttgaatagccatcccagacatcaggtaaaccttgccctgactgaaagcattctttgaaccactttcttcaagcaaataggtacatttaattctaagaggaccaagacaccttagaagcaatacatggaaacctccttaattgactcagcaattgcagaatgagtccctgagtgacttttaccccaaatttagaagttggaaaggggtcacttacaacagaaaatatgtattttctagtttttttttgaagtatacttggcctatagtatttcctgaggggatcctaatgcctttctattaaagcatgaacccgaagttgtaaatttagagaaacaatttgaggtgagggtttgacataacagatggccaagggactaatgacaagatcatactcttggctgagcatttggaatgtctcattatttgtaaaacattgtttagaaattgccttcctggcatagaactggttgacac

SEQ ID NO: 41810 - DNA, 1098 bp, Homo sapiens
tttattagagcaatcagaaaaaagatcacataattaccaagatgttgctttatgggcaaggggtacggccacatatgccttcattgatgtgaataataccaccctgggcattactatcacccagatttcacagatgctaaacccccagcatagcagttaggagcatggactgtggatcataggagattggggttgaagcctggcactgctacttattagctcttggttctcaagcaaattgtttattttgtatgggcctcactgtctgcacctataaaacagggacagtgatatttactttcaggatgttgggtaagtatcaaatacccggcatgatgctcactgatagctgttggcttaggctcaattttgaggtcactattatcccacctattcactggtgtgagatcaccttcaccaaggtaatgttccatgaggacggtgatggccagagaaatgttggactgaatcagggcacagctttcttggaggctatgctcaatatttattgtcaatctctctgyctctctctgtctctctttctctctcttaagtcagtctctctgtctctctctatctctctctctttctctctctctctctctttacccaaccacttttcttttgaatagccatcccagacatcaggtaaaccttgccctgactgaaagcattctttgaaccactttcttcaagcaaataggtacatttaattctaagaggaccaagacaccttagaagcaatacatggaaacctccttaattgactcagcaattgcagaatgagtccctgagtgacttttaccccaaatttagaagttggaaaggggtcacttacaacagaaaatatgtattttctagtttttttttgaagtatacttggcctatagtatttcctgaggggatcctaatgcctttctattaaagcatgaacccgaagttgtaaatttagagaaacaatttgaggtgagggtttgacataacagatggccaagggactaatgacaagatcatactcttggctgagcatttggaatgtctcattatttgtaaaacattgtttagaaattgccttcctggcatagaactggttgacac

SEQ ID NO: 41811 - DNA, 1098 bp, Homo sapiens
tttattagagcaatcagaaaaaagatcacataattaccaagatgttgctttatgggcaaggggtacggccacatatgccttcattgatgtgaataataccaccctgggcattactatcacccagatttcacagatgctaaacccccagcatagcagttaggagcatggactgtggatcataggagattggggttgaagcctggcactgctacttattagctcttggttctcaagcaaattgtttattttgtatgggcctcactgtctgcacctataaaacagggacagtgatatttactttcaggatgttgggtaagtatcaaatacccggcatgatgctcactgatagctgttggcttaggctcaattttgaggtcactattatcccacctattcactggtgtgagatcaccttcaccaaggtaatgttccatgaggacggtgatggccagagaaatgttggactgaatcagggcacagctttcttggaggctatgctcaatatttattgtcaatctctctgcctctctctgtctctctttctctctcttaagtcagtctctctgtctctctctatctctctctctttctctctctctctctctttacccaaccacttttcttttgaatagccatcccagacatcaggtaaaccttgccctgactgaaagcattctttgaaccactttcttcaagcaaataggtacatttaattctaagaggaccaagacaccttagaagcaatacatggaaacctccttaattgactcagcaattgcagaatgagtccctgagtgacttttaccccaaatttagaagttggaaaggggtcacttacaacagaaaatatgtattttctagtttttttttgaagtatacttggcctatagtatttcctgaggggatcctaatrcctttctattaaagcatgaacccgaagttgtaaatttagagaaacaatttgaggtgagggtttgacataacagatggccaagggactaatgacaagatcatactcttggctgagcatttggaatgtctcattatttgtaaaacattgtttagaaattgccttcctggcatagaactggttgacac

SEQ ID NO: 41812 - DNA, 1572 bp, Homo sapiens
aggtgcactttaatgaatgtttggaaagtactttgaacatgaagtgcttagtattaatattgctttccaatgccctagacaatctaatgaaatagtatcttaatctatgtcacagctaattcattttcgaactgagtctactctatacagacttctgtttgagggtcattgggaagatttattcaccttggggcaaatattgacctcctgagcctccatcaatatttacctcttgggtcaataaatctcagtgttgaccttgataaaagtcaacatctgcatagaacctcagggtcttcttcatctgtgctgccttcgttctgagtctgtcacttgattctgttctaataaatcctatttgcaggagtttgtagcacaagctgttggcaggccctcagggggtgaggttgctgggtgtacccctgggcatttgtgcagaaatgctgaggagagattattgtagtgtttctaagagaattcctgatcttagattcttatttctcttctttggaggaggggttctaggaggacctacccaacatggaataaagtgcagactaggcaaactcctactagagtctgtcacactgacaattatattcactgaagagctaaaactatctatctatgggggagaagggggtgttgcccacatgccacccagcctgtgtctgcagatgtcagacagtggacaccaatctgaccatgctaatcaataacactcttcatgatggaacagatgtgttgctttcaccccagattatgaatatggctggaatagtctatcagctgggctggaatcctctgctttgtatgtacagatttagtcattcaatagctgttcattgaatatttattaagaaactactgagccaggccctgtgcacagatgaagtttttctctttctcaaaccttgtagttgcccactaattgctagagatggaaaatgaaaaaattcatgagataggtcccttgcactgaagggatttgaaagtgtaatatggataarttgagtggctttctaattttttctgtacctcccctcgctcaaatacacatccctcttccgttatggacaagtgcaggtggggaaatgggacatgtgcaaatttttggcattggagtcatatcctggctgggctgaggaaagtcattcactccaggggtggcacttttaaccactttcaggttaatcatctccagacatgttgaagtaactcattgtttgtagtcctcagggagtagtcagggaagttgccttggctgaagacgtaagaaacacatttcataagtgtaggaggtataggaggccttttggggtataaggagatgatatccaaaaggaagaagggcagttgtgaaattccaaatcaatagcatgcctgctgtgtttatcatgttttgtcttcggggtttgaacttaattgctttccatatagattcaagtggagaggatggttcgtcacaaagcattttgttcagaaacgttgcacagataaacagatttctagaataaatgtatgtaaaactcaaaaccctgtccaacacgtcttatgataaatgagactttt

SEQ ID NO: 41813 - DNA, 1071 bp, Homo sapiens
ctactttattagattgctaggggatggaataagggaatgcatgcaaaactcagcagtgggcctggccacaggcctcagtaccatctccccgtggctggtccccattcagcaatcacaaggcttcrggggtagagaaacatgctgaggccagcacactgaaaccattacaggttttgatttttttttctcaccactctcctccctcctcagttcagctttctattaaggtatcccaaaacactaacgcagctcttggtgaaaggagaaagggaaaaagtggccaaatcaaggggtcgggggacagcagggccaaggtcaaacacctcgttggtataacatcttttaatttgaggaggagctcagtccccattattttcagtaaattctcaaactatgcagctctatgtttcctcttctacccttgtagcatcaactctgcagtttgaagtaaggttttgcaaaacttatgcaaaaagttttcttttctacaagagatgctgaagaagtcacctggaatttgctagtagaactatcagtaaaatgaagacagcaatcctgccttcagcccaactccactgcccagaaaggctggcactgtggggacgaagggggcagtggcagctcaccctgatgcagagagagcggcaagggactctgatggtgagtcagctgagggaagctgctggggtctcagcacaccgtatagaaaatccctccagcaacttcagaaaaactgaatgaaaggccaaaggtaacataaaccgccagctctaccaaccactcaggctgcagaccagacaagggagtggattgttcccatggtggctgcacctttccttcattctattcccgctatcttagttcacgctgcctgtggatcaactcgggatctcagacacatctcgtcacaattatcaagtggcaaaaaaggtgagccgccatccccttggaggtaaagaaaggcatgacgaagtcttagggccaacaggggaacgaagtcttagggccaacagggttcccccggtgtctctcctgcagcatgaaggccattgtttccagggcctgtggcca

SEQ ID NO: 41814 - DNA, 1071 bp, Homo sapiens
ctactttattagattgctaggggatggaataagggaatgcatgcaaaactcagcagtgggcctggccacaggcctcagtaccatctccccgtggctggtccccattcagcaatcacaaggcttcgggggtagagaaacatgctgaggccagcacactgaaaccattacaggttttgatttttttttctcaccactctcctccctcctcagttcagctttctattaaggtatcccaaaacactaacgcagctcttggtgaaaggagaaagggaaaaagtggccaaatcaaggggtcgggggrcagcagggccaaggtcaaacacctcgttggtataacatcttttaatttgaggaggagctcagtccccattattttcagtaaattctcaaactatgcagctctatgtttcctcttctacccttgtagcatcaactctgcagtttgaagtaaggttttgcaaaacttatgcaaaaagttttcttttctacaagagatgctgaagaagtcacctggaatttgctagtagaactatcagtaaaatgaagacagcaatcctgccttcagcccaactccactgcccagaaaggctggcactgtggggacgaagggggcagtggcagctcaccctgatgcagagagagcggcaagggactctgatggtgagtcagctgagggaagctgctggggtctcagcacaccgtatagaaaatccctccagcaacttcagaaaaactgaatgaaaggccaaaggtaacataaaccgccagctctaccaaccactcaggctgcagaccagacaagggagtggattgttcccatggtggctgcacctttccttcattctattcccgctatcttagttcacgctgcctgtggatcaactcgggatctcagacacatctcgtcacaattatcaagtggcaaaaaaggtgagccgccatccccttggaggtaaagaaaggcatgacgaagtcttagggccaacaggggaacgaagtcttagggccaacagggttcccccggtgtctctcctgcagcatgaaggccattgtttccagggcctgtggcca

SEQ ID NO: 41815 - DNA, 1071 bp, Homo sapiens
ctactttattagattgctaggggatggaataagggaatgcatgcaaaactcagcagtgggcctggccacaggcctcagtaccatctccccgtggctggtccccattcagcaatcacaaggcttcgggggtagagaaacatgctgaggccagcacactgaaaccattacaggttttgatttttttttctcaccactctcctccctcctcagttcagctttctattaaggtatcccaaaacactaacgcagctcttggtgaaaggagaaagggaaaaagtggccaaatcaaggggtcgggggacagcagggccaaggtcaaacacctcgttggtataacatcttttaatttgaggaggagctcagtccccattattttcagtaaattctcaaactatgcagctctatgtttcctcttctacccttgtagcatcaactctgcagtttgaagtaaggttttgcaaaacttatgcaaaaagttttcttttctacaagagatgctgaagaagtcacctggaatttgctagtagaactatcagtaaaatgaagacagcaatcctgccttcagcccaactccactgcccagaaaggctggcactgtggggacgaagggggcagtggcagctcaccctgatgcagagagagcggcaagggactctgatggtgagtcagctgagggaagctgctggggtctcagcacaccgtatagaaaatccctccagcaacttcagaaaaactgaatgaaaggccaaaggtaacataaaccgccagctctaccaaccactcaggctgcagaccagacaagggagtggattgttcccatggtggctgcacctttccttcattctattcccgctatcttagktcacgctgcctgtggatcaactcgggatctcagacacatctcgtcacaattatcaagtggcaaaaaaggtgagccgccatccccttggaggtaaagaaaggcatgacgaagtcttagggccaacaggggaacgaagtcttagggccaacagggttcccccggtgtctctcctgcagcatgaaggccattgtttccagggcctgtggcca

SEQ ID NO: 41816 - DNA, 526 bp, Homo sapiens
gctcttttgggtgttgacaccatcatagactccatgggctgggagagaaacccacgtggggttcatccccctgcctctaggagggcattgatagactattccagggagatgggaggtctgtcttttcattcacaccatgttatgagctgtgagttttgattcattattcaccatgcaagcaaagtgaaaaaaatcatttaaattataaacacttggaaatttactatgggacacacaaaattttagactttgtcctggatataaacaagatatgctctttgcttttctgaagcttatattctgctgaatgagacagatacatgcaaagcaaattataatttaaactgagatgtgattagtgttgtaatgcagataaatacagtatattatgggagaataaaaaagtggaaggttactctttatggtgaatattaaggaaagcagagtgatatttcagttgggtcttaaagaagtggggtcaaggaggtgggcagaaacagaaagatgaagaggyacagctcatgtg

SEQ ID NO: 41817 - DNA, 1853 bp, Homo sapiens
tcctggaaactttgttcaccctgactcctgccctcttgactttctctgagaacacttttcactgaaggatcctttcaaatgtatctaaaaattgccaaccacttgttaaagtgtaagcaggtgcatacatctccttctcctttagattaatgattgcagatattctttccagtatggggcacattttagaattttaccttgctgtgtgcagcagggcagaagaatgggcctacatccattgctgaacctcctctttctatccttattgttacaaaattcacctccttggttaactgaactagcaacacaaatcatccctacctatttgcattttgctgttacaaaatatagagatggtttgtccaccctgtcccatgcaattgtgaccaggagaaacgctctggctcctggtacaaagagatagtctggaggcatcccagtagaacgcagaatgcagggaggaattacgtccctcaatcctctggtctgcagtaatcttatttccattatttttcatgctttctggtgctgccaacaaatgttgcaaaggcaagagccgatctttgacattctcgactgcctaaagtgcagcaaagagctgctttaatcccccttttgtgcctgcaatgactagaagaaaatttttgatcccatgcttggactgactaatggtgcattttgagtggcagccttccacttctgcagaaactgtaaaactcaaccaaacctggaaacatttgaagtttctgggttcaagaaccatgggttcagagaccctcacctccatgaatatgacttgttggacattcaatgactgtgcagtagagacaacaggggtgagtgtttagatagacccagtagctctgcctgctgagcccctctgccagtactctaacttcaatggatgtgcatgattcttcygttgtagcaaatatcattgtagtaaaaagtaatacatctcctcgtttaagtgacagcaggtagggtttgttactttaattcactttgcctttctcttctgaaaattaattgagtcagatactgaatctggagcctaactccttggcagctgagcaggagacaggaggatcatcatctgctatagagagttcttgagaagccaggaatagttaagaggaaattgaggcaacttggaaaggcaaagcaggtcaccagaagtggtaggagagagatcttcaagcagcacagcagttaaagaactttatagcctcttcccaacaaatgctcattgtcgcacttcctgtcacctctctctcctgcatccctctctatctatgttccaggcacacgggactttgcattacttccaaaggtcatggtcaccgtcacaatttccatgaccttactcatgctggcaactctgcttgaaacgtccttaactcatcttctccacctggaaaaaatccaaacctttgatgaagtttgggtaaagtcactttctgcagtggagaatgctccaggaagaatgtattgttcttacgtcagcactcccataaaacctctattttagcatttacttccttacacatagactttttccattcccacttcacactgtgaggatctcctggacaagcattagtctcagaacttatgtttggaactcttacacaggctggattttctaaaagctactaaaaaaatgcttgtttgaaattaaagatccaatgttagaaagtatgttatattaaaaaatggccatcctatattacccagaatcaaaattggaatggagaggtggagacataggttttgaatcgatacaaagaactttctgatcactggagcagttcaacaatggaagcttctcaaagacatgagccccctgttcc

SEQ ID NO: 41818 - DNA, 1213 bp, Homo sapiens
agccccaggtctgccttagctctgtattcttggggtattttgttctgtattggcctatcttgactaacaatgagccttggatttgaaacatatcatcagaaacctcagaagacaacattcttaaactggctagagcctggtctgaatggatgaaaaggagagacttttgaagcaatatgtaaaagattgagaaatgatttgttggaaatttctcaattggagaaatttctttgatttgttggaaatttctttgattctttctcaatcaaagaaaatcgggacaaactcaacaatagaaagggaggaagcaagatactcagaaataaaatgcattcccctgtttcaacttaatgcttcaattcaggattctaaggaatccttgccaggaatgtcagactcaccttgatagttggagttactccattggtgactcgatcaaatacaggagttgaggcacctgcactgtaaaatactgattagtctgatcattaggaatatcctgtatgccaggtagaagatacattgaacagattgcatgtaggcattaaattcattttggggtattacatatagacaacacatttcattaagaaacataaaactgtcagatcggtggaatacttaaaagcacttggaggtgtttagcctaaaaagcttagttgaggggaatggaagaaaagatctgggagggtggttccaaagaagggatcagactatcctaaagccctcaggaatctgggctgggaccacctacttaaagataggatgggcagctgggtgtggtggctcacgcctgtaatcccagcacttcgggaggccgaagcgggcggatcacctgaggtcaggagttcgaggccagcctgaccaacatggagaaacrctgtctctactaaaaatacaaaattagctgggtgtagtggcgcatgcctgtaatcccagctactcgggaggctgaggcaggggaatcgcttgaacctgggaggtggagggtgccgtgagccacgatcgcgccattgcactccagcctgggcaacaagagcgaaactctcaaaaaacaaaaaaaaggatgggttccatatgggtggtgtcaagtgcccacctcctagcaagtcagcaggggccagaggcccttgtaagtggtgtctcggggggatcaactgagatggcttaagatttacctggatgcctgctctgctctccccatctcttccag

SEQ ID NO: 41819 - DNA, 541 bp, Homo sapiens
cagtaccatttaatgaaatatagtattttgataatatatagtactgtgtcaccacttgaccccaatgaatgaattttgaaatgtacttctaaatttctacaacattaaaactacgattcataccaatttctagttctcccactctttcatgtgctttgaaaggttttccctctctcattttccagattgatacattcagatttcttcagtaatcaaatgactaagttggaattactgcacaggttgagtatsccttgtgtgaatgcttaggaccagaaatgtttgggatttcagaatattttcatatttataatgcagtatcttggggacaggacctgagtctgtacaccctatacacatagcctgaaggcaattttatgcaatattttaaagaattttctgcatgaaacaaagtttcaaatgcaccccatcacacaaggtcaggtgtggaattttccacttgtgcatcacgtcagtctcaaaatgtttcagattttggagcacttcagattttggactttgggattagggatgctcaacc

SEQ ID NO: 41820 - DNA, 309 bp, Homo sapiens
gcacacggcagccgggccagggacgaccctgtcagctgcagccccagaggtccggggcgcgcagccgggtcccctcgagggcgcagccggccgccccgccccgcccctcgaagcagccgggccgggcgcgcagtgggctacaaactttcgcrgcgcgagtccgccaaggcagcgcgccgactcgggctcggctcggctctgcgctgctccggacggctgtgaccgctggccgggggctcgggccaccggtacccacggaccgcgcgcccgggtgcctgctccgctaagcccctcgccccgcgcggacct

SEQ ID NO: 41821 - DNA, 674 bp, Homo sapiens
tatttgtctcagaagattgaattgtggactgtgaccttctctcccaaaagtctctttcagggtagaacttctggttatggcaacatgaagagatagaccagcaagttttcctccaacagcaacatgaaaactgtactaaatactaaaaacaaacatttgaagtcactggaaaattaacaaaggcaagcaatatgtgataagagctttcttgtttaagactccttctgtcttaggtaaggactgcaagttggtggcctttccttcttacctatgagtgctcttcagcctcccagcagataactgcagccctagtggctcaatatgggcagtttatagagttcagagcccaaatcagctagaaatgtaaatgagaatgttgaaagagagctgcagaagagttgagatcaacaatgtgaatgcaaattatgctcatccctagttgaacactaaactctgcatgggtgtgggccacttgggaatctggtgaaaaaccagaaagaaactagagggaggtctaccctccaaagagataaatgatcctggtragatctgcaagtcttcagtaacatggactgagtgcatttgccaacctgcacagagctcagtagaagaaagcaaaaatcttactggcttgagaggtgaaaaggcaggatttgagtctaacaaaacaattg

SEQ ID NO: 41822 - DNA, 1766 bp, Homo sapiens
cttcctaccctgcgtgtgcgaactctctgtgctgggctgggcagggcagattgggtcaccctgcacagaatggggctggactgtctggtcctcaacttctgaggtgacaggtgctgtggaggcacgtggaagaaaaaagctcctgggctgagtctcctccaccagctgggggcagcagagctgcagccaggagcagtcaggattaaggctggggctgcccagctggggcaaagagaaggccagcctggcgttcaacaggtgtccaagaatcagtcttcagactgaaagtgagtgcagttcatcctatcccctcaggctgcagtgaccattctctgagggtcagactcatacagtgtcaccccaggacactgacagaagcccggcacagtgaaggcctcacctgggaaatgcagctggaggaggctgggaccaggtgtcaactggggcagcttactcaggaaggggatttctttggagacatcccaaggttgaggtgctctaggagggggcacagcgtgaggtgacggggctcccagggcccgggttcttcacccaggatggctgtctgagcctcctgccactctcagggccttgtccctctcagtccagcagcaacctggggagctgagccctctgtcctgggcacttccagatacaccatacctcacttccttctgcctcaccttccagctccaggcggactctgactcagggggaaactcctgtgctcaggggagtctcgggtgggtggggtgaagcatttgggatcctgatcccttcatggggcatccccagcatccttaaggagacactcttcagagggacagggcttctcacctgcctcagctctgaccatggggctgtccacactcagtgacaggacactgaccagggatctgactggagtgaccaggaacctggctggggcaaccagggaccacccaccctctggagctcacatgctgtgcagagaccatgaccctgggaccccttcagagaccatggggcctgaagttagattttcagtccagtgtggttttctcctgctttttgcaagtttacataaaacattgatgagaaaaacatacataaataacagacgagctgagggtgccaattgctaatctcttgtggcaatgaggggtgatgtagcaggagcagcaccatggctgaaatgagaccagaggccctgttgactccacaggggtgtgtggttgcttaaatgacccaactattcccactgaataatcagcaagtgtcccaatgacacagcacagcatttagatgaaatgaacaagaggggactgagtctgagggaccagggggaggaagatcatgggtccctgggccacctgctgctgagtcaggtgtcagcaagatctctccgcagagcccagctcagcccatggccaacctcctggaaggtccacagctctgctgagcctggcccaggacagaccccaggtcagcgaggtttgggacagtggtcatgagattaattcccagaaaggtgactgtgatcacagggcttgaaggctgcagctgattttctaatctgagaccctgcttcttcctcctgttgcctgtgctgccctcacagctggtttgagtgacatctctccaggaggartcgcagaggatgtaaatttgcataaacgccaaacactgactgcccccaaaagctggagagggaataagagaggcctggggagcccagctgtgctgtaggctcaggaggcagagctctgaatgtctcaccatggcct

SEQ ID NO: 41823 - DNA, 688 bp, Homo sapiens
agcttgtaccaccacccctagaaagtaaaaagccctctccttaaagccttctagctgtaccatcaaccacttaactcagaaacatatagtttccccacttgtccctctagccaatttaacgctcccctcccctggacctcagctcaccctccttctggctctgaactgaggtcttgctcccagcatcccccttacctgggacaagccctgtgggcagaaaaggcctccagcccatccaccacagcttgcaggctgtcttggttgggccactgcactatcagagagcccagatggagaaaccggaagggccaggcctgcaccaaggccttcagagcctttctgtgccccttggcaaatgcagcagtgagtagtggcgggaaaaggttcactgtgagctgttccaacaccagtggaactgaagcctcattgctcagcaggctgtgggctgcaagttccaagaggctgaggggtgctgggtggttcacctccatggacctggagcagaagaaggtagaaatcctcagaagactaatggctcagcatcactcccaggccartgtgggagatgcaggcctttcgcatctgtcacagaaccaaatgctggctcctccctccattcaagaccaaaactccacaattcaggtcttgtaagcctgagaccctggagccctaagaccctggggacatg

SEQ ID NO: 41824 - DNA, 843 bp, Homo sapiens
ataagagagagcccaggacagcaggcaggctctccgatccccccaggcccttgccccatacacgggctccagaacacacatttggctggaacagcctgagggaccaaaaggccccagcatcccacagagctgaggagccaggccagaaaagtaaccccagagttcgctgtgcaggggagacacagagctctctttatctgtcaggatggcaggaggggacagggtcagggcgctgagggtcagatgtcggtgttgggggccaaggccccgagagatctcaggacaggtggtcaggtgtctaaggtaaaacagctccccgtgcagatcaggacatagtggaaaacaccctgacccctctgcctggcatagaccttcagacacagagcccctgaacaagggcaccccaacacctcatcatatactgaggtcaggggctccccaggtggacaccaggactctgaccccctgcccctcatccaccccgcaggtcagcccaaggctgccccctcggtcactctgttcccgccctcctctgaggagcttcaagccaacaaggccacactggtgtgtctcataagtgacttctacccgggagccgtgacagtggcctggaaggcagatagcagccccgtcaaggcgggagtggagaccaccacaccctccaaacaaagcaacaacaagtacgcggccagcagctacctgagcctgacgcctgagcagtggaagtcccacagaagctacagctgccaggtcacgcatgaagggagcaccgtggagaagacagtggcccctacagaatgttcataggttctmaaccctcaccccccaccacgggagactaga

SEQ ID NO: 41825 - DNA, 794 bp, Homo sapiens
cctgggctgctccccaggccccagcaccagcccgcctcgcctctcctctgcaataggcttttcctccctcactcaggctccttgtcagcccctattcctcatacagcttgtaccaccacccctagaaagtaaaaagccctctccttaaagccttctagctgtaccatcaaccacttaactcagaaacatatagtttccccacttgtccctctagccaatttaacgctcccctcccctggacctcagctcaccctccttctggctctgaactgaggtcttgctcccagcatcccccttacctgggacaagccctgtgggcagaaaaggcctccagcccatccaccacagcttgcaggctgtcttggttgggccactgcactatcagagagcccagatggagaaaccggaagggccaggcctgcaccaaggccttcagagcctttctgtgccccttggcaaatgcagcagtgagtagtggcgggaaaaggttcactgtgagctgttccaacaccagtggaactgaagcctcattgctcagcaggctgtgggctgcaagttccaagaggctgaggggtgctgggtggttcacctccatggacctggagcagaagaaggtagaaatcctcagaagactaatggctcagcatcactcccaggccartgtgggagatgcaggcctttcgcatctgtcacagaaccaaatgctggctcctccctccattcaagaccaaaactccacaattcaggtcttgtaagcctgagaccctggagccctaagaccctggggacatggg

SEQ ID NO: 41826 - DNA, 989 bp, Homo sapiens
tgcctcatcctattatttatcgcacctacgttcaatattacaggcgaacatacttactaaagtgtgttaattaattaatgcttgtaggacataataataacaattgaatgtctgcacagccactttccacacagacatcataacaaaaaatttccrccaaaccccccctcccccgcttctggccacagcacttaaacacatctctgccaaaccccaaaaacaaagaaccctaacaccagcctaaccagatttcaaattttatcttttggcggtatgcacttttaacagtcaccccccaactaacacattattttcccctcccactcccatactactaatctcatcaatacaacccccgcccatcctacccagcacacacacaccgctgctaaccccataccccgaaccaaccaaaccccaaagacaccccccacagtttatgtagcttacctcctcaaagcaatacactgaaaatgtttagacgggctcacatcaccccataaacaaataggtttggtcctagcctttctattagctcttagtaagattacacatgcaagcatccccgttccagtgagttcaccctctaaatcaccacgatcaaaagggacaagcatcaagcacgcagcaatgcagctcaaaacgcttagcctagccacacccccacgggaaacagcagtgattaacctttagcaataaacgaaagtttaactaagctatactaaccccagggttggtcaatttcgtgccagccaccgcggtcacacgattaacccaagtcaatagaagccggcgtaaagagtgttttagatcaccccctccccaataaagctaaaactcacctgagttgtaaaaaactccagttgacacaaaatagactacgaaagtggctttaacatatctgaacacacaatagctaagacccaaactgggattagataccccactatgcttagccctaaacctcaacagttaaatcaacaaaactg

SEQ ID NO: 41827 - DNA, 886 bp, Homo sapiens
atcatccacaaccttaacaatgaacaagatattcgaaaaataggaggactactcaaaaccatacctctcacttcaacctccctcaccattggcagcctagcattagcaggaatacctttcctcacaggtttctactccaaagaccacatcatcgaaaccgcaaacatatcatacacaaacgcctgagccctatctattactctcatcgctacctccctgacaagcgcctatagcactcgaataattcttctcaccctaacaggtcaacctcgcttccccacccttactaacattaacgaaaataaccccaccctactaaaccccattaaacgcctggcagccggaagcctattcgcaggatttctcattactaacaacatttcccccgcatcccccttccaaacaacaatccccctctacctaaaactcacagccctcgctgtcactttcctaggacttctaacagccctagacctcaactacctaaccaacaaacttaaaataaaatccccactatgcacattttatttctccaacatactcggattctaccctagcatcacacaccgcacaatcccctatctaggccttcttacgagccaaaacctgcccctactcctcctagacctaacctgactagaaaagctattacctaaaacaatttcacagcaccaaatctccacctccatcatcacctcaacccaaaaaggcataattaaactttacttcctctctttcttcttcccactcatcctaaccctactcctaatcacataacctattcccccgagcaatctcaattacaatatatacaccaacaaacaatgttcaaccagtaactactactaatcaacgcccatartcatacaaagcccccgcaccaata

SEQ ID NO: 41828 - DNA, 814 bp, Homo sapiens
gcctgaggctggtcaaaattgaacctcctcctgctctgagcagcctagggggcagactaagcagagggctgtgcagacccacataaagagcctactgtgtgccaggcacttcacccgaggcacttcacaagcatgcttgggaatgaaacttccaactctttgggatgcaggtgaaacagttcctggttcagagaggtgaagcggcctgcctgaggcagcacagctcttctttacagatgtgcttccccacctctaccctgtctcacggccccccatgccagcctgacggttgtgtctgcctcagtcatgctccatttttccatcgggaccatcaagagggtgtttgtgtctaaggctgactgggtaactttggatgagcggtctctccgctcygagcctgtttcctcatctgtcaaacgggctctaacccactctgatctcccagggcggcagtaagtcttcagcatcaggcattttggggtgactcagtaaatggtagatcttgctaccagtggaacagccactaaggattctgcagtgagagcagagggccagctaagtggtactctcccagagactgtctgactcacgccaccccctccaccttggacacaggacgctgtggtttctgagccaggtacaatgactcctttcggtaagtgcagtggaagctgtacactgcccaggcaaagcgtccgggcagcgtaggcgggcgactcagatcccagccagtggacttagcccctgtttgctcctccgataactggggtgaccttggttaatattcaccagcagcctcccccgttgcccctct

SEQ ID NO: 41829 - DNA, 814 bp, Homo sapiens
gcctgaggctggtcaaaattgaacctcctcctgctctgagcagcctagggggcagactaagcagagggctgtgcagacccacataaagagcctactgtgtgccaggcacttcacccgaggcacttcacaagcatgcttgggaatgaaacttccaactctttgggatgcaggtgaaacagttcctggttcagagaggtgaagcggcctgcctgaggcagcacagctcttctttacagatgtgcttccccacctctaccctgtctcacggccccccatgccagcctgacggttgtgtctgcctcagtcatgctccatttttccatcgggaccatcaagagggtgtttgtgtctaaggctgactgggtaactttggatgagcggtctctccgctccgagcctgtttcctcatctgtcaaaygggctctaacccactctgatctcccagggcggcagtaagtcttcagcatcaggcattttggggtgactcagtaaatggtagatcttgctaccagtggaacagccactaaggattctgcagtgagagcagagggccagctaagtggtactctcccagagactgtctgactcacgccaccccctccaccttggacacaggacgctgtggtttctgagccaggtacaatgactcctttcggtaagtgcagtggaagctgtacactgcccaggcaaagcgtccgggcagcgtaggcgggcgactcagatcccagccagtggacttagcccctgtttgctcctccgataactggggtgaccttggttaatattcaccagcagcctcccccgttgcccctct

SEQ ID NO: 41830 - DNA, 433 bp, Homo sapiens
tttcccatgtttgcatatctcattatactgtacaatataattagtaatgttattttgaaaagctttatgcagtaattagcgaactactggaaagtttgaagttcctaggattatatacatctggattcagaggaaggaaataaaatctataaattttgaaaagtatgactaggctstaagaactttgataaaatatgtcagatgagaatgtgagcaaactggaactctgttctagcatgagtcactataggtttgaaattcgtataaagctggtacttcttggacgctgttcatggtaatttaattactgaaataataagagaacctcattatgcggatcatatgtctgaggtgttctcattgcaaggactccaaggacagcattttagagaactctggcatagtaggtactattaaaaagaacattctgttg

SEQ ID NO: 41831 - DNA, 986 bp, Homo sapiens
gaccgtttagacctagccagccacgcaggaatctgtccccagaagcagcagaagcacctggtctgcagttaggagatactgtacttcttagccgtgtcaccttgggcaagtcatttaacctctctgagcctctgctgtcacatcagtaagctggggactgtagatcttctgccctgatgtcctgagactggtacaagaagagccaaagcgaaaggactgccttcagaaatggctgccaaccctgaccatctcaggcagatccggatggtgtggccttgggcagtggtcatgtgacccccrtgctcctcagtgtccacatggggtgttgctagatgacataaaataatgggtgagacgtgctcagtataatgagagcttgagaaggcagatcccaccccccatccccacccccaccccttgccgccttgccaatgctttggcagggagagggcagctccatagggcagctgagaaacagcccctcactgcccacacggcagctccagtggagggggaggcagggaccaggacaggaagcaggctaagggcgggatagaaaagcaaaccccagtctggtggaatcgcttctggtgtagtcttcccggtgccatgtgtttgtcctctctgccttggcaggaaccaaggccaggaactgctgccaggcctgagagctgggcacagtcccaagcactgggtcgctaccccgccccactcccaccagccccactgagtgcagagaagggttcccagaagccctttgctggaaaagcaggcactgcacgggcagcccgtgttgtagaggcaagtcctctggcatcttgggggggacacagaccagaaagtggacttggagcttgtgctcccagacagagctgccttggtggttgagaaggggagagagatggcagcagttgagcagagatggccgggctcccctcactgtgtggggtgaggcttcaagcactggactgggagtcagacctgga

SEQ ID NO: 41832 - DNA, 1200 bp, Homo sapiens
tcacacctgtaatcccagcactttgggaggccgaggtgggcggatcacgaggtcaggagaacaagaccttcctggctaacacggtgaaaccccatctttactaaaaatacaaaatagccaggcgtggtggcgggcgcccgtagtcccagctacttggcaggctgaggcaggagaatggcctgaacccgggaggcggagcttgcagtgagctgagatcgcrccactgcactccagcctgggcgacagagcgagactctgtctcaaaaaaaccaacaaaaaaaagaaattctaacagaaaaatattaaagttctccatcatagaatctttggattccaaagtcctggcccctcagcaatttgaaatagcacagcctagcatttctgcaatcacaacatattggaaacttgaaataactgagcatctgggaattttgaattcagtggctgttgggatctctgaattccagaatcttaaaatcactgaaactctggaaacagcaaagaccagaatcacaaatgctatgcactcacacacttggaataaataaatgcatttttttttcttttgagactgggtctcactctgttgcccaggctagagtgcagtggcatgatcatggctcactgaagcctccttctcttccattcaagtaatcctcctgcctcagcctcccaagtagctgggacgacgggtgtgcgccaccatgtcaggctaattttttattttttgtagagactgggtctcactatattgcccaagctgttctcgaactcctgggctcaagtgatcctcccacctcagcctcccaaagtgctaggattacagacatgagccacctcgcccagcccagaataaatgaatcttacaggaggaaaattaaaaataagaaagcccatgaggctgggcacagtggctcacacctgtaatcctagcactttgggaggctgaggtgggtggatcacctgaggtcaggagttcgagaccagcctggacaacatgacaaaaccctgtctctactaaaaatatgaaaattagccaggcatagtggcgcatgcctgtaatcctagctactcaggaggctgaggcaggagaattgcttgaacctgggggatggagggtgcagtgagctgagatcacaccactgcactgcactccagcctgggtgacagagcgagactccatctcaaaaaaaaaaaaaa

SEQ ID NO: 41833 - DNA, 519 bp, Homo sapiens
ttttttgagatggagtttcgctcttgtcgcccaggctggagtgcaatggcatgatctcggtcagtgcaacctctgcctcctgggttcaagcgattctcctgcctcaccctcccgagtagctggaattacaggtgtctgccaccacgcccaactaatttttgtatttttagtagaggcggtgtttcaccatgttggccaggctggtcttgaactcctgatctcaggtgatccagccgcctcagcctcccaaagtgctgggattatagscgtgagccaccacgcctggccaaattctacattcttgtttggggattattcttgaacaaccagcctgccttctttctgtcctacctccctgagcatcttaggcagggtgcattttcatttaaaaaagtatttcatacaacaaaataagccaggcatggtggctcatgcctgtaatcccagcactttggaaggccagggcaggcagatggcttgagcctagaaattcgagaccagcctggtcaacatggtgta

SEQ ID NO: 41834 - DNA, 1134 bp, Homo sapiens
tggacatgtgttgtgcccctggaggaaagaccagctacatgggtatgagaggggcaggcaggtgggattcatcgggctgtcttgcttttgaaagtagatggggttgctggggttgctgactcactagtgctcatggaacacaatgtgcaggtagctagcagggtggtgaggaccagtttctggagtcggcctgggttccagtgtgccacttactacccatctgactatggattctcttttgtcatccataaaatgggatggtaattgtgcttgggttggcccttgtattacgcttggattgtgagggttaaaatgatgcgtttagaagtccttggcagtgttcagcacatagtcagccataacttttattaagctgctgtcacttaaaagaagtaatttagtatgtaggaccacataggtgtttggtaaaaatgggaaaaccacatcggtagacttgccgatcaccaggggctagtgcagagtggatcagcctatacagtaggcaggcttgttgggagcgaagttgccttgaggtgatgacacttctcatgtggattcctggacaggagggtgggagcaagtgtggagacagtggaactggctgatcagcactgttactgccctctctttagcccagctgatgaagaacacgggtgtgatccttgccaatgacgccaatgctgagcggctcaagagtgttgtgggcaacttgcatcggctgggagtcaccaacaccattatcagccactatgatgggcgccagttccccaaggtgagactcrgactgtgtgtcttctgaggcttcttccggttgaccttctcccttcctgacctcaatgtttagactcgaccctagtaaatattgccctgctggttgcagaagagacatatgattcatctgtatcttttctccaggtggtggggggctttgaccgagtactgctggatgctccctgcagtggcactggggtcatctccaaggatccagccgtgaagactaacaaggtgaggagtcaggtggtgggcccctgagaggccttggctgggtctcgtagagctggaaactgagatggggacaccctctgggctcccctctcctcctgaggctgcctttgggtctctttttgggacagg

SEQ ID NO: 41835 - DNA, 1134 bp, Homo sapiens
tggacatgtgttgtgcccctggaggaaagaccagctacatgggtatgagaggggcaggcaggtgggattcatcgggctgtcttgcttttgaaagtagatggggttgctggggttgctgactcactagtgctcatggaacacaatgtgcaggtagctagcagggtggtgaggaccagtttctggagtcggcctgggttccagtgtgccacttactacccatctgactatggattctcttttgtcatccataaaatgggatggtaattgtgcttgggttggcccttgtattacgcttggattgtgagggttaaaatgatgcgtttagaagtccttggcagtgttcagcacatagtcagccataacttttattaagctgctgtcacttaaaagaagtaatttagtatgtaggaccacataggtgtttggtaaaaatgggaaaaccacatcggtagacttgccgatcaccaggggctagtgcagagtggatcagcctatacagtaggcaggcttgttgggagcgaagttgccttgaggtgatgacacttctcatgtggattcctggacaggagggtgggagcaagtgtggagacagtggaactggctgatcagcactgttactgccctctctttagcccagctgatgaagaacacgggtgtgatccttgccaatgacgccaatgctgagcggctcaagagtgttgtgggcaacttgcatcggctgggagtcaccaacaccattatcagccactatgatgggcgccagttccccaaggtgagactcaractgtgtgtcttctgaggcttcttccggttgaccttctcccttcctgacctcaatgtttagactcgaccctagtaaatattgccctgctggttgcagaagagacatatgattcatctgtatcttttctccaggtggtggggggctttgaccgagtactgctggatgctccctgcagtggcactggggtcatctccaaggatccagccgtgaagactaacaaggtgaggagtcaggtggtgggcccctgagaggccttggctgggtctcgtagagctggaaactgagatggggacaccctctgggctcccctctcctcctgaggctgcctttgggtctctttttgggacagg

SEQ ID NO: 41836 - DNA, 1134 bp, Homo sapiens
tggacatgtgttgtgcccctggaggaaagaccagctacatgggtatgagaggggcaggcaggtgggattcatcgggctgtcttgcttttgaaagtagatggggttgctggggttgctgactcactagtgctcatggaacacaatgtgcaggtagctagcagggtggtgaggaccagtttctggagtcggcctgggttccagtgtgccacttactacccatctgactatggattctcttttgtcatccataaaatgggatggtaattgtgcttgggttggcccttgtattacgcttggattgtgagggttaaaatgatgcgtttagaagtccttggcagtgttcagcacatagtcagccataacttttattaagctgctgtcacttaaaagaagtaatttagtatgtaggaccacataggtgtttggtaaaaatgggaaaaccacatcggtagacttgccgatcaccaggggctagtgcagagtggatcagcctatacagtaggcaggcttgttgggagcgaagttgccttgaggtgatgacacttctcatgtggattcctggacaggagggtgggagcaagtgtggagacagtggaactggctgatcagcactgttactgccctctctttagcccagctgatgaagaacacgggtgtgatccttgccaatgacgccaatgctgagcggctcaagagtgttgtgggcaacttgcatcggctgggagtcaccaacaccattatcagccactatgatgggcgccagttccccaaggtgagactcagrctgtgtgtcttctgaggcttcttccggttgaccttctcccttcctgacctcaatgtttagactcgaccctagtaaatattgccctgctggttgcagaagagacatatgattcatctgtatcttttctccaggtggtggggggctttgaccgagtactgctggatgctccctgcagtggcactggggtcatctccaaggatccagccgtgaagactaacaaggtgaggagtcaggtggtgggcccctgagaggccttggctgggtctcgtagagctggaaactgagatggggacaccctctgggctcccctctcctcctgaggctgcctttgggtctctttttgggacagg

SEQ ID NO: 41837 - DNA, 476 bp, Homo sapiens
cctggccctgctaaraaagggtgtgcccagggctcttccctgacttccccgtttccggtcaggcttctgccagctctacctgaatgagaaggactacccgcctggctatgccttcgacgtagaggccatgaactttccatctagcggcctctgctttgcgggacttgtatccatgattgacccaccccgggccaccgtccctgatgctgtgctcaagtgtcgcaccgcaggcatccgggtatgccactgtggggaggaacaagtggagtgaggacagaggatggcagcaggatttgggttgaagaaccccatgacaaacccacctgaaactggcttgaaccaaaatgcattggtttatgatactgaaaaattctggggaattaagcttcaggtctagccagatccaggagctcagtgtcattaggaattttcctttctccaggtctcagctctgctgttctctttgctggctttat

SEQ ID NO: 41838 - DNA, 1073 bp, Homo sapiens
atttctatatgctagaatctaaatttcttaactttctgtagtatgggccattttcaaatcagctaaagtcctaaaaccagactatgggaaacacacacttctaagctcaatattaaatatctaaagtgactaactaacgtagggttggagaggcagggtccccctggacttttcaaactcctaccctcacaaaaaatctagaacttcttctcagtaacaaaaataagatgacgtataatcatttttcattgttaataaataatctctatccatcatggcattgcattgaatttgtgttaattgttgctaaaaaatgactgtgggttaaacatttgtgattcatataataatagaaataataaatgtaaatgttttaagtgaacaagygagattttaatagctcaacaggcaaatagcatgaactgatgctctgcaaaggtgagggacacctggcctgagacaggatgtcttatctgattttggtctgaatttcatttggaaaactggcagctgctggtcaacctgcagggatatgatcccatgagctgatatgcaatgttgacttttgtatttttgtcagcatgaaataatttttttttttttaaatcagggtcagagtctcgagtaactagcagccagctgatagaatggaagtgaaaccatggccctcgtccccttagcaaacctggaaacccagtgttgagcatgtgtgaagagagaaacagaatcaggtgaaatgaaatcttcctaagaccctgctcaggaaactaaatttgacgtaattggacacaagaagttgttcatccattctattccgccagaggagacaggacagatttcccgtgcgttcttgggaagctggaagagggagacagctctgccaggtggagtgatattctcatgagaagtgaaaaagaagaggcagagatggagagtttggttctagaagggtggaaggttttgcttataaacatatcaacacactgcttttcccgccaagatgcaaactttggggaatgtgctgaaatataagatggggtaaaaatattggacagccaaaaatatgacccatg

SEQ ID NO: 41839 - DNA, 2854 bp, Homo sapiens
tccggcgaagacttccaccggatgccccgggtgggccggttgggatcagactggaccaccccggaccgtgctgttcttgggggtgggttgacgtacagggtggactggcagccccagcattgtaaagggtgcgtgggtatggaaatgtcacctaggatgccctccttcccttcggtctgccttcagctgcctcaggcgtgaagacaacttcccatcggaacctcttctcttccctttctccagcacacagatgagacgcacgagagggagaaacagctcaatagataccgctgaccttcatttgtggaatcctcagtcatcgacacacaagacaggtgactaggcagggacacagatcaaacactatttccgggtcctcgtggtgggattggtctctctctctctctctctctctctctctctctctctctctctcgcacgcgcacgcgcgcacacacacacacaatttccatatctagttcacagagcacactcacttccccttttcacagtacgcaggctgagtaaaacgcgccccaccctccacccgttggctgacgaaaccccttctctacaattgatgaaaaagatgatctgggccgggcacgctagctcacgcctgtcactccggcactttgggaggccgaggcgggtggatcgcttggggccgggagttcgagaccaggctggccgacgtggcgaaaccccgtctctctgaaaaatagaacgattagccgggcctggtggcgtgggcttggaatcacgaccgctcgggagactggggcgggcgacttgttccaaccggggaggccgaggccgcgatgagctgagatcgtgccgtggcgatgcggcctggatgacggagcgagaccccgtctcgagagaatcatgatgttattataagatgagttgtgcgcggtgatggccgcctgtagtcgcggctactcgggaggctgagacgaggagaagatcacttgaggccccacaggtcgaggcttcggtcggccgtgacccactgtatcctgggcagtcaccggtcaaggagatatgccccttccccgtttgcttttcttttcttcccttctcttttcttctttttgcttctcttttctttctttctttctttctttctttctttctttctttctttctttttctttttctctcttcccctctttctttcctgccttcctgcctttcttcttttcttctttcctcccttcctcccttccttctttcctcccgcctcagcctcccaaagtgctgggatgactggcgggaggcaccatgcctgcttggcccaaagagaccctcttggaaagtgagacgcagagagcgccttccagtgatctcattgactgatttagagacggcatctcgctccgtcaccccggcagtggtgccgtcgtaactcactccctgcagcgtggacgctcctggactcgagcgatccttccacctcagcctccagagtacagagcctgggaccgcgggcacgcgccactgtgcccacaccgtttttaattgtttttttttcccccgagacagagtttcactctcgtggcctagactgcagtgcggtggcgcgatcttggctcaccgcaacctctgcctcccggtttcaagcgattctcctgcatcggcctcctgagtagccgggattgcgggcatgcgctgccacgtctggctgatttcgtatttttagtggagacggggcttctccatgtcgatcgggctggtttcgaactcccgacctcaggtgatccgccctccccggcctccggaagtgctgggatgacaggcgtgagccaccgcgcccggccttcatttttaaatgttttcccacagacggggtctcatcatttctttgcaaccctcctgcccggcgtctcaaagtgctggcgtgacgggcgtgagccactgcgcctggactccggggaatgactcacgaccaccatcgctctactgatcctttctttctttctttctttctttctttctttctttctttctttctttctttctttcttgatgaattatcttatgatttatttgtgtacttattttcagacggagtctcgctctgggcggggcgaggcgaggcgaggcacagcgcatcgctttggaagccgcggcaacgcctttcaaagccccattcgtatgcacagagccttattcccttcctggagttggagctgatgccttccgtagccttgggcttctctccattcggaagcttgacaggcgcarggccacccagaggctggctgcggctgaggattagggggtgtgttggggctgaaaactgggtcccctatttttgatacctcagccgacacatcccccgaccgccatcgcttgctcgccctctgagatcccccgcctccaccgccttgcaggctcacctcttactttcatttcttcctttcttgcgtttgaggagggggtgcgggaatgagggtgtgtgtggggagggggtgcggggtggggacggaggggagcgtcctaagggtcgatttagtgtcatgcctctttcaccaccaccaccaccaccgaagatgacagcaaggatcggctaaataccgcgtgttctcatctagaagtgggaacttacagatgacagttcttgcatgggcagaacgagggggaccggggacgcggaagtctgcttgagggaggaggggtggaaggagagacagcttcaggaagaaaacaaaacacgaatactgtcggacacagcactgactacccgggtgatgaaatcatctgcacactgaacacccccgtcacaagtttacctatgtcacaatcttgcacatgtatcgcttgaacgacaaataaaagttagggggga

SEQ ID NO: 41840 - DNA, 2854 bp, Homo sapiens
tccggcgaagacttccaccggatgccccgggtgggccggttgggatcagactggaccaccccggaccgtgctgttcttgggggtgggttgacgtacagggtggactggcagccccagcattgtaaagggtgcgtgggtatggaaatgtcacctaggatgccctccttcccttcggtctgccttcagctgcctcaggcgtgaagacaacttcccatcggaacctcttctcttccctttctccagcacacagatgagacgcacgagagggagaaacagctcaatagataccgctgaccttcatttgtggaatcctcagtcatcgacacacaagacaggtgactaggcagggacacagatcaaacactatttccgggtcctcgtggtgggattggtctctctctctctctctctctctctctctctctctctctctctcgcacgcgcacgcgcgcacacacacacacaatttccatatctagttcacagagcacactcacttccccttttcacagtacgcaggctgagtaaaacgcgccccaccctccacccgttggctgacgaaaccccttctctacaattgatgaaaaagatgatctgggccgggcacgctagctcacgcctgtcactccggcactttgggaggccgaggcgggtggatcgcttggggccgggagttcgagaccaggctggccgacgtggcgaaaccccgtctctctgaaaaatagaacgattagccgggcctggtggcgtgggcttggaatcacgaccgctcgggagactggggcgggcgacttgttccaaccggggaggccgaggccgcgatgagctgagatcgtgccgtggcgatgcggcctggatgacggagcgagaccccgtctcgagagaatcatgatgttattataagatgagttgtgcgcggtgatggccgcctgtagtcgcggctactcgggaggctgagacgaggagaagatcacttgaggccccacaggtcgaggcttcggtcggccgtgacccactgtatcctgggcagtcaccggtcaaggagatatgccccttccccgtttgcttttcttttcttcccttctcttttcttctttttgcttctcttttctttctttctttctttctttctttctttctttctttctttctttttctttttctctcttcccctctttctttcctgccttcctgcctttcttcttttcttctttcctcccttcctcccttccttctttcctcccgcctcagcctcccaaagtgctgggatgactggcgggaggcaccatgcctgcttggcccaaagagaccctcttggaaagtgagacgcagagagcgccttccagtgatctcattgactgatttagagacggcatctcgctccgtcaccccggcagtggtgccgtcgtaactcactccctgcagcgtggacgctcctggactcgagcgatccttccacctcagcctccagagtacagagcctgggaccgcgggcacgcgccactgtgcccacaccgtttttaattgtttttttttcccccgagacagagtttcactctcgtggcctagactgcagtgcggtggcgcgatcttggctcaccgcaacctctgcctcccggtttcaagcgattctcctgcatcggcctcctgagtagccgggattgcgggcatgcgctgccacgtctggctgatttcgtatttttagtggagacggggcttctccatgtcgatcgggctggtttcgaactcccgacctcaggtgatccgccctccccggcctccggaagtgctgggatgacaggcgtgagccaccgcgcccggccttcatttttaaatgttttcccacagacggggtctcatcatttctttgcaaccctcctgcccggcgtctcaaagtgctggcgtgacgggcgtgagccactgcgcctggactccggggaatgactcacgaccaccatcgctctactgatcctttctttctttctttctttctttctttctttctttctttctttctttctttctttcttgatgaattatcttatgatttatttgtgtacttattttcagacggagtctcgctctgggcggggcgaggcgaggcgaggcacagcgcatcgctttggaagccgcggcaacgcctttcaaagccccattcgtatgcacagagccttattcccttcctggagttggagctgatgccttccgtagccttgggcttctctccattcggaagcttgacaggcgcagsgccacccagaggctggctgcggctgaggattagggggtgtgttggggctgaaaactgggtcccctatttttgatacctcagccgacacatcccccgaccgccatcgcttgctcgccctctgagatcccccgcctccaccgccttgcaggctcacctcttactttcatttcttcctttcttgcgtttgaggagggggtgcgggaatgagggtgtgtgtggggagggggtgcggggtggggacggaggggagcgtcctaagggtcgatttagtgtcatgcctctttcaccaccaccaccaccaccgaagatgacagcaaggatcggctaaataccgcgtgttctcatctagaagtgggaacttacagatgacagttcttgcatgggcagaacgagggggaccggggacgcggaagtctgcttgagggaggaggggtggaaggagagacagcttcaggaagaaaacaaaacacgaatactgtcggacacagcactgactacccgggtgatgaaatcatctgcacactgaacacccccgtcacaagtttacctatgtcacaatcttgcacatgtatcgcttgaacgacaaataaaagttagggggga

SEQ ID NO: 41841 - DNA, 2854 bp, Homo sapiens
tccggcgaagacttccaccggatgccccgggtgggccggttgggatcagactggaccaccccggaccgtgctgttcttgggggtgggttgacgtacagggtggactggcagccccagcattgtaaagggtgcgtgggtatggaaatgtcacctaggatgccctccttcccttcggtctgccttcagctgcctcaggcgtgaagacaacttcccatcggaacctcttctcttccctttctccagcacacagatgagacgcacgagagggagaaacagctcaatagataccgctgaccttcatttgtggaatcctcagtcatcgacacacaagacaggtgactaggcagggacacagatcaaacactatttccgggtcctcgtggtgggattggtctctctctctctctctctctctctctctctctctctctctctcgcacgcgcacgcgcgcacacacacacacaatttccatatctagttcacagagcacactcacttccccttttcacagtacgcaggctgagtaaaacgcgccccaccctccacccgttggctgacgaaaccccttctctacaattgatgaaaaagatgatctgggccgggcacgctagctcacgcctgtcactccggcactttgggaggccgaggcgggtggatcgcttggggccgggagttcgagaccaggctggccgacgtggcgaaaccccgtctctctgaaaaatagaacgattagccgggcctggtggcgtgggcttggaatcacgaccgctcgggagactggggcgggcgacttgttccaaccggggaggccgaggccgcgatgagctgagatcgtgccgtggcgatgcggcctggatgacggagcgagaccccgtctcgagagaatcatgatgttattataagatgagttgtgcgcggtgatggccgcctgtagtcgcggctactcgggaggctgagacgaggagaagatcacttgaggccccacaggtcgaggcttcggtcggccgtgacccactgtatcctgggcagtcaccggtcaaggagatatgccccttccccgtttgcttttcttttcttcccttctcttttcttctttttgcttctcttttctttctttctttctttctttctttctttctttctttctttctttttctttttctctcttcccctctttctttcctgccttcctgcctttcttcttttcttctttcctcccttcctcccttccttctttcctcccgcctcagcctcccaaagtgctgggatgactggcgggaggcaccatgcctgcttggcccaaagagaccctcttggaaagtgagacgcagagagcgccttccagtgatctcattgactgatttagagacggcatctcgctccgtcaccccggcagtggtgccgtcgtaactcactccctgcagcgtggacgctcctggactcgagcgatccttccacctcagcctccagagtacagagcctgggaccgcgggcacgcgccactgtgcccacaccgtttttaattgtttttttttcccccgagacagagtttcactctcgtggcctagactgcagtgcggtggcgcgatcttggctcaccgcaacctctgcctcccggtttcaagcgattctcctgcatcggcctcctgagtagccgggattgcgggcatgcgctgccacgtctggctgatttcgtatttttagtggagacggggcttctccatgtcgatcgggctggtttcgaactcccgacctcaggtgatccgccctccccggcctccggaagtgctgggatgacaggcgtgagccaccgcgcccggccttcatttttaaatgttttcccacagacggggtctcatcatttctttgcaaccctcctgcccggcgtctcaaagtgctggcgtgacgggcgtgagccactgcgcctggactccggggaatgactcacgaccaccatcgctctactgatcctttctttctttctttctttctttctttctttctttctttctttctttctttctttcttgatgaattatcttatgatttatttgtgtacttattttcagacggagtctcgctctgggcggggcgaggcgaggcgaggcacagcgcatcgctttggaagccgcggcaacgcctttcaaagccccattcgtatgcacagagccttattcccttcctggagttggagctgatgccttccgtagccttgggcttctctccattcggaagcttgacaggcgcaggsccacccagaggctggctgcggctgaggattagggggtgtgttggggctgaaaactgggtcccctatttttgatacctcagccgacacatcccccgaccgccatcgcttgctcgccctctgagatcccccgcctccaccgccttgcaggctcacctcttactttcatttcttcctttcttgcgtttgaggagggggtgcgggaatgagggtgtgtgtggggagggggtgcggggtggggacggaggggagcgtcctaagggtcgatttagtgtcatgcctctttcaccaccaccaccaccaccgaagatgacagcaaggatcggctaaataccgcgtgttctcatctagaagtgggaacttacagatgacagttcttgcatgggcagaacgagggggaccggggacgcggaagtctgcttgagggaggaggggtggaaggagagacagcttcaggaagaaaacaaaacacgaatactgtcggacacagcactgactacccgggtgatgaaatcatctgcacactgaacacccccgtcacaagtttacctatgtcacaatcttgcacatgtatcgcttgaacgacaaataaaagttagggggga

SEQ ID NO: 41842 - DNA, 590 bp, Homo sapiens
taagcgatctagttaatcatttctggaattttgccagaaatatatactccttgctagtctaagagttaaggctagaaccaagacaggggcaaaggccggggcagatctagggcacaagcagggcaggctagggcagggcaatggcaagaccaggccatggcagggccagcccaggatagaacagggcacaggcagggcagggccagggccatggctggggcaggacaaggaccaggaccggggtccaggccagggcaagggtatggccagggtagaggtagggccagagccagggtctgggcaggaccaaggcaggtccattgcagggccagggttcagaccagggccagagcagggctgggacaaggccagggccaggaccaggaaagggcaatrtcaggacaagggcaatggcaggaccagcaatggggctagggccaggacagggacagggacagggtcagggctagggccagaatagcatgccggggtagagccaggccaaagtagggccaggacagggtcaggaccagggctgggccagggtatggccttaagtagcaaagggccagggccagggtccatgccag

SEQ ID NO: 41843 - DNA, 570 bp, Homo sapiens
tttttcttaaatgagtgaatgtctactttttctttttctttctttctttyttttttttttttttttttttttgagacagtcttgctctgtcgcccaggctggagcatagtggtacaatctctgctcactgcaacctctgcctcccaggttcaagcaattctcctgcctcaggctcccgggtggctgggattacaggcgccggccaccatacccagctaatttttgtattttttagtagagacggggttttgccatattggccaagctggtcttgaactcctgacctcaggcgattggcccacgtcagcctcccaaagtgctaggattacaggtgtgagccaccacacccggccgcctactttttctttgtattagattgtcatggaagaagatgaagaagaaaggagttagtcatgttgtaattagatagacttaacttaaatttttcttgtgcacataggttaaaaatagcattagtagacattctccccatcccctccaactctactatagtgctttgcaaagctctgtgtactgtgtaagatataaaatgatggtactgttactgta

SEQ ID NO: 41844 - DNA, 1729 bp, Homo sapiens
ataaaattcatttgacccaataatttgagcaagcgttctaccatctttcttatgaagtgtctgtgcctttcctagtacagcctcactggtgtgtgtatgatcattcatttgtacatttttatgtggagctggttatgttgcagtttgtttttattagtcctttgatatgagctgctttgtgttattatttcactcgatggagtcactcatcaactcatccttttttttttttttttttttttttttttctgagatagagtctcgctctgtcacccaggctggagtgcagtggtgcgatctcggctcactgcaacctccacctcctgggttcaagcaattctctgcctcagcctcccgagtagctgggattacaggctcccgccaccatgcccagctaatttttgtatttttagtagagacggggtttcaccatcttggccatgctggtcttgaactcttgaccttgtgatccacccgtctcggcctcccaaagtgctgggattacaggcgtgagccaccgtgcccagccctgaactttccttagaactgcaccccatctaagaggccttcacgcaacctccctccctcccatctctcctccgtgcagggtcagacctgcatcacagcctgacagcttttccagcctcctccatatcccacctcctccgttttcactcacaggcccttctcctaataatttgttgacgctgtcttggtgtctgcttctcagactccccagactcaccagcgctctcccctggggcagtatcaaaatgagatgcccctttggcccttctgcaccccaccctaccacaccaggacaaagaggggcactggtgtgagaactgaccagccatttgtcaaagaaaaatcacaccagacagagttaaataggcaaggaagattttactcaagactactgcaaaggggacaaagactgaactcaactttgacacgtcagggacagttgcagatttatagccgatgggcagagtgaggagtttccttagatgggaaattactaagaggagcctaggtatcaagggtgggggacgagcaacttgatcaaatatcaagggcagggcgatattcacactggtttataagattctttgctaaaactgccttggcaaaccaaggacaggtcgagtgtgaggcctcattgaagagacggccagaggatcctgactgaagtacggtcaaggagggcgtctttgccacgtcccaagccaagatctgtacccaccaggcttgcccaccccaggaaatgggtgagaagggctttgcgtggaatgtgaagtttaccacaaacagggctgcgtctgaacacacaagagactgttgtaataactgttgtattaactgaggatcactgcaagcttagggaactggaccgcaatgttgttgttagaatagaaccaggggacaccgaaggttggtcagagcgcatgtgggagagggcatggctggacacagggagcactccaaaaacgagactgagggaaaatctgagcgcgggctkaccagactcctcatgaaagcttttcccccacggagcaggcaaaacagtgcccccacccccacccccacccccaaaatgtccagtgactgctacaagctattagacgctgagtggaaaaaacagattttaagagtcctaaaactgagccccaacctggaggcgtgcccacctcgggagaaagaacacctgaccacagacacctagacc

SEQ ID NO: 41845 - DNA, 814 bp, Homo sapiens
ccagcctctgccaaagtcctgcattccctgggtgtggggacgctgtgacctggggacgctgtggcctgggggcctcgcagggctgcacctggggcggatggggaagctggcctgggctcctcggtggggccccgcgccccccacttctgccggcagcatccgatgctccctgaccctggtcaggacccttcctcctggcgtggcccagtgtccccgcggaagccccagaacgcggcctgcccgggagccggctcgggcctggggcctgcgggtcttcactatggtcgcgaatggacccacgggatgctgcatgaggcgcacgagcttgaggcaccagcctccggccactgtccctggaggacaagggacgcggctccggarcagagggtcctcccctggggatgccctcccggcggctgggtgtgggactgggggctgtgcccggaagtgggtgggtgggagaagcctcctgagcacagaggacagcagccaggcccaggcccaggccctgcaggcccccaggggctccagagccccagagaggaggaaggcctccgtgtgctcagaatcagctcacaccccggggacgaacctcagagggccgggacaaggaaaggaaggccccggcccaacatcggggtctgggcgctggtgggacagggcaggctcagccttggggccggtcagggcctgttggggttcgggtccccctgccaggtccgcgtctacagccacagcccctcaaccccagcagggaccccagagaccggctcgggaccccctggtggccgtcttgtgccactgcagttctgct

SEQ ID NO: 41846 - DNA, 814 bp, Homo sapiens
ccagcctctgccaaagtcctgcattccctgggtgtggggacgctgtgacctggggacgctgtggcctgggggcctcgcagggctgcacctggggcggatggggaagctggcctgggctcctcggtggggccccgcgccccccacttctgccggcagcatccgatgctccctgaccctggtcaggacccttcctcctggcgtggcccagtgtccccgcggaagccccagaacgcggcctgcccgggagccggctcgggcctggggcctgcgggtcttcactatggtcgcgaatggacccacgggatgctgcatgaggcgcacgagcttgaggcaccagcctccggccactgtccctggaggacaagggacgcggctccggaacagagggtcctcccctggggatgccctcccggcggctgggtgtgggrctgggggctgtgcccggaagtgggtgggtgggagaagcctcctgagcacagaggacagcagccaggcccaggcccaggccctgcaggcccccaggggctccagagccccagagaggaggaaggcctccgtgtgctcagaatcagctcacaccccggggacgaacctcagagggccgggacaaggaaaggaaggccccggcccaacatcggggtctgggcgctggtgggacagggcaggctcagccttggggccggtcagggcctgttggggttcgggtccccctgccaggtccgcgtctacagccacagcccctcaaccccagcagggaccccagagaccggctcgggaccccctggtggccgtcttgtgccactgcagttctgct

SEQ ID NO: 41847 - DNA, 608 bp, Homo sapiens
aagtggtctgttagatctctcctttctcgttgagatcccaatcccttaagttcttactgcctcagtagctccaagtgccttcaaacgtttatttttatattttgttaagtttttctagttgtttttggtgggagtgttgttctgcaaaaaatcagtctattaactctgaaagccagtttctatatttattaaaggtgaggtgcaatgttttatgtttttattttaggtagaagtatcttgaagaaaggaaggagtgaacctctctgccttcccttttttttttctttttgagacagattctcactctgtcacccaggctggagtgcagtggggcgatctcagctcactgtaacctctgcctccggggttcaagcgattctcctgcctcagcctccggagtagctgggattacaggcgtgcaccaccacacccagctaatttttgtatttttagtagagatggggtttcaccatgttggccaggatagtcttggcctcttgacctcatgattcgcccgcctcggcctcccaaagtgttgggattacaggcatgagcctccattcccggccagattatctctatttctaagagttctattasccttctgc

SEQ ID NO: 41848 - DNA, 890 bp, Homo sapiens
tactttttacattcaaattttactttttattaatacgtatttgatgccatcttgaaggcaatctcattatcatcctaatcttttgctaatctttatgtttacggtaacattgattgttattttgggggacaygtatttcatctttggtaatgaaatgaaataactatgcacttcaattcctgtatgttctgcctacttaagagtaaatccaattttcttccattcctcccattctatcccactccctttatatgatagttttaagggagaaaatattaattagactctaactgcagctatgtgataagagttatttagaatgagggtgggatattaagctttgagtaaagcaatagtcagggttagaactagtgttggaatcagggtttagggaagttgctcataaaacctgcaggatgacacttctagaatagtctctcactcactctgcagacacttcccagcatcccttgggccattgcaaaagcaatgatgaaacttcacgtgttggccacaagatggcactgtggtccactgggatctaagggactctggggagagcctgggagagcagcctaggaagggaagggttaagaaaaattagggctggcatccaatattatgcagatgttgcagcagttttcagtcattgctaggctacctacagctatgcaagatgcaggaaatacctctaatctttaatgagatccacagttgaagaattttggcctggcagccttggtgtcaagcgcaggtgcaagcagaggagcaactgcctcaaaggaacgtgggaaagctaggggcgggctgtgccctaagctcagtatgtctctgctgcaccccatcttccctgcagacctcgccgggcaacagccttcatgagaggaggt

SEQ ID NO: 41849 - DNA, 511 bp, Homo sapiens
tgattgacaaagaaatataccttccccatcctgcctcattcttgttacccagatgtgggtcatcttttgcccaaagccagtgtttaaagctcatctaactactattttattccattctccaaatcagattcaaaactaaaatacagtagcaaaaataaaaattgttctggacactacacaggaaactaaagaaaataatttgtattatattaccacacagcataattttctaaagacctattttagttatttttattcttttttgaaatttcttcctaagtctatcctaccttacctcttttcttcttctacatctctaatgtctctctctctctcttttttaaaagattattgtcttctccattagatccagccttcagtttgcatatctcactcagtagaacatggcaggtagccatcctgtgggagggtgtaactctcccatcccatgtggcttatgaagttattgaytgaacaaaaatgtagctgatttgggttgaaagaagggggt

SEQ ID NO: 41850 - DNA, 609 bp, Homo sapiens
gtaaaaagcagcagctagccctcaaaccatagctcagaatagggaagacaaactagtgtcaaggaacttgaaatcaaggaagatgaagatcaactcacaccagttaagaaaaacaamaataacaaaaacataaaacacccatcttaatagtgagcaggataaaaataaaaggcatgactaccatgcaaacttactacctgaatgaggagagggtggggaatggcagaaagaaaataacagaatgtaaaagacagatgaagaactcagctggaagaaaatgtaactgaaattaaacaacagtttcctcataagtgttttataatattaaggaaactaaaaagaatcttcaataacagctcaaaattgagaagataaaacacaaacaaggttttgaaaaggaaattccagagttaaggaagtactctgaatatattacataccaataaaaacttaataaattcattagaaacagaaatagaaaaagtcaaagctgaaaactaaattaccatgatggagaaactcaaaataatttcactgaatacctgagaaaaaaggcaaggaacttgttcaagcaaacaaagtaagcattaatttggaagacagatagag

SEQ ID NO: 41851 - DNA, 609 bp, Homo sapiens
gtaaaaagcagcagctagccctcaaaccatagctcagaatagggaagacaaactagtgtcaaggaacttgaaatcaaggaagatgaagatcaactcacaccagttaagaaaaacaaaaataacaaaaacataaaacacccatcttaatagtgagcaggataaaaataaaaggcatgactaccatgcaaacttactacctgaatgaggagagggtggggaatggcagaaagaaaataacagaatgtaaaagacagatgaagaactcagctggaagaaaatgtaactgaaattaaacaacagtttcctcataagtgttttataatattaaggaaactaaaaagaatcttcaataacagctcaaaattgagaagataaaacacaaacaaggttttgaaaaggaaattccagagttaaggaagtactctgaatatattacataccaataaaaacttaataaattcattagaaacagaaawagaaaaagtcaaagctgaaaactaaattaccatgatggagaaactcaaaataatttcactgaatacctgagaaaaaaggcaaggaacttgttcaagcaaacaaagtaagcattaatttggaagacagatagag

SEQ ID NO: 41852 - DNA, 1105 bp, Homo sapiens
tgatttccgcatcctgggctgacagagggaaggggcttggtatcatgagaaagacctagggggagcacagacagggctcagtccctgctgggaggtgagcaaggcctgagggacaactgaagggacccagcaccccagaacagcccccccccatagtcccgccgtctcaaactgaggtgccttttcattcagccttgggaatctgagggatggagactcagttccgcagagggggtctggggtgcagccctgccagcatcaagaggaagaagaagagggaggactcaggagactttggactccaggtcagtagggaccttggcccttggagttccaaggcacrgtggccacatgtggtgcatcctcactctgcctttggggtgtcagcaaggagtgggttgtggtctgaggagtggagcctcaggtcaacccagggaggagtcccagagggaggactcaggcaaccaattatccctgaggtagaaaacctgcccctgccatcggtccttggaggccccaagcaggactctaggaaagagaggcagctccccacttcctagttggggttctctgggagatggtggtcgtggcctgcaaaactcatccacagttcagcaggagagacatggataggccttgtcaggagtaaatctgaatacctggaggaaacccagagagaggaggcacccctgaaatctgcttcatctgtcagcctttggcatcccatgaggggtgtccatgtagtgccccttcactttctgcctcccatatctcagagaggtggggcccttggtctgaggcaggtcctcaggtcagcagagggatacacacctggtcagcacagggtggagtccaggatctgccagtagtcaaggagaggaaaattgatgaagactgaaggtaagaatgtaccctcccacatgccaaagaaaaagggacctcaccaatccttgcttcctctgttttcatccctcggaggcccaagttggggaggcatgtgccatgctcacatttctgccacgaggttgggggtggcaccttgctcagggaggtgagcaccttgtttcaagggggtgatgacaggtcagcaggtggagccacacct

SEQ ID NO: 41853 - DNA, 572 bp, Homo sapiens
ttgttcaaaagagggagacagtagtagcccatttgttgacacccaaggagacatcacaaagggagagttcattctgggtaggctgtccatatctcaggcggtgtttagtggcaaagcagggaggggccaggaaaggccagagtagaagcctgcccagggaaaaagaagtcatgaagtctgatgatcacagcttctcttagctgtgtagggcagggctccaactgcactaagaaatttgagtgcccatctggaaatgggctgagagatcttggttgggtataggtgtggtatccctaataaatgccttaaggtcatggtaaaaaaccctgacttcagcatcagatatatttttttctatttcacatyccactttgaggggccattttgaaacacattacacattgttcacacaaatggttatacacacacacacacacacacacacacagttctgatactttttaacttggcactctatctgtaaaatcattctatatagagctacctcatttaaaaaataactgcacataattctattgtataggtgtgctataatttacttactagtccca

SEQ ID NO: 41854 - DNA, 1131 bp, Homo sapiens
ccaccaaactgatcagctggcatgcagaccccagaaaagggggagctgaggactgaactctgaccaccactctttgttccaaacttcttcatgaggggcctggaggaaatcacatccatctgtcagagctaatattcttttctgctgacccaaaaattttaaacaaagcttctcttgcttaaccaactgcaaaccaaaagacctttgaacctacttatggcctgtaagccctcacttcaagatatcccacccttttaggccaaaaccaatgggtaacctctgtgtaatgatttatgaattagcctgtaacttctgctttcctgaaatttactcctacctttaaaagcccttacctgcaagccatcacggagctctggatttgagcgttagctgcctgatcctccttgcttagtgccctgcaaataaatgtcttcctttcyaccactgcaaacctcagtgtggatatctgatcttactgtgatgggcaagacaactccagttcagttcaataacacttggccacaactcaaaagccctgagtgggtgtcttgccaatagcatatcagcccctggctatgagcacccttggaccctgtccagtagctgcctgaattattttattcagggatggatctgtgtatttggctgccaccaaggcatcactggcttgtgttgcttttacttttgcagcattagaaatgagacacttggctgggaagacattttttggcaggtgacaaatttgtgggcaatagccccaaggtatattttcttcaaacactacgttctgcattggcaggacatctggccttgctttggcaatttacgggactctgcttcatcatagtgtgtttagtagggaatactccataagcaactgaagggatggagactttgagaaatcacattttgattttgatttgcttgcttgacaatctgcctaaagcccagctgaggcattaagggtttttcacctaaggtcttgtcatctaaaatggaaactacaaattatgttcctccttgtagcccattatggtgcattctgcagaatcgggccatttttagctttgagcccatgaaaaagaaaaatgtttttaatgttgaaattctgcctgaccacggtatccccta

SEQ ID NO: 41855 - DNA, 1131 bp, Homo sapiens
ccaccaaactgatcagctggcatgcagaccccagaaaagggggagctgaggactgaactctgaccaccactctttgttccaaacttcttcatgaggggcctggaggaaatcacatccatctgtcagagctaatattcttttctgctgacccaaaaattttaaacaaagcttctcttgcttaaccaactgcaaaccaaaagacctttgaacctacttatggcctgtaagccctcacttcaagatatcccacccttttaggccaaaaccaatgggtaacctctgtgtaatgatttatgaattagcctgtaacttctgctttcctgaaatttactcctacctttaaaagcccttacctgcaagccatcacggagctctggatttgagcgttagctgcctgatcctccttgcttagtgccctgcaaataaatgtcttcctttccaccactgcaaacctcagtgtggatatctgatcttactgtgatgggcaagacaactccagttcagttcaakaacacttggccacaactcaaaagccctgagtgggtgtcttgccaatagcatatcagcccctggctatgagcacccttggaccctgtccagtagctgcctgaattattttattcagggatggatctgtgtatttggctgccaccaaggcatcactggcttgtgttgcttttacttttgcagcattagaaatgagacacttggctgggaagacattttttggcaggtgacaaatttgtgggcaatagccccaaggtatattttcttcaaacactacgttctgcattggcaggacatctggccttgctttggcaatttacgggactctgcttcatcatagtgtgtttagtagggaatactccataagcaactgaagggatggagactttgagaaatcacattttgattttgatttgcttgcttgacaatctgcctaaagcccagctgaggcattaagggtttttcacctaaggtcttgtcatctaaaatggaaactacaaattatgttcctccttgtagcccattatggtgcattctgcagaatcgggccatttttagctttgagcccatgaaaaagaaaaatgtttttaatgttgaaattctgcctgaccacggtatccccta

SEQ ID NO: 41856 - DNA, 1131 bp, Homo sapiens
ccaccaaactgatcagctggcatgcagaccccagaaaagggggagctgaggactgaactctgaccaccactctttgttccaaacttcttcatgaggggcctggaggaaatcacatccatctgtcagagctaatattcttttctgctgacccaaaaattttaaacaaagcttctcttgcttaaccaactgcaaaccaaaagacctttgaacctacttatggcctgtaagccctcacttcaagatatcccacccttttaggccaaaaccaatgggtaacctctgtgtaatgatttatgaattagcctgtaacttctgctttcctgaaatttactcctacctttaaaagcccttacctgcaagccatcacggagctctggatttgagcgttagctgcctgatcctccttgcttagtgccctgcaaataaatgtcttcctttccaccactgcaaacctcagtgtggatatctgatcttactgtgatgggcaagacaactccagttcagttcaataacayttggccacaactcaaaagccctgagtgggtgtcttgccaatagcatatcagcccctggctatgagcacccttggaccctgtccagtagctgcctgaattattttattcagggatggatctgtgtatttggctgccaccaaggcatcactggcttgtgttgcttttacttttgcagcattagaaatgagacacttggctgggaagacattttttggcaggtgacaaatttgtgggcaatagccccaaggtatattttcttcaaacactacgttctgcattggcaggacatctggccttgctttggcaatttacgggactctgcttcatcatagtgtgtttagtagggaatactccataagcaactgaagggatggagactttgagaaatcacattttgattttgatttgcttgcttgacaatctgcctaaagcccagctgaggcattaagggtttttcacctaaggtcttgtcatctaaaatggaaactacaaattatgttcctccttgtagcccattatggtgcattctgcagaatcgggccatttttagctttgagcccatgaaaaagaaaaatgtttttaatgttgaaattctgcctgaccacggtatccccta

SEQ ID NO: 41857 - DNA, 448 bp, Homo sapiens
atgaaatctaagtgtaaatatgaggtgcaccttctaggaatttatctaagactcagtatgcatgttcttccatctctcccagctacctggcctcccatcccctttcctgctggayttgttgatcctcggagactcaagtacatccttcacttagtctatgcactatataccttcttcaatgaggtccctgtgtcagggacatggttctcagtttccagctactttccatgagctccctcaagcaagcaaatatttttagaaggtatttttagaagacaacattttaaaagaccatagtgtcctttctactctactgtgtctgcaatatgttgcagtagaacatttcacaaagctagatcttctcagagctccagatgggaaccaggcaaaaagctctctttgcagcggacagtcaacctatcttgtggtttccattgtccgcattcct

SEQ ID NO: 41858 - DNA, 1008 bp, Homo sapiens
cttgagcccgggagttcaagtccaacctgggcaatatagtgaaacctcttctgtcttaaaaaaaaaaaaaaaggtaattcaagtctttagtstttactataatggagaggagggatttgtcaggttttggatgttttcccttcctacaagttactaatcttgtttgattgaggctacagtaaatatatgaaactacttagagacaaaggattttgttactcatgacacagcaaacagcataaacattgttatattcacttcagtcgttctttcccttaaatctaaaaaagatgatatgtatgctgacgaatactttgtttgaagtggtactgtgtcataactgaggaactttgagctcggagaattcactgcttttatagtaaggagtaaaccaaattgctctttgtctcagagggaaacagtacctcacccctcaaggtttcttgctgcaagcataactctggaaattggtcaggtagagtggtcatggtcgtaaaccactggcatacctagcaagacatttatgagtataagagattaaggatggtctggttttcaacaatatccactccatattcttacattgtgttattttctagaaacttttctcatgagtgtgccactccagaagccgttctgatcaatttgacggacagagattccgagactaaatacattgaatttgcctcaaacaatgtttaaataaggctactatcagcagaccaatctgcaacattaacttcacccatttagtcagctgtgacaaagtcccaaagtatagataactaggatataatttcttatccattatacatggaagtttagattgatacgctaatctttgttttaattctcaaaaagagtccaaaaagtagccaccattcctaatggaaagatgttctgtcccacctattcccagacataagcataacccaacaggttaatccagtttggaatttattgttaaacttgatttggatcagcattacatcacttttgttgtaggat

SEQ ID NO: 41859 - DNA, 1008 bp, Homo sapiens
cttgagcccgggagttcaagtccaacctgggcaatatagtgaaacctcttctgtcttaaaaaaaaaaaaaaaggtaattcaagtctttagtgtttactataatggagaggagggatttgtcaggttttggatgttttcccttcctacaagttactaatcttgtttgattgaggctacagtaaatatatgaaactacttagagacaaaggattttgttactcatgacacagcaaacagcataaacattgttatattcacttcagtcgttctttcccttaaatctaaaaaagatgatatgtatgctgacgaatactttgtttgaagtggtactgtgtcataactgaggaactttgagctcggagaattcactgcttttatagtaaggagtaaaccaaattgctctttgtctcagagggaaacagtacctcacccctcaaggtttcttgctgcaagcataactctggaaattggtcaggtagagtggtcatggtcgtaaaccactggcatacctagcaagacatttatgagtataagagattaaggatggtctggttttcaacaatatccactccatattcttacattgtgttattttctagaaacttttctcatgagtgtgccactccagaagccgttctgatcaatttgacrgacagagattccgagactaaatacattgaatttgcctcaaacaatgtttaaataaggctactatcagcagaccaatctgcaacattaacttcacccatttagtcagctgtgacaaagtcccaaagtatagataactaggatataatttcttatccattatacatggaagtttagattgatacgctaatctttgttttaattctcaaaaagagtccaaaaagtagccaccattcctaatggaaagatgttctgtcccacctattcccagacataagcataacccaacaggttaatccagtttggaatttattgttaaacttgatttggatcagcattacatcacttttgttgtaggat

SEQ ID NO: 41860 - DNA, 545 bp, Homo sapiens
atgtggaaataaatgtccatcaacacatgaacgaataaagaaaatgtggtatatacatatagtggaatactattcagcattgaaaaggaggaaattttgcaatacataacaacatggatgaactttgagaacttcatgctatgtgaaataaaccagtcacggaacatcgtatacagaagactgaagatttcatttatttgaggtgtgtataagagtcaaattcataaaatcaaagagtggaatggtggttaccagggttgaggggaaaggagacatagggcattactcgtcaacagccataaagtttcagttaaaacaagatgaaaaactccagagatttgctgtacagcatcatacctatagtcaaaaatgatgggttgyacacttaacattttgttaagagggacagacctcatgttatgtattcttaccacaataaaacaaaatttttaaaacgaataatataagccaaaatggaagcagcagttctattcagggagtgctatgggaacggaagttaaattcgtgggtaaggttagagtaca

SEQ ID NO: 41861 - DNA, 545 bp, Homo sapiens
atgtggaaataaatgtccatcaacacatgaacgaataaagaaaatgtggtatatacatatagtggaatactattcagcattgaaaaggaggaaattttgcaatacataacaacatggatgaactttgagaacttcatgctatgtgaaataaaccagtcacggaacatcgtatacagaagactgaagatttcatttatttgaggtgtgtataagagtcaaattcataaaatcaaagagtggaatggtggttaccagggttgaggggaaaggagacatagggcattactcgtcaacagccataaagtttcagttaaaacaagatgaaaaactccagagatttgctgtacagcatcatacctatagtcaaaaatgatgggttgcacacttaacattttgttaagagggayagacctcatgttatgtattcttaccacaataaaacaaaatttttaaaacgaataatataagccaaaatggaagcagcagttctattcagggagtgctatgggaacggaagttaaattcgtgggtaaggttagagtaca

SEQ ID NO: 41862 - DNA, 1192 bp, Homo sapiens
cataactggtggtcttcctcctcttcctctcaagtagctccaactcacagccaaatctgagtgcctagcatgcttccagccagccctcagaaattagcagttgttaattggtgaatgttgcctctctggctgtatagtaagtgtattagtccgttctcacattgctgtaaaaaactayctgagactgggtaatttataaagaaaagagatttaattggctcacagtgtggcaggttgtacaggaagcatggttggggaggcctcagaaaacttacaatcatggtggaaggtgaagaggaaggagacagctcttacatggctggatgagcaggaagcgtggggaagagttgctatacacttttaaacaaccagatctccggagaactcacctgctatcacaagaacagcagcaagggggacgtccactcccatgatccaatcacctcccaccaggtttctcctccaacactggggcctataattcgacatgagatttgggcagggacacagaggcagaccatatcagtaagctcctgcatggtatgtgtatcagtcaagtgatgctgcagtaacaacactaagcctcttgttcttttttttttttaactttaagttctgggatacatatgcagaatgtgcatgtttgttacataggtatgaatgtgccatggtggtttgctgcacctatcaacccgtcatctaggtttaagccccacatgcattaggtatgtgtcctaatgctttccctccccttgccccgcaccccccgacaggccctggtgtgtgatcttcccctccctgtgtccatgtgttctcattggtcaactcccacttatgagtgagaacatgcagtgtttggttttctgttcctgtgttagtttgctgagaaggatggcttctagcttcatccgtgtccctgcaaaggacatgagctcattcttttttatgggtgcatggtattccacggtgtatatatgccacattttctttatccagtctatcattgagggtaagcccttgttctcataccatattgcttccctttttccttttttattgatatataacaattgtacatattttgagggtacttgtgatatattttgagggtacttgtgatatttcaatacctgtataaaatgtgtaattatcaaatgagggtaaatagaacattcatcacctcaaactttta

SEQ ID NO: 41863 - DNA, 604 bp, Homo sapiens
tagaaacaaggccctactatgatgctcaggctggtctcaaccttgtggcctacaaaggcctcagcttactccctcagcaagctctgccagtgaggcggtcctacagaattgtcccaaactggggtgagagggctggaacttgataccccagcatggaccaggcatcggaagccgcctcccctcgagccaggggtatgacctcggacctgggagaagggcattggtgatgcacctctgttggaagcttcctttatctctatgcccctccctcttctcagacctttcaccccccaagatacatttgagaagaagaatcgaattagccaggaaagctttaggaagaaaygacatttaaacagacctggagaccaggcacggtggctcatgcctgtaatcccagcactttgggaggctgaggcaagtggatcgcttgagcccaggagtttgagaccagcctggccaacatggtgaaaccgcatctctactaaaaatacgaaaaattagccaggtgcagtggcgcacacctgtagtcccagctactcgggaggctgaggcaggagaatggcgtgaacctgggaggcggggcttgcggtgagccgagatc

SEQ ID NO: 41864 - DNA, 861 bp, Homo sapiens
ttcttcaaaaaagaactttctgcacagcttcaaggagtgtgatcagcagatagcctgcaactaacagctccttcatctgtagagatctacatcatcatagtctttccagggcagccaacatccaatcactgaatgcggcatatatacaaagtttggcccattcttgccagaaggaggacaaccccaatggacaatattccatccagatctccttgctgggttgtcccatgctagcctggttgcagttgaacttctccctctgcccaatcttgttgcckcagccttcctgtcacaggtgttgattccttgcttaatgtattgcatcccaaattgtatctcaacatctgcttctggagaactcaatctttgaccttattataatagtaataataatcataatataattacttgtatagtatacagtaacgccaacagcaagatagatgcaagggccagcaaaaggaaacaaaccagattgcagaattagtaattaaggcaatagattattctttgaggtttcatctggcaaaaacaccattttgttgcttaagggttttgtgcttctggggtagatattccagggctccactatcaggtcctttctggaatcaaccagaagctgacatgtcagtcccaggccatttgaaactgagagttctgggccaggaatagccctttaagagaacacactagcttttagctgccaaagttctctaagaatatccacgctgaagcatatgctattctgaagtctggttctttgtttaaattagtaatatctctcttgatgtctctgtttattagaatatagtgggaaatgacccatgtttcaatctagagagacttgggtttgaattctag

SEQ ID NO: 41865 - DNA, 598 bp, Homo sapiens
taatttgacaaagtgggtttgtagtgctggctattttggtgaaaaaaagacaatgagacttcatgtgtcatccaaagttctatcagatcgagctgtgagagaaaggaaaagaaaggggtctcagtcaggatgctcactrcatacatctgtgttgttgtctaggtccagatttctgttcattacgctatgggctggctcttatcatgcacttctcaaacttcaccatgataacgcagcgtgtgagtctgagcattgcgatcatcgccatggtgaacaccactcagcagcaaggtctatctaatgcctccactgaggggcctgttgcagatgccttcaataactccagcatatccatcaaggaatttgatacaaaggtaagtatgatggaaaatagggctctttgttgagagaaaaaactttgaaaggaaggcatagatcttgattctgtggagtatggaagtatacatttccaatgacaaattaaaactgactggaactatttttctttgagacattgcttacttcaataataaaaataagatttcattgaggttattatgattataaggtgggggaactgtagagttaaatgtgaaaa

SEQ ID NO: 41866 - DNA, 579 bp, Homo sapiens
aaaatgttgccagacatgtggagcaactggaactttcatacgttacgaatgtgaactttggaaagctgctcggcaatatctcctaaagctaaatgtacaattccagtgactcaracattttacttagaaatgcacatatacatccataaaacatgtacaacaatgttcataggagcactatctgtaatagcctgaacaggaagttgtctgttaaaaaaagaatgagtaaataaaccacggtctatttgtatagcaatgagaattaacagaccccaatatataatagatgaatgggtctcataagcacaatattgattaaaggaagacaaaacgcacattcttttaaaggtttataaaatactttttaaaaacagctacaaccaatctgtcctgttaaaaatcagtgagcgatttcccttgtgcagggatgggggttgtggctggatggatggtacttaagaagtgctcctggggtactagaaatattttatttcttgacttggatgtgtgtttactttgtgaatattgtacatttatgatttgtgcacgtttatgaatgtagaaaataaaacagaaagc

SEQ ID NO: 41867 - DNA, 544 bp, Homo sapiens
taatgctggatatacatctccctcatgaactctctaaatccttctaatttacattgatcaatcttcttttccatgtgcttttgtatgatttattgctcaaaatctttattttrtatgcagaacgtgcactgctatttaatcttcatgtacgtaagtcctcccttctctgagtataatctcttcagggcactatctgagataactttttaacatctccatcatgaatcttgtaccttttcaaagaaaatgagccagtgattactgatgtttacggctattgttgagggtgaagatcattataattttgaaaagggaagttgaatattgtgaagggaaagataacactagagtcagaagacttgggagaaggcaaaaaacaaactaaaaatgagcacttttagtctcctgacagtttctctgaatcaaatccatagttctgtgacagcgttggcttagaagcagattttttttttttttttttttgaaatggagtttcgctcttgcccaggctggagtgcagtggcacgatctcggctcactgcaa

SEQ ID NO: 41868 - DNA, 555 bp, Homo sapiens
cccaaatcttataaaacggacccaccccatctcccttcgctgactcttttcggactcagcccgcctgcacccaggtagaataaacagccttgttgctcacacaaaccctgtttgatggtctcttcacacggacgcgcctgaaacagtttaacagggtttttcctgcccagtcacaacaaagtgatgttatgctgcaggctgaagtttacagctaatgctgttgaagtctaaaatcagttttggtttgttagatttgggtgagatggctaagattctcagagaaagaagtcaagtttggggtgcatttttcagacttaaaaatttagcagtagcccttgcagtttttccaatagaagtgatttamgaatgttttcaggaaatttaaaacaacagtgagaagcgtgtatggagagttgaactacactccagacttggctataggaaagcacgaatgctgctattgtattgcaccttggaaaagagaacaaaggaatattttcggacaattttaacatgtcacatatgaaaagctaaacggaatctgtcaacaccttg

SEQ ID NO: 41869 - DNA, 451 bp, Homo sapiens
agtctcactctgtcacccagaatagagtgcagtggtgtgatctaggctcaccgcaagctctgtgttctgggttcatgccattcttgtgcctcagtctccctagtagctgggattacagggatctgccaccacacctggctaattttgtatttttgttttttagtagagagggggtttcaccatgttagccaggatggtctcggtcttccaaagtgctgacattacaggcgtgagccacygcgcccggcctccccttgcacttttaaaatgatgtctgggagtaataactgagaatggttacttggtttggttatcacgtatctcctatgttgatgctgtgtaacatacatctatgatactttgttggtatgtgataacatattgcttatgcgtgaggtgatgggctaggaggcttaactggtcttagctgagctggcttctgtgtctggga

SEQ ID NO: 41870 - DNA, 672 bp, Homo sapiens
cctaaattgagccagcatttccaatttagcccacgctacctgggctcctgctgggtgtcaggccctgtgctaagccttttccacacagggtgtcaaggaatctgcaactcagagggataggacctagtgttattccctttwtatagatgaggaaatggaggaacttgcccaagatcacagctagtaagttttagagctgctgttagagcaagagattgtctcaaaagaaaaagttagacccaagttctatcacccagggtggagtacagtggcacaatctcccctcactacagccttcgcctcccaagttcaattttgtttcctcagcttcccaagtagctgggattacagggacccactaccatacctggctcatttttgtatttttaggagaggcagggtttcaccacgttggccaggctgatcttgaactcctgacctcaagtgatccacccgcctcagcctcccaaagtgctgggattacaggcgtgagccacggcacccagtgtgggtctaacacttaaacttgtgtttgaaggcagcgtgttgggaacatggactttggggccaggctggtgttggtcccagtcttttactcttaaatcttgtgcatataagccctagactatcactgccttttttttttttttaaacaaagtattagttaaatca

SEQ ID NO: 41871 - DNA, 672 bp, Homo sapiens
cctaaattgagccagcatttccaatttagcccacgctacctgggctcctgctgggtgtcaggccctgtgctaagccttttccacacagggtgtcaaggaatctgcaactcagagggataggacctagtgttattccctttttatagatgaggaaatggaggaacttgcccaagatcacagctagtaagttttagagctgctgttagagcaagagattgtctcaaaagaaaaagttagacccaagttctatcacccagggtggagtacagtggcacartctcccctcactacagccttcgcctcccaagttcaattttgtttcctcagcttcccaagtagctgggattacagggacccactaccatacctggctcatttttgtatttttaggagaggcagggtttcaccacgttggccaggctgatcttgaactcctgacctcaagtgatccacccgcctcagcctcccaaagtgctgggattacaggcgtgagccacggcacccagtgtgggtctaacacttaaacttgtgtttgaaggcagcgtgttgggaacatggactttggggccaggctggtgttggtcccagtcttttactcttaaatcttgtgcatataagccctagactatcactgccttttttttttttttaaacaaagtattagttaaatca

SEQ ID NO: 41872 - DNA, 672 bp, Homo sapiens
cctaaattgagccagcatttccaatttagcccacgctacctgggctcctgctgggtgtcaggccctgtgctaagccttttccacacagggtgtcaaggaatctgcaactcagagggataggacctagtgttattccctttttatagatgaggaaatggaggaacttgcccaagatcacagctagtaagttttagagctgctgttagagcaagagattgtctcaaaagaaaaagttagacccaagttctatcacccagggtggagtacagtggcacaatctcccctcactacagccttcgcctcccaagttcaattttgtttcctcagcttcccaagtagctgggattacagggacccactaccayacctggctcatttttgtatttttaggagaggcagggtttcaccacgttggccaggctgatcttgaactcctgacctcaagtgatccacccgcctcagcctcccaaagtgctgggattacaggcgtgagccacggcacccagtgtgggtctaacacttaaacttgtgtttgaaggcagcgtgttgggaacatggactttggggccaggctggtgttggtcccagtcttttactcttaaatcttgtgcatataagccctagactatcactgccttttttttttttttaaacaaagtattagttaaatca

SEQ ID NO: 41873 - DNA, 765 bp, Homo sapiens
ccccacctccccccaaccccgactacccttcccagcctctggtaaccatccttctactatttccatgggttcaattgttttgattttttgatcccacaaataagtgagaatgtttgatttttttctgtgcctggatgttttaatttaacgtaatgaccttccagttccatccatgttgttgcaaatgactgaatctcattcacttttgtggctgaatagtactccactatatataggtaccacattttctttacccattcatctgttgacggacactttggttgcttccaaatcttggctattgtgaacagagctgcaataaacatgggactgcagatatctctttgatattttastctttttattgaagacaattctgcaggactccttctttccccaactatcatctaaaattgttaagacctactgcacaggtcttaagcatcctgaaaatcccttcctttaacctggaaattccctctattagtccattctcacattgctataaagaaatacctgagacttagtaatttataaagaaaagacatttaattggctcatggttctgcagactgtacaggaagcatgatgttggcatttgtttggcttctgaggaggcttcaggaaactttcagtcatagctgaagacaaagggggagtctccattgatttgaaggaacaactgtaaggccaatatgcctctgtgaggggtaactactaagtggatttagttgaccaccaaatactattgtctgttagtcataa

SEQ ID NO: 41874 - DNA, 765 bp, Homo sapiens
ccccacctccccccaaccccgactacccttcccagcctctggtaaccatccttctactatttccatgggttcaattgttttgattttttgatcccacaaataagtgagaatgtttgatttttttctgtgcctggatgttttaatttaacgtaatgaccttccagttccatccatgttgttgcaaatgactgaatctcattcacttttgtggctgaatagtactccactatatataggtaccacattttctttacccattcatctgttgacggacactttggttgcttccaaatcttggctattgtgaacagagctgcaataaacatgggactgcagatatctctttgatattttactctttttattgaagacaattctgcaggastccttctttccccaactatcatctaaaattgttaagacctactgcacaggtcttaagcatcctgaaaatcccttcctttaacctggaaattccctctattagtccattctcacattgctataaagaaatacctgagacttagtaatttataaagaaaagacatttaattggctcatggttctgcagactgtacaggaagcatgatgttggcatttgtttggcttctgaggaggcttcaggaaactttcagtcatagctgaagacaaagggggagtctccattgatttgaaggaacaactgtaaggccaatatgcctctgtgaggggtaactactaagtggatttagttgaccaccaaatactattgtctgttagtcataa

SEQ ID NO: 41875 - DNA, 765 bp, Homo sapiens
ccccacctccccccaaccccgactacccttcccagcctctggtaaccatccttctactatttccatgggttcaattgttttgattttttgatcccacaaataagtgagaatgtttgatttttttctgtgcctggatgttttaatttaacgtaatgaccttccagttccatccatgttgttgcaaatgactgaatctcattcacttttgtggctgaatagtactccactatatataggtaccacattttctttacccattcatctgttgacggacactttggttgcttccaaatcttggctattgtgaacagagctgcaataaacatgggactgcagatatctctttgatattttactctttttattgaagacaattctgcaggactccttctttccccaactatcatctaaaattgttaagaccyactgcacaggtcttaagcatcctgaaaatcccttcctttaacctggaaattccctctattagtccattctcacattgctataaagaaatacctgagacttagtaatttataaagaaaagacatttaattggctcatggttctgcagactgtacaggaagcatgatgttggcatttgtttggcttctgaggaggcttcaggaaactttcagtcatagctgaagacaaagggggagtctccattgatttgaaggaacaactgtaaggccaatatgcctctgtgaggggtaactactaagtggatttagttgaccaccaaatactattgtctgttagtcataa

SEQ ID NO: 41876 - DNA, 765 bp, Homo sapiens
ccccacctccccccaaccccgactacccttcccagcctctggtaaccatccttctactatttccatgggttcaattgttttgattttttgatcccacaaataagtgagaatgtttgatttttttctgtgcctggatgttttaatttaacgtaatgaccttccagttccatccatgttgttgcaaatgactgaatctcattcacttttgtggctgaatagtactccactatatataggtaccacattttctttacccattcatctgttgacggacactttggttgcttccaaatcttggctattgtgaacagagctgcaataaacatgggactgcagatatctctttgatattttactctttttattgaagacaattctgcaggactccttctttccccaactatcatctaaaattgttaagacctactgcacaggtcttaagcatcctgaaaatcccttcctttaacctggaaattccctctattagtccattctcacattgctataaagaaatacctgagacttagtaatttataaagaaaagacatttaattggctcatggttctgcagactgtacaggaagcatgatgttggcatttgtttggcttctgaggaggcttcaggaaactttcagtcatagctgaagacaaagggggagtctccattgatttgaaggaacaactgtaaggccaatatgcctctstgaggggtaactactaagtggatttagttgaccaccaaatactattgtctgttagtcataa

SEQ ID NO: 41877 - DNA, 527 bp, Homo sapiens
tgggttaactgcttgtgttttctgttttttgttttttggggttttttttagatgaagtctcgctttgtcgcccaggctggagtccagtggcatgatcttggctcactgcaacctccgcctctaggttcaagcgattcttctgcctcagcctcccaagtagctgggactacaggtgcccgccaacacacccggctaacttttctatttttagtagagatggggtttagccatgttgaccaggctggtctcaaactctagacctcgtgatctgcccacctcagcctcccaaagtgctgggattacaggcatgagccaccacgcccagctgtactttttgttttaatcaatgctttgtcaggaattaaacaagacccagagtcttataacgcagtattcaaaatgtccagaatagaattcaaaattacttgayacatgaagagccaataaaatttcaatagcttgcaagtgaagaggcaattaacagatgctaaccctcaataacacagatgctgaatgtcagaattatc

SEQ ID NO: 41878 - DNA, 2381 bp, Homo sapiens
aaaacccaccccattcctccccacactcatcgcccttaccacgctactcctacctatctccccttttatactaataatcttatagaaatttaggttaaatacagaccaagagccttcaaagccctcagtaagttgcaatacttaatttctgtaacagctaaggactgcaaaaccccactctgcatcaactgaacgcaaatcagccactttaattaagctaagcccttactagaccaatgggacttaaacccacaaacacttagttaacagctaagcaccctaatcaactggcttcaatctacttctcccgccgccgggaaaaaaggcgggagaagccccggcaggtttgaagctgcttcttcgaatttgcaattcaatatgaaaatcacctcggagctggtaaaaagaggcctaacccctgtctttagatttacagtccaatgcttcactcagccattttacctcacccccactgatgttcgccgaccgttgactattctctacaaaccacaaagacattggaacactatacctattattcggcgcatgagctggagtcctaggcacagctctaagcctccttattcgagccgagctgggccagccaggcaaccttctaggtaacgaccacatctacaacgttatcgtcacagcccatgcatttgtaataatcttcttcatagtaatacccatcataatcggaggctttggcaactgactagttcccctaataatcggtgcccccgatatggcgtttccccgcataaacaacataagcttctgactcttacctccctctctcctactcctgctcgcatctgctatagtggaggccggagcaggaacaggttgaacagtctaccctcccttagcagggaactactcccaccctggagcctccgtagacctaaccatcttctccttacacctagcaggtgtctcctctatcttaggggccatcaatttcatcacaacaattatcaatataaaaccccctgccataacccaataccaaacgcccctcttcgtctgatccgtcctaatcacagcagtcctacttctcctatctctcccagtcctagctgctggcatcactatactactaacagaccgcaacctcaacaccaccttcttcgaccccgccggaggaggagaccccattctataccaacacctattctgatttttcggtcaccctgaagtttatattcttatcctaccaggcttcggaataatctcccatattgtaacttactactccggaaaaaaagaaccatttggatacataggtatggtctgagctatgatatcaattggcttcctagggtttatcgtgtgagcacaccatatatttacagtaggaatagacgtagacacacgagcatatttcacctccgctaccataatcatcgctatccccaccggcgtcaaagtatttagctgactcgccacactccacggaagcaatatgaaatgatctgctgcagtgctctgagccctaggattcatctttcttttcaccgtaggtggcctractggcattgtattagcaaactcatcactagacatcgtactacacgacacgtactacgttgtagcccacttccactatgtcctatcaataggagctgtatttgccatcataggaggcttcattcactgatttcccctattctcaggctacaccctagaccaaacctacgccaaaatccatttcactatcatattcatcggcgtaaatctaactttcttcccacaacactttctcggcctatccggaatgccccgacgttactcggactaccccgatgcatacaccacatgaaacatcctatcatctgtaggctcattcatttctctaacagcagtaatattaataattttcatgatttgagaagccttcgcttcgaagcgaaaagtcctaatagtagaagaaccctccataaacctggagtgactatatggatgccccccaccctaccacacattcgaagaacccgtatacataaaatctagacaaaaaaggaaggaatcgaaccccccaaagctggtttcaagccaaccccatggcctccatgactttttcaaaaaggtattagaaaaaccatttcataactttgtcaaagttaaattataggctaaatcctatatatcttaatggcacatgcagcgcaagtaggtctacaagacgctacttcccctatcatagaagagcttatcacctttcatgatcacgccctcataatcattttccttatctgcttcctagtcctgtatgcccttttcctaacactcacaacaaaactaactaatactaacatctcagacgctcaggaaatagaaaccgtctgaactatcctgcccgccatcatcctagtcct

SEQ ID NO: 41879 - DNA, 545 bp, Homo sapiens
taacattcttccctgaacttcaattaaagctcttcaatttgttagccaagtccaatttttacagataaagcacaggtaaagctcaaagcctgtcttgatgactactaattccagattagtaagatatgaattactctacctatgtgtatgtgtagaagtccttaaatttcaaagatgacagtaatggccatgtgtatgtgtgtgacccacaactatcatggtcattaaagtacattggccagagaccacatgaaataacaacaattacattctcatcatcttattttgacagtgaaaatgaagaagacagttcctccattgatcatctgtctctgaatcaggtaagcaaatgactgtaattctcatgggactgctattcttacacagtggtttcttcatccaaagagaacagcaatgacttgaatcttmaatacttttgttttaccctcactagagatccagagacctgtctttcattataagtgagaccagctgcctctctaaactaatagttgatgtgcattggcttctcccagaacagagca

SEQ ID NO: 41880 - DNA, 838 bp, Homo sapiens
agagcccaggacagcaggcaggctctccgatccccccaggcccttgccccatacacgggctccagaacacacatttgctggaacagcctgagggaccaaaaggccccagtatcccacagagctgaggagccaggccagaaaagtaaccccagagttcgctgtgcaggagagacacagagctctctttatctgtcaggatggcaggaggggacagggtcagggccctgagggtcagatgtcggtgttgggggccaaggcgcagagatctcaggacaggtggtcaggtgtctaaggtaaaacagctccccgtgcagatcaggacatagtggaaaacaccctgacccctctgcctggcatagaccttcagacacagagcccctgaacaagggcaccccaacacctcatcatatactgaggtcaggggctccccaggtggacaccaggactctgaccccctgcccctcatccaccccgcaggtcagcccaaggctgccccctcggtcactctgttcccgccctcctctgaggagcttcaagccaacaaggccacactggtgtgtctcataagtgacttctacccgggagccgtgacagtggcctggaaggcagatagcagccccgtcaaggcgggagtggagaccaccacaccctccaaacaaagcaacaacaagtacgcggccagcagctatctgagcctgacgcctgagcagtggaagtcccacagaagctacagctgccaggtcacgcatgaagggagcaccgtggagaagacagtggcccctacagaatgttcataggttctmaaccctcacccccaccacgggagactagagctgca

SEQ ID NO: 41881 - DNA, 838 bp, Homo sapiens
agagcccaggacagcaggcaggctctccgatccccccaggcccttgccccatacacgggctccagaacacacatttgctggaacagcctgagggaccaaaaggccccagtatcccacagagctgaggagccaggccagaaaagtaaccccagagttcgctgtgcaggagagacacagagctctctttatctgtcaggatggcaggaggggacagggtcagggccctgagggtcagatgtcggtgttgggggccaaggcgcagagatctcaggacaggtggtcaggtgtctaaggtaaaacagctccccgtgcagatcaggacatagtggaaaacaccctgacccctctgcctggcatagaccttcagacacagagcccctgaacaagggcaccccaacacctcatcatatactgaggtcaggggctccccaggtggacaccaggactctgaccccctgcccctcatccaccccgcaggtcagcccaaggctgccccctcggtcactctgttcccgccctcctctgaggagcttcaagccaacaaggccacactggtgtgtctcataagtgacttctacccgggagccgtgacagtggcctggaaggcagatagcagccccgtcaaggcgggagtggagaccaccacaccctccaaacaaagcaacaacaagtacgcggccagcagctatctgagcctgacgcctgagcagtggaagtcccacagaagctacagctgccaggtcacgcatgaagggagcaccgtggagaagacagtggcccctacagaatgttcataggttctcaaccctcacccccmccacgggagactagagctgca

SEQ ID NO: 41882 - DNA, 620 bp, Homo sapiens
gcttctcaggacccctgctggtgtttgaggaagccttcttctcggtagttctgtccttgccccactgaccctgtcatgtcccccgcaccacctgcctgatgcatggtgccttgccccaaggccctttgactgaccggcttcttctgaccaccctgcagttctgcgagaccaacggtctagagtacatcgtgggccgcgtgtggatcggcttctggctcatcctgctggtggtgttggtggtggccttcgagggtagcttcctggtccgcttcatctcccgctatacccaggagatcttctccttcctcatttccctcatcttcatctatgagactttctccaagctgatcaaggtgggggcctatggggatgttaatgcacacgggaggttgtgtataagactgagacagtggccgggygcgagggctcaggcctgtaatctcagaactttgggaggccgaggcaggtggatcacccgagatcaggagttcaagaccagcctgaccaacattgtgaaactccatctctattaaaaatacaaaaatcagccagatgtggtggcatgcatctgtaatcccagctactcaggaggctgaggcaggagaactgcttgaacccgg

SEQ ID NO: 41883 - DNA, 1006 bp, Homo sapiens
tttctattggtatttaaacatagtcaaatctctcagcttttcaacaacaacaaaaacagtaggaacagcattagcaagcatatgcatgaarcccaaactccaaaccctcagacccttcccttaaccctacctctacttctctcctatctttgctttttctccttcatagacaaactcaattaatttgtccagacttgctgtcttcgcttcccacacactcttcatcccactagtttggcttctgtccccatccctctttttcttccaattttctcagtcttattgaatgacggtgtttgccaatatctttctgaagcctaggaatgaatctgactctctctacgttcctcactttcccacataaaatgagtcacctgtttccattggtttggtctctaaatctctcctttgagtccacccacttctttccctccccattgcccctccctaatttgggaagatataatttctttttctctgtgaacgtgatgggccagccaatgcatgttgctacatgatgagtccctaaagacttagggccaggtgtggtggctcacgcctgtaatcccagcactttgggagactgaggcgggtggatcacctgagctcggaggttcgagactagcctgggcaatatggtgaaagcccgtctctactaaaaatacacaaaaattagctgggcatggtggtgcatgtctgtgatcccagctacttaggaggctgaggcagaagaatcgcttgaacctgggaggtggaggttacagtgagcagtgagccaagatcatgccactgcactccagcctgggcgacacagtcagactcattctcaaaaaaaaaaaaaaaaaaaaaaaacttaggcatgctgataggcaaaagatctagtccccggagatttccttgtcattttaacatcctcctgatgtgggttttctgtttgaaattgtgacttatgcatctctcagttgattccctttcactccctggcatttctctctgattttgggag

SEQ ID NO: 41884 - DNA, 1006 bp, Homo sapiens
tttctattggtatttaaacatagtcaaatctctcagcttttcaacaacaacaaaaacagtaggaacagcattagcaagcatatgcatgaaacccaaactccaaaccctcagacccttcccttaaccctacmtctacttctctcctatctttgctttttctccttcatagacaaactcaattaatttgtccagacttgctgtcttcgcttcccacacactcttcatcccactagtttggcttctgtccccatccctctttttcttccaattttctcagtcttattgaatgacggtgtttgccaatatctttctgaagcctaggaatgaatctgactctctctacgttcctcactttcccacataaaatgagtcacctgtttccattggtttggtctctaaatctctcctttgagtccacccacttctttccctccccattgcccctccctaatttgggaagatataatttctttttctctgtgaacgtgatgggccagccaatgcatgttgctacatgatgagtccctaaagacttagggccaggtgtggtggctcacgcctgtaatcccagcactttgggagactgaggcgggtggatcacctgagctcggaggttcgagactagcctgggcaatatggtgaaagcccgtctctactaaaaatacacaaaaattagctgggcatggtggtgcatgtctgtgatcccagctacttaggaggctgaggcagaagaatcgcttgaacctgggaggtggaggttacagtgagcagtgagccaagatcatgccactgcactccagcctgggcgacacagtcagactcattctcaaaaaaaaaaaaaaaaaaaaaaaacttaggcatgctgataggcaaaagatctagtccccggagatttccttgtcattttaacatcctcctgatgtgggttttctgtttgaaattgtgacttatgcatctctcagttgattccctttcactccctggcatttctctctgattttgggag

SEQ ID NO: 41885 - DNA, 1006 bp, Homo sapiens
tttctattggtatttaaacatagtcaaatctctcagcttttcaacaacaacaaaaacagtaggaacagcattagcaagcatatgcatgaaacccaaactccaaaccctcagacccttcccttaaccctacctctacttctctcctatctttgctttttctccttcatagacaaactcaattaatttgtccagacttgctgtcttcgcttcccayacactcttcatcccactagtttggcttctgtccccatccctctttttcttccaattttctcagtcttattgaatgacggtgtttgccaatatctttctgaagcctaggaatgaatctgactctctctacgttcctcactttcccacataaaatgagtcacctgtttccattggtttggtctctaaatctctcctttgagtccacccacttctttccctccccattgcccctccctaatttgggaagatataatttctttttctctgtgaacgtgatgggccagccaatgcatgttgctacatgatgagtccctaaagacttagggccaggtgtggtggctcacgcctgtaatcccagcactttgggagactgaggcgggtggatcacctgagctcggaggttcgagactagcctgggcaatatggtgaaagcccgtctctactaaaaatacacaaaaattagctgggcatggtggtgcatgtctgtgatcccagctacttaggaggctgaggcagaagaatcgcttgaacctgggaggtggaggttacagtgagcagtgagccaagatcatgccactgcactccagcctgggcgacacagtcagactcattctcaaaaaaaaaaaaaaaaaaaaaaaacttaggcatgctgataggcaaaagatctagtccccggagatttccttgtcattttaacatcctcctgatgtgggttttctgtttgaaattgtgacttatgcatctctcagttgattccctttcactccctggcatttctctctgattttgggag

SEQ ID NO: 41886 - DNA, 1006 bp, Homo sapiens
tttctattggtatttaaacatagtcaaatctctcagcttttcaacaacaacaaaaacagtaggaacagcattagcaagcatatgcatgaaacccaaactccaaaccctcagacccttcccttaaccctacctctacttctctcctatctttgctttttctccttcatagacaaactcaattaatttgtccagacttgctgtcttcgcttcccacacactcttcatcccactagtttggcttctgtccccatccctctttttcttccaattttctcagtcttattgaatgacggtgtttgccaatatctttctgaagcctaggaatgaatctgactctctctrcgttcctcactttcccacataaaatgagtcacctgtttccattggtttggtctctaaatctctcctttgagtccacccacttctttccctccccattgcccctccctaatttgggaagatataatttctttttctctgtgaacgtgatgggccagccaatgcatgttgctacatgatgagtccctaaagacttagggccaggtgtggtggctcacgcctgtaatcccagcactttgggagactgaggcgggtggatcacctgagctcggaggttcgagactagcctgggcaatatggtgaaagcccgtctctactaaaaatacacaaaaattagctgggcatggtggtgcatgtctgtgatcccagctacttaggaggctgaggcagaagaatcgcttgaacctgggaggtggaggttacagtgagcagtgagccaagatcatgccactgcactccagcctgggcgacacagtcagactcattctcaaaaaaaaaaaaaaaaaaaaaaaacttaggcatgctgataggcaaaagatctagtccccggagatttccttgtcattttaacatcctcctgatgtgggttttctgtttgaaattgtgacttatgcatctctcagttgattccctttcactccctggcatttctctctgattttgggag

SEQ ID NO: 41887 - DNA, 1006 bp, Homo sapiens
tttctattggtatttaaacatagtcaaatctctcagcttttcaacaacaacaaaaacagtaggaacagcattagcaagcatatgcatgaaacccaaactccaaaccctcagacccttcccttaaccctacctctacttctctcctatctttgctttttctccttcatagacaaactcaattaatttgtccagacttgctgtcttcgcttcccacacactcttcatcccactagtttggcttctgtccccatccctctttttcttccaattttctcagtcttattgaatgacggtgtttgccaatatctttctgaagcctaggaatgaatctgactctctctacgttcctcactttcccacataaaatgagtcacctgtttccattggtttggtcwctaaatctctcctttgagtccacccacttctttccctccccattgcccctccctaatttgggaagatataatttctttttctctgtgaacgtgatgggccagccaatgcatgttgctacatgatgagtccctaaagacttagggccaggtgtggtggctcacgcctgtaatcccagcactttgggagactgaggcgggtggatcacctgagctcggaggttcgagactagcctgggcaatatggtgaaagcccgtctctactaaaaatacacaaaaattagctgggcatggtggtgcatgtctgtgatcccagctacttaggaggctgaggcagaagaatcgcttgaacctgggaggtggaggttacagtgagcagtgagccaagatcatgccactgcactccagcctgggcgacacagtcagactcattctcaaaaaaaaaaaaaaaaaaaaaaaacttaggcatgctgataggcaaaagatctagtccccggagatttccttgtcattttaacatcctcctgatgtgggttttctgtttgaaattgtgacttatgcatctctcagttgattccctttcactccctggcatttctctctgattttgggag

SEQ ID NO: 41888 - DNA, 1006 bp, Homo sapiens
tttctattggtatttaaacatagtcaaatctctcagcttttcaacaacaacaaaaacagtaggaacagcattagcaagcatatgcatgaaacccaaactccaaaccctcagacccttcccttaaccctacctctacttctctcctatctttgctttttctccttcatagacaaactcaattaatttgtccagacttgctgtcttcgcttcccacacactcttcatcccactagtttggcttctgtccccatccctctttttcttccaattttctcagtcttattgaatgacggtgtttgccaatatctttctgaagcctaggaatgaatctgactctctctacgttcctcactttcccacataaaatgagtcacctgtttccattggtttggtctctaaatctctcctttgagtccacccacttctttccctccccattgcccctccctaatttgggaagatataatttctttttctctgtgaacgtgatgggccagccaatgcatgttgctacatgatgagtccctaaagacttaggrccaggtgtggtggctcacgcctgtaatcccagcactttgggagactgaggcgggtggatcacctgagctcggaggttcgagactagcctgggcaatatggtgaaagcccgtctctactaaaaatacacaaaaattagctgggcatggtggtgcatgtctgtgatcccagctacttaggaggctgaggcagaagaatcgcttgaacctgggaggtggaggttacagtgagcagtgagccaagatcatgccactgcactccagcctgggcgacacagtcagactcattctcaaaaaaaaaaaaaaaaaaaaaaaacttaggcatgctgataggcaaaagatctagtccccggagatttccttgtcattttaacatcctcctgatgtgggttttctgtttgaaattgtgacttatgcatctctcagttgattccctttcactccctggcatttctctctgattttgggag

SEQ ID NO: 41889 - DNA, 524 bp, Homo sapiens
gattctgctgcctcagcgtcctgagtagctgggattacaggcacctgccaccatgccaagctaatttttttgtatttttagtagagacggggtttcaccatgttggccaggctggtctcraactcctgacctcaagcaatctgcccgcctcggcctcccaaagtgctgggattacaggcgtgagccaccgtgtccggcaagaatatgaaaagttttaacaatttgttgttagctttgaatatatagaattggtcaacctgggccacatagagagaccccgtgtctacaaaaaaatttaaaaattagccaggtgtggctgcacctataggcccagctttttgggaggctgaggtgggaagatcacttaaacctgggagtgtgaggctgtagtgagtcaagatcatgccactaccctccagcctgggtaacagcgagactgtctcaaaaaaaaaaaaaagtgacagagtgagaccatctcaaaaaaaaaaggtaactaattagactttttattagatgaataatat

SEQ ID NO: 41890 - DNA, 524 bp, Homo sapiens
gattctgctgcctcagcgtcctgagtagctgggattacaggcacctgccaccatgccaagctaatttttttgtatttttagtagagacggggtttcaccatgttggccaggctggtctcgaactcctgacctcaagcaatctgcccgcctcggcctcccaaagtgctgggattacaggygtgagccaccgtgtccggcaagaatatgaaaagttttaacaatttgttgttagctttgaatatatagaattggtcaacctgggccacatagagagaccccgtgtctacaaaaaaatttaaaaattagccaggtgtggctgcacctataggcccagctttttgggaggctgaggtgggaagatcacttaaacctgggagtgtgaggctgtagtgagtcaagatcatgccactaccctccagcctgggtaacagcgagactgtctcaaaaaaaaaaaaaagtgacagagtgagaccatctcaaaaaaaaaaggtaactaattagactttttattagatgaataatat

SEQ ID NO: 41891 - DNA, 532 bp, Homo sapiens
ggtatctataccctagtttgggaagccctaagctccagcttacttctatcattatactgacaacagtaaactgtaatttatgttccagactgtaagctcccaagaacagggactcgatttacccatctttgtgtccctgtggttgagggtaaaggccaacagtgccattctccattcttgctagaaagaactggttatagatttgatggttccttcaaatcctttgagatatgaaagaaaatgataggattcaatggatggcaagaacaacaagaggaaggaggcctggactggagcccattaaagggaggacttccaggtttgagctgatgagcatcaggacacctgcactctacttctggctgattcttcatgtcctggagacagtctactactttgaactggtggcctttctcaggctgcgaattccttgagawaaacatcatgtctttcttgttgttcaccagtttatctgcagaacctgcttagtaaccagcacacagaagatgctcagtaaaaaaatgtgggttga

SEQ ID NO: 41892 - DNA, 523 bp, Homo sapiens
taagaattgaaaatggaatgcatgtagacagatgaagcccagctcccgccccttttacactcattcagtgcagactgagcttctgcttgctaactttcgtgttcccttaaccttcattgctttaaaaatgtaacactctcttccttattccaggtatttctgtcaaacattcccttagaatctggatcaggtattttagtattttcaaaagagatgctttaatcttggttctcaggtcatcaaacctgtacatagtatttgctattttgtgtggtgaacaagagatatgtttttgacaatatgtgtattgtgctgctatagaaatgtaaactcttaggtggcaaggattattggatcagtgtatatggatttatgatgtggtataatagtaaaagcagtggggccgggtgcggtggctcacgcctrtaatcccagcactttgggaggccgaggtcggcgatcatgaggtcaggagatcgagaccatcctggctaacacggtaaaacactgtctctactaaaaa

SEQ ID NO: 41893 - DNA, 1045 bp, Homo sapiens
tgcagatcatcagggctgtgcaattgtatggcatttgtggacatgatacaatcatgttcacattgcaatatttagactccatttatttatcaccacatgcaaatattcatgtatctatttttgcattcattctttggaaatgttttgaagtcagatcttcaatcaaatataagctgggtaccactttaaacggtgtgtctttaggcaagccactcatcctttctgaacctcaatttggaagatagaaataaatatgaccactcagggtttgggggagaattaaatgacataatttatgtattgtgtagtactcaatacatgataggcatcattaatatatttataactatgactaaatsctgggttttattttagtcattaactgagaaaataactattaagtgactacttttggccagctctgtgctatggtaggccccttaaagatgagaaaagatggttacgactcttcagaagccccatctaataagatagataggcctgtgtgtggcaaaagcatccaagattatcacaagaattgagtcaaacctgctgaatgagatatggctggggaggggggaaggaagcagaaagctaagcggggaagacagcaattggggtgagttttctggagaggcactttccccctgaggacaagcactgaatttgttctgtggaaaggaaaaacactcagagcatggtccaagtggctgataaaggagaactggctcggtaaaggagtttaaccctcttggagggctttctttcactgtatggtaagaaaaacggcaggcaaggaggaaaagaacatctacagatccaatatgaaagcatacattgaagaatcatgccgggggattaatttggcttcttgcacagagattttgtgacccagagacaaagccttaggtatgatggaggcagaacagtagcatcttgaacagcactgattctaggctggggggcaaaggtataggacttcttcaggctatggcagtgatgctaagatagtttgggtgcagggggttttagccttagtgtgtgg

SEQ ID NO: 41894 - DNA, 1045 bp, Homo sapiens
tgcagatcatcagggctgtgcaattgtatggcatttgtggacatgatacaatcatgttcacattgcaatatttagactccatttatttatcaccacatgcaaatattcatgtatctatttttgcattcattctttggaaatgttttgaagtcagatcttcaatcaaatataagctgggtaccactttaaacggtgtgtctttaggcaagccactcatcctttctgaacctcaatttggaagatagaaataaatatgaccactcagggtttgggggagaattaaatgacataatttatgtattgtgtagtactcaatacatgataggcatcattaatatatttataactatgactaaatgctgggttttattttagtcattaactgagmaaataactattaagtgactacttttggccagctctgtgctatggtaggccccttaaagatgagaaaagatggttacgactcttcagaagccccatctaataagatagataggcctgtgtgtggcaaaagcatccaagattatcacaagaattgagtcaaacctgctgaatgagatatggctggggaggggggaaggaagcagaaagctaagcggggaagacagcaattggggtgagttttctggagaggcactttccccctgaggacaagcactgaatttgttctgtggaaaggaaaaacactcagagcatggtccaagtggctgataaaggagaactggctcggtaaaggagtttaaccctcttggagggctttctttcactgtatggtaagaaaaacggcaggcaaggaggaaaagaacatctacagatccaatatgaaagcatacattgaagaatcatgccgggggattaatttggcttcttgcacagagattttgtgacccagagacaaagccttaggtatgatggaggcagaacagtagcatcttgaacagcactgattctaggctggggggcaaaggtataggacttcttcaggctatggcagtgatgctaagatagtttgggtgcagggggttttagccttagtgtgtgg

SEQ ID NO: 41895 - DNA, 1045 bp, Homo sapiens
tgcagatcatcagggctgtgcaattgtatggcatttgtggacatgatacaatcatgttcacattgcaatatttagactccatttatttatcaccacatgcaaatattcatgtatctatttttgcattcattctttggaaatgttttgaagtcagatcttcaatcaaatataagctgggtaccactttaaacggtgtgtctttaggcaagccactcatcctttctgaacctcaatttggaagatagaaataaatatgaccactcagggtttgggggagaattaaatgacataatttatgtattgtgtagtactcaatacatgataggcatcattaatatatttataactatgactaaatgctgggttttattttagtcattaactgagaaaataactattaagtgactacttttggccagctctgtgctatggtaggccccttaaagatgagaaaagatggttacgactcttcagaagccccatctaataagatagataggcctgtgtgtggcaaaagcatccaagattatcacaagaattgagtcaaacctgctgaatgagatatggctggggaggggggaaggaagcagaaagctaagcggggaagacagcaattggggtgagttttctggagaggcactttccccctgaggacaagcactgaatttgttctgtggaaaggaaaaacactcagagcatggtccaagtggctgataaaggagaactggctcggtaaaggagtttaaccctcttggagggctttctttcactgtatggtaagaaaaacggcaggcaaggaggaaaagaacatctacagatccaatatgaaagcatacattgaagaatcatgccrggggattaatttggcttcttgcacagagattttgtgacccagagacaaagccttaggtatgatggaggcagaacagtagcatcttgaacagcactgattctaggctggggggcaaaggtataggacttcttcaggctatggcagtgatgctaagatagtttgggtgcagggggttttagccttagtgtgtgg

SEQ ID NO: 41896 - DNA, 1045 bp, Homo sapiens
tgcagatcatcagggctgtgcaattgtatggcatttgtggacatgatacaatcatgttcacattgcaatatttagactccatttatttatcaccacatgcaaatattcatgtatctatttttgcattcattctttggaaatgttttgaagtcagatcttcaatcaaatataagctgggtaccactttaaacggtgtgtctttaggcaagccactcatcctttctgaacctcaatttggaagatagaaataaatatgaccactcagggtttgggggagaattaaatgacataatttatgtattgtgtagtactcaatacatgataggcatcattaatatatttataactatgactaaatgctgggttttattttagtcattaactgagaaaataactattaagtgactacttttggccagctctgtgctatggtaggccccttaaagatgagaaaagatggttacgactcttcagaagccccatctaataagatagataggcctgtgtgtggcaaaagcatccaagattatcacaagaattgagtcaaacctgctgaatgagatatggctggggaggggggaaggaagcagaaagctaagcggggaagacagcaattggggtgagttttctggagaggcactttccccctgaggacaagcactgaatttgttctgtggaaaggaaaaacactcagagcatggtccaagtggctgataaaggagaactggctcggtaaaggagtttaaccctcttggagggctttctttcactgtatggtaagaaaaacggcaggcaaggaggaaaagaacatctacagatccaatatgaaagcatacattgaagaatcatgccgggggattaatttggcttcttgcacagagattttgtgacccagagacaaagccttaggtatgatggaggcagaacagtagcatcttgaacagcactgattctaggctggggggcaaaggtataggactycttcaggctatggcagtgatgctaagatagtttgggtgcagggggttttagccttagtgtgtgg

SEQ ID NO: 41897 - DNA, 1045 bp, Homo sapiens
tgcagatcatcagggctgtgcaattgtatggcatttgtggacatgatacaatcatgttcacattgcaatatttagactccatttatttatcaccacatgcaaatattcatgtatctatttttgcattcattctttggaaatgttttgaagtcagatcttcaatcaaatataagctgggtaccactttaaacggtgtgtctttaggcaagccactcatcctttctgaacctcaatttggaagatagaaataaatatgaccactcagggtttgggggagaattaaatgacataatttatgtattgtgtagtactcaatacatgataggcatcattaatatatttataactatgactaaatgctgggttttattttagtcattaactgagaaaataactattaagtgactacttttggccagctctgtgctatggtaggccccttaaagatgagaaaagatggttacgactcttcagaagccccatctaataagatagataggcctgtgtgtggcaaaagcatccaagattatcacaagaattgagtcaaacctgctgaatgagatatggctggggaggggggaaggaagcagaaagctaagcggggaagacagcaattggggtgagttttctggagaggcactttccccctgaggacaagcactgaatttgttctgtggaaaggaaaaacactcagagcatggtccaagtggctgataaaggagaactggctcggtaaaggagtttaaccctcttggagggctttctttcactgtatggtaagaaaaacggcaggcaaggaggaaaagaacatctacagatccaatatgaaagcatacattgaagaatcatgccgggggattaatttggcttcttgcacagagattttgtgacccagagacaaagccttaggtatgatggaggcagaacagtagcatcttgaacagcactgattctaggctggggggcaaaggtataggacttcttcaggcyatggcagtgatgctaagatagtttgggtgcagggggttttagccttagtgtgtgg

SEQ ID NO: 41898 - DNA, 1045 bp, Homo sapiens
tgcagatcatcagggctgtgcaattgtatggcatttgtggacatgatacaatcatgttcacattgcaatatttagactccatttatttatcaccacatgcaaatattcatgtatctatttttgcattcattctttggaaatgttttgaagtcagatcttcaatcaaatataagctgggtaccactttaaacggtgtgtctttaggcaagccactcatcctttctgaacctcaatttggaagatagaaataaatatgaccactcagggtttgggggagaattaaatgacataatttatgtattgtgtagtactcaatacatgataggcatcattaatatatttataactatgactaaatgctgggttttattttagtcattaactgagaaaataactattaagtgactacttttggccagctctgtgctatggtaggccccttaaagatgagaaaagatggttacgactcttcagaagccccatctaataagatagataggcctgtgtgtggcaaaagcatccaagattatcacaagaattgagtcaaacctgctgaatgagatatggctggggaggggggaaggaagcagaaagctaagcggggaagacagcaattggggtgagttttctggagaggcactttccccctgaggacaagcactgaatttgttctgtggaaaggaaaaacactcagagcatggtccaagtggctgataaaggagaactggctcggtaaaggagtttaaccctcttggagggctttctttcactgtatggtaagaaaaacggcaggcaaggaggaaaagaacatctacagatccaatatgaaagcatacattgaagaatcatgccgggggattaatttggcttcttgcacagagattttgtgacccagagacaaagccttaggtatgatggaggcagaacagtagcatcttgaacagcactgattctaggctggggggcaaaggtataggacttcttcaggctatggcagtgatgctaagatagtttgggtgcagggggttttrgccttagtgtgtgg

SEQ ID NO: 41899 - DNA, 646 bp, Homo sapiens
gctcgctccgcagggccgcggctcctctccgtgcaggtgctgggcccgcgggggcggggcgtccacacggtccgcgcccagacccaagcggggaaaaagcgaagagcggacagcggggcaggtgccacagggagcctccgccccaccgcgcgagcagcaagtctgcggcgcttgacacctgcactgcgaatgccaggccgcagcccgggctcccaagacgcgaatacgcgcgcctgctcgtgacgtcattttttgcggtcttcccgagagccagcagmgggcgccgccatgatgttttacggaagccgatagtccttgctcagcggcaccccgtccttccggctctcggctttgccacaaagcttcccgaagacgcggccgctacccggagacgcggtcgccacccagaagcgctctccggggaagccccgctcgtgggaccgcgccacctgcgccgcctctgcggcccgcagcccgacgggcgccgccatgttggggtcctagcgagggacgcgtaggtgtcttcataagatgccggggcagcggcgcgcgctttcccccaagatggcgtccatgcgggagagcgacacgggcctgtggctgcacaacaagctgggggccacggacgagctgtgggcgccgccca

SEQ ID NO: 41900 - DNA, 907 bp, Homo sapiens
tggaatgagctcatgacttggcaatagaaaactgatatttgcgagacgtccagcgtgctaatggaataattattggcatttctctctctctctctctctctctctctctttctctytctctctttctctctcacacacatacacacacacacagacacacacacctgactttgataacagagaaatagtaaaccactctgtagtgcagttgtacttgttggattttctagttttatgtttttaaaaaggtatcatttattttaaaaatgtggaaaatatttttacttttcttgaattaatttgaatgcaaataagtttgcttgtccctggtgcattactgctccagccaaggcacagtttccagggttgcagtgatgggaatggagctctggagacctggagcctggggcagtaagtccacgagccccagttcagcccaagtccaatgatgttgccatacatattgaaataatatgccgggaatcgctctggatggaattactgattcaggggagtaacgtttgtaggagagctcctttcccttgcagtttctgatagagaagtctcagttatttgaggctatggaatagaagtgaggatttttatagctcagggaacaaattttatcatccattccacatcttgcctctgcctcgtggaacttaaccttccccaagtagcaaaaactatgccttgtgtttaaaatgttcacatgattgtactaccagcatatctcattgaatcattaatattttccattgaggtagatactattcttacccttattttgcagatatggggactgaggttcagagaataacttgcacaaggtcatcccacttaaaagtggtggaaaggacttctcccaaatacaggttttctgttgccaaaccatgagctctttcca

SEQ ID NO: 41901 - DNA, 944 bp, Homo sapiens
cagaagagcgtccagcggaggggctgctgatggctttcttgcagtggcttagcccagccctgagcctgggggcctgcacacagcaatactctgtgaatgttcgtcggtaggactgggtctgggcctgaggcacaagggtcaggagctggagtgtggcagggaggcctctcgctccatccaaargccctgctaaaagtaccgaccagtgcgtactgcctgatgttccacaggtccccactgtcctgagaagctctggggcattgccgcagccttgtcagcgagctgtacatcttaggacacagggccttgtagacagcggcagctgccatctccagagtccagccaccaggcataatccgagtggggaccctgatagtgccaggtgtgaacccaacagctggctctgtgcatctcattgttctgaaccctttacctgcactaactcatgtcgttcccaccacagatgtgaggcaggagctgtcgtctccattctgcatatgaaaccaggcatgtgggagctgagtccctaacccaaggcctcaggccagtaggtggctgagctgggaacagatgaatgaatgaatgaatgaatgaatgaatgaatgaatgaatgatttgtccatattgctcatcctgggcagagagatgcccagatatagatatgatccccactagccttgatcctagagatcatgggggaaagactgatcatgtggcctgggtaaatgaccccatgactcagtttctctctctgcccaactgcagtgagctgagctgtttcccaggctcagtcactgtgaagtgcagtgaacaggagctggcaagagggtttcccagcatccctctgcagtgttcccctttggccttccctctgcttgggacccttgagctcagcccaggcccagatagcaggggaggggggctctgagtgcactccaggtgag

SEQ ID NO: 41902 - DNA, 944 bp, Homo sapiens
cagaagagcgtccagcggaggggctgctgatggctttcttgcagtggcttagcccagccctgagcctgggggcctgcacacagcaatactctgtgaatgttcgtcggtaggactgggtctgggcctgaggcacaagggtcaggagctggagtgtggcagggaggcctctcgctccatccaaaagccctgctaaaagtaccgaccagtgcgtactgcctgatgttccacaggtccccactgtcctgagaagctctggggcattgccgcagccttgtcagcgagctgtacatcttaggacacagggccttgtagacagcggcagctgccatctccagagtccagccaccaggcataatccgagtggggaccctgatagtgccaggtgtgaacccaacagctggctctgtgcayctcattgttctgaaccctttacctgcactaactcatgtcgttcccaccacagatgtgaggcaggagctgtcgtctccattctgcatatgaaaccaggcatgtgggagctgagtccctaacccaaggcctcaggccagtaggtggctgagctgggaacagatgaatgaatgaatgaatgaatgaatgaatgaatgaatgaatgatttgtccatattgctcatcctgggcagagagatgcccagatatagatatgatccccactagccttgatcctagagatcatgggggaaagactgatcatgtggcctgggtaaatgaccccatgactcagtttctctctctgcccaactgcagtgagctgagctgtttcccaggctcagtcactgtgaagtgcagtgaacaggagctggcaagagggtttcccagcatccctctgcagtgttcccctttggccttccctctgcttgggacccttgagctcagcccaggcccagatagcaggggaggggggctctgagtgcactccaggtgag

SEQ ID NO: 41903 - DNA, 944 bp, Homo sapiens
cagaagagcgtccagcggaggggctgctgatggctttcttgcagtggcttagcccagccctgagcctgggggcctgcacacagcaatactctgtgaatgttcgtcggtaggactgggtctgggcctgaggcacaagggtcaggagctggagtgtggcagggaggcctctcgctccatccaaaagccctgctaaaagtaccgaccagtgcgtactgcctgatgttccacaggtccccactgtcctgagaagctctggggcattgccgcagccttgtcagcgagctgtacatcttaggacacagggccttgtagacagcggcagctgccatctccagagtccagccaccaggcataatccgagtggggaccctgatagtgccaggtgtgaacccaacagctggctctgtgcatctcattgttctgaaccctttacctgcactaactcatgtcgttcccaccacagatgtgaggcaggagctgtcgtctccattctgcatatgaaaccaggcatgtgggagctgagtccctaacccaaggcctcaggccagtaggtggctgagctgggaacagatgaatgaatgaatgaatgaatgaatgaatgaatgaatgaatgatttgtccatattgctcawcctgggcagagagatgcccagatatagatatgatccccactagccttgatcctagagatcatgggggaaagactgatcatgtggcctgggtaaatgaccccatgactcagtttctctctctgcccaactgcagtgagctgagctgtttcccaggctcagtcactgtgaagtgcagtgaacaggagctggcaagagggtttcccagcatccctctgcagtgttcccctttggccttccctctgcttgggacccttgagctcagcccaggcccagatagcaggggaggggggctctgagtgcactccaggtgag

SEQ ID NO: 41904 - DNA, 944 bp, Homo sapiens
cagaagagcgtccagcggaggggctgctgatggctttcttgcagtggcttagcccagccctgagcctgggggcctgcacacagcaatactctgtgaatgttcgtcggtaggactgggtctgggcctgaggcacaagggtcaggagctggagtgtggcagggaggcctctcgctccatccaaaagccctgctaaaagtaccgaccagtgcgtactgcctgatgttccacaggtccccactgtcctgagaagctctggggcattgccgcagccttgtcagcgagctgtacatcttaggacacagggccttgtagacagcggcagctgccatctccagagtccagccaccaggcataatccgagtggggaccctgatagtgccaggtgtgaacccaacagctggctctgtgcatctcattgttctgaaccctttacctgcactaactcatgtcgttcccaccacagatgtgaggcaggagctgtcgtctccattctgcatatgaaaccaggcatgtgggagctgagtccctaacccaaggcctcaggccagtaggtggctgagctgggaacagatgaatgaatgaatgaatgaatgaatgaatgaatgaatgaatgatttgtccatattgctcatcctgggcagagagatgcccagatatagatatgatccccactagcctwgatcctagagatcatgggggaaagactgatcatgtggcctgggtaaatgaccccatgactcagtttctctctctgcccaactgcagtgagctgagctgtttcccaggctcagtcactgtgaagtgcagtgaacaggagctggcaagagggtttcccagcatccctctgcagtgttcccctttggccttccctctgcttgggacccttgagctcagcccaggcccagatagcaggggaggggggctctgagtgcactccaggtgag

SEQ ID NO: 41905 - DNA, 944 bp, Homo sapiens
cagaagagcgtccagcggaggggctgctgatggctttcttgcagtggcttagcccagccctgagcctgggggcctgcacacagcaatactctgtgaatgttcgtcggtaggactgggtctgggcctgaggcacaagggtcaggagctggagtgtggcagggaggcctctcgctccatccaaaagccctgctaaaagtaccgaccagtgcgtactgcctgatgttccacaggtccccactgtcctgagaagctctggggcattgccgcagccttgtcagcgagctgtacatcttaggacacagggccttgtagacagcggcagctgccatctccagagtccagccaccaggcataatccgagtggggaccctgatagtgccaggtgtgaacccaacagctggctctgtgcatctcattgttctgaaccctttacctgcactaactcatgtcgttcccaccacagatgtgaggcaggagctgtcgtctccattctgcatatgaaaccaggcatgtgggagctgagtccctaacccaaggcctcaggccagtaggtggctgagctgggaacagatgaatgaatgaatgaatgaatgaatgaatgaatgaatgaatgatttgtccatattgctcatcctgggcagagagatgcccagatatagatatgatccccactagccttgatcctagagatcatgggggaaagactgatcatgtggcctgggtaaatgaccccatgactcagtttcyctctctgcccaactgcagtgagctgagctgtttcccaggctcagtcactgtgaagtgcagtgaacaggagctggcaagagggtttcccagcatccctctgcagtgttcccctttggccttccctctgcttgggacccttgagctcagcccaggcccagatagcaggggaggggggctctgagtgcactccaggtgag

SEQ ID NO: 41906 - DNA, 1096 bp, Homo sapiens
agagggctcccgcagcgattgggtccaccttggggtggaggtgatagtgggatggacggcctcacttcacgaagtggcttctacttgtaggcatacacgctgtcaactaaacccctgaaacatatacagacgcagtcctcttgtacagatacaggaaataggcccagaggcattgggccatgctggtgagtggggagctgggaggacagggacagccctgctrcaggaatccaggggctctgaggacaagtagtagccaggatgcaggaagccaatctgggctggagcagatggaagccagcagtggagaaaggagctttttggaaaggaacattctggaactatactgttggtgactcctggaaatggagctgtggagtcaggtggggcaggagcccagttgtccttggtacagcctctgggtgggggtgctgtcgagcaggggtttgggaagggccttgccaggccgcccgagtgtggggctcccccttccatgtcccacacccagcatgggcacagcccaccatcatcagcctatcaagtatcctcttgtgtgggctcccagggggcagagggcatggcttcaaatagctcctccctcaccttaagagccatggtccagggcccatagcaagtggagtcttggggtctcgccagggccaggccccagtgctcccaacttgaggcaggttggggagaggggctggtcctagagtaggcagaggaagcctgaatgggggtggtggcgcaggaagaggggctcacgggaactgagctgagtagcttcccagaggcaaccctgcaggcccaggccatgggggcccctgagtgggcagtgagtctagcctggggcacaaggtaggggcaccagcagggccactcctactccttcctttggaggtttatcttgattgccaggagtggactgggtgggactgggacttccccttggtaaaggaacatctccagggcctcctctccccacaggaacggcttccatctcccctgggcctccaggtcttctgcacacagctggcacctaagtggtctgcttgggccaaaacagcctgtctgtctgtccttaggaagaaaaagt

SEQ ID NO: 41907 - DNA, 589 bp, Homo sapiens
aaaaaatgatcatccttgttttaagatgagaaaacagacatagagaggttaactgatttgtccagattgcacacctagtaaataacagaatgaaaacttgaacccaaatcctttgactaaatgctatgctctttcctattgtgagtcatggcatcctggcaaccttgggtgtgtaggtatgggctctttactttttctgtgtcattcttaaaatgtagcacccaggagagtatggggaaggggagcagggagaaaaaagaaatagstatgcattcacatagaaattcaaatactggctaattgcaatatgtgaatcacaacagtaatgttaagatctcctcatttcccccctcattcttacaactcctcccctttccccattttatttcttctcttcacattccaccttccccctcctccctccaagtatctaattatagttttgcaagaaaaattacagactacatactgcaataattcacacctggaatttacattgattttatggcatcaagctctgagtgccactttgcgttgcattcccatagcaacaccaaatcgtagactaggagaaagaaaaatctgagaa

SEQ ID NO: 41908 - DNA, 532 bp, Homo sapiens
taaatataatattgcatgttgaaaatttgctaagagatarattttaggtgctcttaccacaaaaataaacatatgaggagattgatatgctaatttgtttggactgtggtaatcagtttgctatgtatatgtataaacaaaaaacatcttgttgtataaccttaaatataaacaattaaaaaagtatgtgtgtgtgtgtttgtatgtatacacatacatatttctattgtggataatatccaagccatgataaacttcaaaattacctagacaattgcaatattgattgcattaattgacttatgattaatgtacttgggcattacttgtttaaccatctaatgccaacatcagccagttggttaatttataacatactctttctaatgttagcaatacattttttcttctattttatttttgtttaaaaaggttcaaaaaggtctggatgacctttttgagatagtgttaaaatcagtcaactaattaatacttgctgagttaagttgattgctacaacccatatatttaa

SEQ ID NO: 41909 - DNA, 558 bp, Homo sapiens
ctcccgggttcacaccattctcctgcctcagcctcctgagcctcctgagcctcctgagcctcctgagtaggtgggactacaggcgcccgccaccacgcccggctaatttttttttgtatttttagtagagaccgggtttcaccatgttagccaggatggtctcaatctcctgacctcgtgatccacccgcctcggcctcccaaagtgctgggattccaggcgtaagccaccgtgcccggcctgtgtgaagacatttctaggtctgcagtgatgactaagatgcattctacctcaccagcaccaccagatttcctgaaggcatcagtgtaccccaggaatgcccaatggccattctggtcattggtgagagggggaaggttttctttagattccggaatactttgagaggctaattcacatcaacccatcyaccactgcagcacagtatgacactcgaggtttcatcagaaagggttacattatgcctggccagcaaattcactgaaatctaaaacgacaacaacaaccatttattgtattgactgcatgttccaggca

SEQ ID NO: 41910 - DNA, 1160 bp, Homo sapiens
acatggccaagggtcctcaagagaaatagtcattctcttgtcttcagccacccgcctgagctagtggtggtcagacaagggcctggcccagcctgccaggccttgggaaaggttgacttgtggatttggggctaagcttctctggcccctgaaactgctccgtggagcaggcccttctcctgggacctcctccaagatgcagggacctcaggaggggtcagaagcgctgtgatcattcctgactagcacctactagtcaaaataagggtctagggggctggtgtgcaacactcctgaggcccacagagcctgatgggtcagccccaccacctgtacccagccaccgaattctccctagtggctgaagttcagaggaagggattgactgcaggcatgtgtcrggcctggaagctcaacaccttgggtgtcctgactggtgtcaccccacctcctgtggggacaccttggctgagctgccccaggcccagctctcactgcaagagcctgtcccaccctacggccttgcttttgatgccaggtgcctcccctgggagtgccatgcagcctccctggctttcacttgctcactcagtcattcagcaaacctctgctgccccagcctggccctaggccttgtgtgattccagtctctacttgctgtggggcagaatgcccgttttacagatgagaaaacagagtcggagactagatgtcaaccctggtcactgcctgggtgaggcaacgtcacagttccccttgcttaccctggctcctgagcctgtgtacctgccctcccagagctcccagggattgggaggaagtagagtggtgctgactggggcaaaggggaaggccaggggaggaagggaaggtgagaaagccgggtggagggcagagcatgagcaagggcctagaggcaggacctcgactgggggttgctggggagcagctggagaggatggccagtcccactcagagaaggctccaagtgcaggctgggagctgttgccccgagtttcctttttaatacccttgcacctcaccaccagaggagaggaatccaggacagggagatgagagtccgttgaatggagaaaatgaaccccagggagggagatgtatgtgtctccactccccagagaaggcctgcgtagagggag

SEQ ID NO: 41911 - DNA, 345 bp, Homo sapiens
catccrtccatccatccatccatccatccatccatctctctgcctgtcctccaatcactcacccaggcttctatcatccctctctccttctcttcattctttttcacactaagttaatctgttcttctacctgggtaggcgctgggtttgggaggggttggggagaagcatgtgtccctggctttctcctctacaaaccagaagtttattttgaagataaatgtgatttaatgccagtgcatcagatagagcctggtgcatggatgccactcagcccagttacaggaggccaggggttcagggatctgaaagcctgcattcctcacctcatgtaactctgaaaag

SEQ ID NO: 41912 - DNA, 345 bp, Homo sapiens
catccayccatccatccatccatccatccatccatctctctgcctgtcctccaatcactcacccaggcttctatcatccctctctccttctcttcattctttttcacactaagttaatctgttcttctacctgggtaggcgctgggtttgggaggggttggggagaagcatgtgtccctggctttctcctctacaaaccagaagtttattttgaagataaatgtgatttaatgccagtgcatcagatagagcctggtgcatggatgccactcagcccagttacaggaggccaggggttcagggatctgaaagcctgcattcctcacctcatgtaactctgaaaag

SEQ ID NO: 41913 - DNA, 345 bp, Homo sapiens
catccatccayccatccatccatccatccatccatctctctgcctgtcctccaatcactcacccaggcttctatcatccctctctccttctcttcattctttttcacactaagttaatctgttcttctacctgggtaggcgctgggtttgggaggggttggggagaagcatgtgtccctggctttctcctctacaaaccagaagtttattttgaagataaatgtgatttaatgccagtgcatcagatagagcctggtgcatggatgccactcagcccagttacaggaggccaggggttcagggatctgaaagcctgcattcctcacctcatgtaactctgaaaag

SEQ ID NO: 41914 - DNA, 1214 bp, Homo sapiens
aactcaagaatggccagacggaattgatgcacagggcaagatatgggggaagagacatggagttcccatgccctctctgggcacaccaccctccaggtacctccatgtgttcaccaacccagaagctctctgaaccctgtccttttgggtttctatggaggcttccttacacaggcatgatggattaaagaaactatgggccatttgtggttaactcaatctccmgtctctctcctctcctggaactcaaggggtagggctgaatattccaaccctcaaatcacatggttgtttccccagacaagcagccccccatccttggaggctttctaaagtcacctcattaacataaactcgggtgtggctaaaaggggtcggttatggttaagaaaagatgctcttttcacctttactgctctcatcgctcaggaaattccaagggttttaagagccctgtgccagaaatggggataagaactctctctctctctctctctatatatatatatatgtatatatacacacacacacatacacacacatatatatacacacgtatatgtaattatatatctatatataattataaatcacaatatcacaacatattatgttcttgggaatacaatttgtacaaaggggccttgtaaattactgctttgtttggtgaaaatgatcctttaatcattacagtctatgtggtcataattgtgagagaacagaataagctacccccagatatgcctctttggcatagggattattgaggcgaaggcaattaagaagcagcagatgcaggaaggttctctgtcctctctctatttgcctaaaagcaagatctaaatttacaaaggtctttctatcaaggagaataaaggttaaccactgagaactttagacccttataggcctggagatggtaccagaggaagctgcgtaacaaaacttactgactagtttctttctatccttcatttcctatttatttgtctacccacaatttggtggccctcaagatgcaaagtcttttttcttcatcttgtcccttctctaaaattgtatagttctttgttgaaggtggctatataagcagggagttccaagccactcctttgagaattatttattccctggtgtctcctacatacacttaagaggtacatattaatccactcctgtttgtttttctcttatgaatctgtcttgggttacaa

SEQ ID NO: 41915 - DNA, 1214 bp, Homo sapiens
aactcaagaatggccagacggaattgatgcacagggcaagatatgggggaagagacatggagttcccatgccctctctgggcacaccaccctccaggtacctccatgtgttcaccaacccagaagctctctgaaccctgtccttttgggtttctatggaggcttccttacacaggcatgatggattaaagaaactatgggccatttgtggttaactcaatctcccgtctctctcctctcctggaactcaaggggtagggctgaatattccaaccctcaaatcacatggttgtttccccagacaagcagycccccatccttggaggctttctaaagtcacctcattaacataaactcgggtgtggctaaaaggggtcggttatggttaagaaaagatgctcttttcacctttactgctctcatcgctcaggaaattccaagggttttaagagccctgtgccagaaatggggataagaactctctctctctctctctctatatatatatatatgtatatatacacacacacacatacacacacatatatatacacacgtatatgtaattatatatctatatataattataaatcacaatatcacaacatattatgttcttgggaatacaatttgtacaaaggggccttgtaaattactgctttgtttggtgaaaatgatcctttaatcattacagtctatgtggtcataattgtgagagaacagaataagctacccccagatatgcctctttggcatagggattattgaggcgaaggcaattaagaagcagcagatgcaggaaggttctctgtcctctctctatttgcctaaaagcaagatctaaatttacaaaggtctttctatcaaggagaataaaggttaaccactgagaactttagacccttataggcctggagatggtaccagaggaagctgcgtaacaaaacttactgactagtttctttctatccttcatttcctatttatttgtctacccacaatttggtggccctcaagatgcaaagtcttttttcttcatcttgtcccttctctaaaattgtatagttctttgttgaaggtggctatataagcagggagttccaagccactcctttgagaattatttattccctggtgtctcctacatacacttaagaggtacatattaatccactcctgtttgtttttctcttatgaatctgtcttgggttacaa

SEQ ID NO: 41916 - DNA, 1214 bp, Homo sapiens
aactcaagaatggccagacggaattgatgcacagggcaagatatgggggaagagacatggagttcccatgccctctctgggcacaccaccctccaggtacctccatgtgttcaccaacccagaagctctctgaaccctgtccttttgggtttctatggaggcttccttacacaggcatgatggattaaagaaactatgggccatttgtggttaactcaatctcccgtctctctcctctcctggaactcaaggggtagggctgaatattccaaccctcaaatcacatggttgtttccccagacaagcagccccccatccttggaggctttctaaagtcacctcattaacataaactcgggtgtggctaaaaggggtcggttatggttaagaaaagatgctcttttcacctttactgctctcatcgctcaggaaattccaagggttttaagagccctgtgccagaaatggggataagaactctctctctctctctctctatatatatatatatgtatatatacacacacacacatacacacacatatatatacacacgtatatgtaattatatatctatatataattataaatcacaatatcacaacatattatgttcttgggaatacaatttgtacaaaggggccttgtaaattactgctttgtttggtgaaaatgatcctttaatcattacagtctatgtggtcataattgtgagagaacagaataagctacccccagatatgcctctttggcatagggattattgaggcgaaggcaattaagaagcagcagatgcaggaaggttctctgtcctctctctatttgcctaaaagcaagatctaaatttacaaaggtctttctatcaaggagaataaaggttaaccactgagaactttagacccttataggcctggagatggtaccagaggaagctgcgtaacaaaacttactgactagtttctttctatccttcatttcctatttatttgtctacccacaatttggtggccctcaagatgcaaagtcttttttcttcatcttgtcccttctctaaaattgtatagttctttgttgaaggtggctatataagcagggagttcyaagccactcctttgagaattatttattccctggtgtctcctacatacacttaagaggtacatattaatccactcctgtttgtttttctcttatgaatctgtcttgggttacaa

SEQ ID NO: 41917 - DNA, 538 bp, Homo sapiens
gtccccgctgcgcgatcgtttgctgcagtccccggttcagaccgcacaaagcccctccctggcggagcakgcttgtccctcaccgtgtcgatgagtcgtgactcatgctacctttgctctgaatttagaggcagggaaaggcgagggaggaggaacacctcgagcaaaatgccatttcgtgttggcagccaggcaaggcagcctctgtctgcccaaccgatagacagcggtggagttctgggtacaagctaaggataaagttaacatgggcaggggggaaaaatgccctcttccagaacagacagctgggtcccagcaattcatgctccctggcttcctccactgcatgccatttgcacgtcctggctggagacacgcttactccagcctctcctggggtcaaagagggggtcatctgcctggcgcgctgcctgacacagagcaacatcaggggctaatcaggggccggcaggtcattggcctaaaattctcctgagcagcagggttcctgagtgtctcaccctgtgcacctggagcc

SEQ ID NO: 41918 - DNA, 538 bp, Homo sapiens
gtccccgctgcgcgatcgtttgctgcagtccccggttcagaccgcacaaagcccctccctggcggagcatgcttgtccctcaccgtgtcgatgagtcgtgactcatgctacctttgctctgaatttagaggcagggaaaggcgagggaggaggaacacctcgagcaaaatgccatttcgtgttggcagccaggcaaggcagcctctgtctgcccaaccgatagacagcggtggagttctgggtacaagctaaggataaagttaacatgggcaggggggaaaaatgccctcttccagaacagacagctgggtcccagcaattcatgcyccctggcttcctccactgcatgccatttgcacgtcctggctggagacacgcttactccagcctctcctggggtcaaagagggggtcatctgcctggcgcgctgcctgacacagagcaacatcaggggctaatcaggggccggcaggtcattggcctaaaattctcctgagcagcagggttcctgagtgtctcaccctgtgcacctggagcc

SEQ ID NO: 41919 - DNA, 1045 bp, Homo sapiens
ccactggccccagttcatttatcttgctttctcaactcttctcagtcggacaccctgcattcattgctggaggacacagcgatcctgaacttggagtctggttttagaggcagggagaggctcacgtagacctaagccaggtagttcagtccattctgccagagagctctgctctggagagtcagccccaagccagaagggtaaaacgaggcattgtccttttctgctactactgtttgccattgtccctcatgctaatatctccctcgagggccacatagtgagaaggcatggctgggccaaaaacaaatctaggcacttctggaattctcraccacacaaccagataacagtgcctggactgaccacaaaactggacccattaagagttgcagggcccagagggataacgcagatttttatttatttttatttttttgagacagaatcttgctctgtcatccaggctggaatgcagtggcatggtctcagctcactgcaacctccgccgcccaggttcaagcgattctcctgccttagccttccaagtagctgggattacaggtgcgcaccaccacgcctggctaatttttgtgtttttagtagagacggggtttcaccatgttggccaagctggtcttaaactcctgacctcaagtgatccacctgccttgacctcccaaagtgctgggattacaggcttgagccaccgcgcccggccaacacagatgttgtattctgacttgagtatgtatctggatctgaggttcatgaaatacagtcaccacagctaaggaacccaggatgagaggtctctaattgtaggaggagtgtgagcagaatctcatgggagatagggcaagaaagggactttagttcctcaccttcactttcggacccaggatcagccacatccagtgcctcaagtcacttcataatctctagcatctcccgttgtaggtggggacagtgagctggggtcaagagaatttactgaacaggagaggattacctgggtggattttggttggtgctgcagtcatgg

SEQ ID NO: 41920 - DNA, 1045 bp, Homo sapiens
ccactggccccagttcatttatcttgctttctcaactcttctcagtcggacaccctgcattcattgctggaggacacagcgatcctgaacttggagtctggttttagaggcagggagaggctcacgtagacctaagccaggtagttcagtccattctgccagagagctctgctctggagagtcagccccaagccagaagggtaaaacgaggcattgtccttttctgctactactgtttgccattgtccctcatgctaatatctccctcgagggccacatagtgagaaggcatggctgggccaaaaacaaatctaggcacttctggaattctcaaccacacaaccagataacagtgcctggactgaccacaaaactggacccattaagagttgcagggcccagagggataacgcagatttttatttatttttatttttttgagacagaatcttgctctgtcayccaggctggaatgcagtggcatggtctcagctcactgcaacctccgccgcccaggttcaagcgattctcctgccttagccttccaagtagctgggattacaggtgcgcaccaccacgcctggctaatttttgtgtttttagtagagacggggtttcaccatgttggccaagctggtcttaaactcctgacctcaagtgatccacctgccttgacctcccaaagtgctgggattacaggcttgagccaccgcgcccggccaacacagatgttgtattctgacttgagtatgtatctggatctgaggttcatgaaatacagtcaccacagctaaggaacccaggatgagaggtctctaattgtaggaggagtgtgagcagaatctcatgggagatagggcaagaaagggactttagttcctcaccttcactttcggacccaggatcagccacatccagtgcctcaagtcacttcataatctctagcatctcccgttgtaggtggggacagtgagctggggtcaagagaatttactgaacaggagaggattacctgggtggattttggttggtgctgcagtcatgg

SEQ ID NO: 41921 - DNA, 1045 bp, Homo sapiens
ccactggccccagttcatttatcttgctttctcaactcttctcagtcggacaccctgcattcattgctggaggacacagcgatcctgaacttggagtctggttttagaggcagggagaggctcacgtagacctaagccaggtagttcagtccattctgccagagagctctgctctggagagtcagccccaagccagaagggtaaaacgaggcattgtccttttctgctactactgtttgccattgtccctcatgctaatatctccctcgagggccacatagtgagaaggcatggctgggccaaaaacaaatctaggcacttctggaattctcaaccacacaaccagataacagtgcctggactgaccacaaaactggacccattaagagttgcagggcccagagggataacgcagatttttatttatttttatttttttgagacagaatcttgctctgtcatccaggctggaatgcagtggcatggtctcagctcactgcaacctccgccgcccaggttcaagcgattctcctgccttagccttccaagtagctgggattacaggtgcgcaccaccacgcctggctaatttttgtgtttttagtagagacggggtttcaccatgttggccaagctggtcttaaactcctgacctcaagtgatccayctgccttgacctcccaaagtgctgggattacaggcttgagccaccgcgcccggccaacacagatgttgtattctgacttgagtatgtatctggatctgaggttcatgaaatacagtcaccacagctaaggaacccaggatgagaggtctctaattgtaggaggagtgtgagcagaatctcatgggagatagggcaagaaagggactttagttcctcaccttcactttcggacccaggatcagccacatccagtgcctcaagtcacttcataatctctagcatctcccgttgtaggtggggacagtgagctggggtcaagagaatttactgaacaggagaggattacctgggtggattttggttggtgctgcagtcatgg

SEQ ID NO: 41922 - DNA, 267 bp, Homo sapiens
ctgggcgacagagcaagaccctgtctaaaaaaaaaaaaaaaagaagtggcaatctttgaggactcgtctcactgcaaccccaaccagtctggggtagagcaacagacarggcaggtttcacttagtggctgttggatcaagacctaaaaccatggctaatgtggtcgtttctataatgaaaacaaacacagtagcttgttttctttttttatggaagtcatgcccctaaaaataacaacaaaccccacagagacagcatgtgaaaaa

SEQ ID NO: 41923 - DNA, 516 bp, Homo sapiens
atggacccttcctctaccccagcagctgtgatgtttgcagaccctatgacagggatggagagctttaccctggaaaaggacttggtagaaggaatgcattcagctctgcatggccctagtctgtcttcttatctctgactacctccattgtgaactgcgtctctggcaaggcaagttctgctcattccatccttgtaagacaaatctgagttatgtcaaggttgcttgttttccacgaaacgaaatgtcatttttctacttagtacccagcctttcctcctttgattccacagccagagatggcttttgtcaaactgtctaactgcaatggctaactcccctacaagtggatgggactgtagcatatcttcttgtctcatctctttattgtacctgaggcccaggaaagggaactgtttacttgtrggttgaccatacagttgttttttgtaaagccatgatttttttccttgttcttaaaaaagtcctgtaaaaaattaatgtcatagaacttca

SEQ ID NO: 41924 - DNA, 748 bp, Homo sapiens
aaggcagagctgcaggctcaagccctcttgcccccaaagtgaaacttggagctgtggaccctgggagtgcatggggggaaggccttggtgcagacagaggcgagaggcagggagcagggctgggactgcggctgcagggtggaaacaggtagagacgctaaagtccaggttccaaagaaccagaaagaagcccaggatatgagcaagggtggaacagtggggctagctccctgggtcaggcctgaacacatccaagaacaggtagccggggccccaaggcaagggtgggccagccaggtggaagggcctctctagcgtcagcattctaaatttctaagcatggtctctaccattggcaagtgaatccaattacatgacaaatattaacacgctccaggtgccagccagctccggggggccctggaaccctcggtgggtccctgggcttccctgaacctgagctctcaccaatctgatgggcgtagatcagcacggagctatgtctgctgattcacctgcgggcacctgcaattcactcgagctgygcctggcagggaaagagcactctgtgaacagccctcaggctctctgcctccaccttgcccagctctagggctgtggagtcaggtgggcattctcctccagccaggttccctccctgaatgacgtcagcaagccccagcacgctcctcttccaattcccactgagccgcacccctccccatgtctccagctggcatctcccatg

SEQ ID NO: 41925 - DNA, 1227 bp, Homo sapiens
tgcatttgaaaaatgattaaatggataaacagacaaaatgcaaaaacaggctgaaaaataagtagggaatttaaatagaccaatacttattaaagaaattaaaattatagccaaagactcccgtgtccaacaaaacctggaaaaggttgtcatgaaaagggaatctatcacactttggaggagcagataatccctgaagcaagctgttccggactgtgtttgcagacacatgcagcgtcctgtgttttctcagctgctgcctcagaaactaagacttcaaaagcacaaagcatttgtattaattttctgtagctgctgtaaccaatgaccacaaacttggtggccggacacaacactaatttattcatttacaggtccagacatcagaattccagcacgagtctccgcaggcagggcctcctggaggctctaggggagaaacaacactcatttattcatttacaggtccagagatcagaagtccagcatgagtcttggcaggcagggcctcctggaggctccgggggagaatccctttccttgactgtttcagcttctagaaccaccagattctgcagctcagggcctcctctgtcttcacagctagcaacggagggtggagtccttctcccatcgtatcgctccgcttccctcttccacctttaagcggaagacaggacccacctggataatccaaggtcgcttcccttactccaagttccacctgcaaccctagcgcccccgtaacaggtaccagccaggtaacaggttcacaggtttcagggatcaggacacaggtgtctttaggagggctttagtcttcctactatgatatgatatgattatttttatttttatttttattttttttgagatggagtctcrctcagtcacccaggctggagtgcagtggcacgatgtcggctcactgcaagctccatctcccaggttcacgccgttctcctgcttcagcctcctgagtagctgggactacaggctcccgcccccacgcccgggtaatttttttatatttttagtagagatggggtttcaccgtgttagcccggatggtctcgatctcctgaccttgtgatccacctgcctcggcctcccaaagtgctgggattacaggtgtgaaccgctgtgcctggccctgatatgatttatgatgtgatatgatatataatgtgacatgtgatatgtgctgtgacatgatatttaaatgca

SEQ ID NO: 41926 - DNA, 1227 bp, Homo sapiens
tgcatttgaaaaatgattaaatggataaacagacaaaatgcaaaaacaggctgaaaaataagtagggaatttaaatagaccaatacttattaaagaaattaaaattatagccaaagactcccgtgtccaacaaaacctggaaaaggttgtcatgaaaagggaatctatcacactttggaggagcagataatccctgaagcaagctgttccggactgtgtttgcagacacatgcagcgtcctgtgttttctcagctgctgcctcagaaactaagacttcaaaagcacaaagcatttgtattaattttctgtagctgctgtaaccaatgaccacaaacttggtggccggacacaacactaatttattcatttacaggtccagacatcagaattccagcacgagtctccgcaggcagggcctcctggaggctctaggggagaaacaacactcatttattcatttacaggtccagagatcagaagtccagcatgagtcttggcaggcagggcctcctggaggctccgggggagaatccctttccttgactgtttcagcttctagaaccaccagattctgcagctcagggcctcctctgtcttcacagctagcaacggagggtggagtccttctcccatcgtatcgctccgcttccctcttccacctttaagcggaagacaggacccacctggataatccaaggtcgcttcccttactccaagttccacctgcaaccctagcgcccccgtaacaggtaccagccaggtaacaggttcacaggtttcagggatcaggacacaggtgtctttaggagggctttagtcttcctactatgatatgatatgattatttttatttttatttttattttttttgagatggagtctcactcagtcacccaggctggagtgcagtggcacgatgtcggctcactgcaagctccatctcccaggttcacgccgttctcctgcttcagcctcctgagtagctgggactacaggctcccgcccccacgcccggstaatttttttatatttttagtagagatggggtttcaccgtgttagcccggatggtctcgatctcctgaccttgtgatccacctgcctcggcctcccaaagtgctgggattacaggtgtgaaccgctgtgcctggccctgatatgatttatgatgtgatatgatatataatgtgacatgtgatatgtgctgtgacatgatatttaaatgca

SEQ ID NO: 41927 - DNA, 1227 bp, Homo sapiens
tgcatttgaaaaatgattaaatggataaacagacaaaatgcaaaaacaggctgaaaaataagtagggaatttaaatagaccaatacttattaaagaaattaaaattatagccaaagactcccgtgtccaacaaaacctggaaaaggttgtcatgaaaagggaatctatcacactttggaggagcagataatccctgaagcaagctgttccggactgtgtttgcagacacatgcagcgtcctgtgttttctcagctgctgcctcagaaactaagacttcaaaagcacaaagcatttgtattaattttctgtagctgctgtaaccaatgaccacaaacttggtggccggacacaacactaatttattcatttacaggtccagacatcagaattccagcacgagtctccgcaggcagggcctcctggaggctctaggggagaaacaacactcatttattcatttacaggtccagagatcagaagtccagcatgagtcttggcaggcagggcctcctggaggctccgggggagaatccctttccttgactgtttcagcttctagaaccaccagattctgcagctcagggcctcctctgtcttcacagctagcaacggagggtggagtccttctcccatcgtatcgctccgcttccctcttccacctttaagcggaagacaggacccacctggataatccaaggtcgcttcccttactccaagttccacctgcaaccctagcgcccccgtaacaggtaccagccaggtaacaggttcacaggtttcagggatcaggacacaggtgtctttaggagggctttagtcttcctactatgatatgatatgattatttttatttttatttttattttttttgagatggagtctcactcagtcacccaggctggagtgcagtggcacgatgtcggctcactgcaagctccatctcccaggttcacgccgttctcctgcttcagcctcctgagtagctgggactacaggctcccgcccccacgcccgggtaatttttttatatttttartagagatggggtttcaccgtgttagcccggatggtctcgatctcctgaccttgtgatccacctgcctcggcctcccaaagtgctgggattacaggtgtgaaccgctgtgcctggccctgatatgatttatgatgtgatatgatatataatgtgacatgtgatatgtgctgtgacatgatatttaaatgca

SEQ ID NO: 41928 - DNA, 1227 bp, Homo sapiens
tgcatttgaaaaatgattaaatggataaacagacaaaatgcaaaaacaggctgaaaaataagtagggaatttaaatagaccaatacttattaaagaaattaaaattatagccaaagactcccgtgtccaacaaaacctggaaaaggttgtcatgaaaagggaatctatcacactttggaggagcagataatccctgaagcaagctgttccggactgtgtttgcagacacatgcagcgtcctgtgttttctcagctgctgcctcagaaactaagacttcaaaagcacaaagcatttgtattaattttctgtagctgctgtaaccaatgaccacaaacttggtggccggacacaacactaatttattcatttacaggtccagacatcagaattccagcacgagtctccgcaggcagggcctcctggaggctctaggggagaaacaacactcatttattcatttacaggtccagagatcagaagtccagcatgagtcttggcaggcagggcctcctggaggctccgggggagaatccctttccttgactgtttcagcttctagaaccaccagattctgcagctcagggcctcctctgtcttcacagctagcaacggagggtggagtccttctcccatcgtatcgctccgcttccctcttccacctttaagcggaagacaggacccacctggataatccaaggtcgcttcccttactccaagttccacctgcaaccctagcgcccccgtaacaggtaccagccaggtaacaggttcacaggtttcagggatcaggacacaggtgtctttaggagggctttagtcttcctactatgatatgatatgattatttttatttttatttttattttttttgagatggagtctcactcagtcacccaggctggagtgcagtggcacgatgtcggctcactgcaagctccatctcccaggttcacgccgttctcctgcttcagcctcctgagtagctgggactacaggctcccgcccccacgcccgggtaatttttttatatttttagtagagatggggtttcaccgtgttagcccggatggtctcgatctcctgaccttgtgatccacctgcctcrgcctcccaaagtgctgggattacaggtgtgaaccgctgtgcctggccctgatatgatttatgatgtgatatgatatataatgtgacatgtgatatgtgctgtgacatgatatttaaatgca

SEQ ID NO: 41929 - DNA, 1227 bp, Homo sapiens
tgcatttgaaaaatgattaaatggataaacagacaaaatgcaaaaacaggctgaaaaataagtagggaatttaaatagaccaatacttattaaagaaattaaaattatagccaaagactcccgtgtccaacaaaacctggaaaaggttgtcatgaaaagggaatctatcacactttggaggagcagataatccctgaagcaagctgttccggactgtgtttgcagacacatgcagcgtcctgtgttttctcagctgctgcctcagaaactaagacttcaaaagcacaaagcatttgtattaattttctgtagctgctgtaaccaatgaccacaaacttggtggccggacacaacactaatttattcatttacaggtccagacatcagaattccagcacgagtctccgcaggcagggcctcctggaggctctaggggagaaacaacactcatttattcatttacaggtccagagatcagaagtccagcatgagtcttggcaggcagggcctcctggaggctccgggggagaatccctttccttgactgtttcagcttctagaaccaccagattctgcagctcagggcctcctctgtcttcacagctagcaacggagggtggagtccttctcccatcgtatcgctccgcttccctcttccacctttaagcggaagacaggacccacctggataatccaaggtcgcttcccttactccaagttccacctgcaaccctagcgcccccgtaacaggtaccagccaggtaacaggttcacaggtttcagggatcaggacacaggtgtctttaggagggctttagtcttcctactatgatatgatatgattatttttatttttatttttattttttttgagatggagtctcactcagtcacccaggctggagtgcagtggcacgatgtcggctcactgcaagctccatctcccaggttcacgccgttctcctgcttcagcctcctgagtagctgggactacaggctcccgcccccacgcccgggtaatttttttatatttttagtagagatggggtttcaccgtgttagcccggatggtctcgatctcctgaccttgtgatccacctgcctcggcctcccaaagtgctgggattacaggtgtgaaccgctgtgcctggccctgatatgatttatgatgtgayatgatatataatgtgacatgtgatatgtgctgtgacatgatatttaaatgca

SEQ ID NO: 41930 - DNA, 538 bp, Homo sapiens
ccttgccactaatcccaaagccccctctatctatgggggtccctcccctcaagcctgattgaatctctcgagttcctcttctgggttcttccaaagaaaaactcacaggcatttgcctttatgattcttagtcatgatggaaacgaatacaaatggaaatattcaaggaataagacattatagaagaatattacaaaaatccccaagtttttcaggtctcaaaatcatggtcttcagttcacaacttgtttgccaaggtagtscttagaatccacagtaaactgttgatctcctctttagttcctaagaacatattcactccccaaatcttttcttttctttttttttcttttctctgcctgtagtcctgtaaaagccagcaaggtggacccacaggtgtgacctagtgtacactgacgtgtttattgatattactgagataactggaatttctgtgaccggactaggggagacaaagatgaatctcacatatttacctatttggcaaatattcactgatcactgctctttgtttatc

SEQ ID NO: 41931 - DNA, 612 bp, Homo sapiens
ttatatgaagtttcaaatctaatataaacaaaatcacttagtaaaatagtactacaaattgattttttaaagcaaggaaaaatcaaactgatattagatctgcatgyctctatattgttaatggtggcatacactgaaagaagaatctaagggatttgattaaaataataatgtccataaaataattctttcaaattcatcatgtgaagagcctctatgttgtggcagggaggacaatggcccccatggggtccaccctctaatcctgagcctctgtgactacgttcttgccccagcaaagaaacatggtagatgtggtggagggcggatctggagatggagcaactctcctggtttatccaagtgggcccactctaatcccatacattcttaaaattggagagcttttcctagctgcagccatcaaaagacatgaggacagaagggcagaagtgtgacgctggtggctttgaaagacagaggaaggggctgtgaaccaacaaatgcaggtggcctctagaagcctctagaaaaagcaaatgaatttgcccccagattccccagaaggaaaaaagccctgctgattccttgattctagcccagtggacccat

SEQ ID NO: 41932 - DNA, 1051 bp, Homo sapiens
ccagggcaacagtcaaggacgggaagggaggacacgtgagcagttgatgtgaaacctggacgtcctacgcactgtgttcactctgaggaaggctctgacatagaaacagaagccctcagaactaccagcaattcacgaggtttactgtccatagtcgtagctaatttcctcattgatctggtgaaacgtatgcttggccctggttttttgttttttttcttttcttttctttttgagatggagtctcactgttgtcagccagggctggagtgcaatggcgcgatctcagctcactgcaacctctgcctcccgggttccagcaattctcctgtctcagcctcctgagtagctgagattacaggtgcccaccactgtgcctggctaatttttgtatttttagtagagatggagttttgccaygttggccaggctgttcttgaactcctgacctcaggtgatccacccacctcggcctcccaaagtgctgggattacaggcgtgagccccagcacccggcctgtgtggccctggcttttcactgagacactattttgtccagcatccctcctgctaagagtttccatcgtgtcccgtggaaggcggtggctgggaagtggctgcctggctattggatctgcagggctgtggccttattttggattgtttcttcgtctttctccctcaaccctccctcaccaaattctctcaaaatattctgctgagtgatgtagttcaaccacagagttcccttcctgttctaatttctggttttaaattagatcgactgtttcaggtttcattttattaacagaatgaggtaaaagagtcaccttgtttaagtctttaatttgtgggaaaatgtgttcacgtctaccccaaaaatctcagatggttgctgcttttctatttgtgtaactgaatcatggcttaattgattgttactggaaacgttttgggttatgacttttatgtgtctttgtcctgcatttgggttttttatcgtgtgtgtgttgttttggctgttgacactctggtttattgtgggaagagg

SEQ ID NO: 41933 - DNA, 604 bp, Homo sapiens
tgttttaaggaaaaagttcttgcatctattctgatttctgtatcaggccaaacaatgctagagttgctgacttaatgaccacattggctccrctgttggtcaagatcatcagactctcatttcagctttcaatgatattgcatcctgcaaacaaaccacttgagatgagcttggtataagggtcctactaagagagttctgattaccttattcacttgagatgaaatttttcactggagtgaaattaccagacaactaaaatgttttttccaagggacaaatgtgcaatttttgatccccaagagtagaccagaggccaaaagctacagccattctaccttgcctgctgtgtttctgtggcacacaaactaagaatggtttttacctggttaaatggtaggaaacagtcaaaagaagattttgtgacatgtgaaagttgtatgaaattatatgaaattcacatttcattgtccttatggcggggtcatcagaacgcaaccacacttatttatgtgttatttatgctgctttcttgaaacaaaactagagtagttgcaacagagaccttatggcccacaaagcctaaaatatttattttctggcc

SEQ ID NO: 41934 - DNA, 604 bp, Homo sapiens
tgttttaaggaaaaagttcttgcatctattctgatttctgtatcaggccaaacaatgctagagttgctgacttaatgaccacattggctccgctgttggtcaagatcatcagactctcatttcagctttcaatgatattgcatcctgcaaacaaaccacttgagatgagcttggtataagggtcctactaagagagttctgattaccttattcacttgagatgaaatttttcactggagtgaaattaccagacaactaaaatgttttttccaagggacaaatgtgcaatttttgatccccaagagtagaccagaggccaaaagctacagccattctaccttgcctgctgtgtttctgtggcacacaaactaagaatggtttttacctggttaaatggtaggaaacagtcaaaagaagattttgtgacatgtgaaagttgtatgarattatatgaaattcacatttcattgtccttatggcggggtcatcagaacgcaaccacacttatttatgtgttatttatgctgctttcttgaaacaaaactagagtagttgcaacagagaccttatggcccacaaagcctaaaatatttattttctggcc

SEQ ID NO: 41935 - DNA, 574 bp, Homo sapiens
tcccattctcactgaattatttgcaccacaattataatacttaaagtctacttttcaaaatatgtttcatattggtcactttcagtagaacaaaagcactttataaggcagggacagttacttttacatctttaattatctatacaggtaacttagtgttttctgatagtagtttcttaatatattaaattgaatttcattttatcatcactcccccttttcttatttatacatttttttatttttaaatttattttttgagatggagtctcgctgtgtcacccgggctggagtgcggtggtgccatctcagctcactgcaacctccgcctcccaggttcargagattctcctgcctcagtctcccatgtagctgggattacaggcatgcaccaccatgcccagctaatttttgtatttttagtagaaatagggtttcaccatgttggccaggctggtctcgaattcctgatcttaagtgatcctcccgccacgacctctcatagtgctgcgattacagatgtgagttaccaggcccggcccttctttattattattattattatttaatctct

SEQ ID NO: 41936 - DNA, 1015 bp, Homo sapiens
ctcctgggtgacactcaccatgcagacaacatctccagcaaactgtggctctggggagggtctgaatgatcctaaatgacggggaagcgaagaccaccctgagccacatggatacacgcagctgcgggatcacagaccctctgggcttgtgctataatttactttttttgacagtcttgttccagctgcatctgtagatggggaaaagcacccctttccaagtcagatgacccttttaaaaaaagtatttattcttgagatggagtctcgctctgtctgtcacccaggctggagtgcagtggtgtgatctcggctcactgcaacctccgcctcctgggttcaagcgattcccccacctcagcctcctgagtagctgggattacaggcacrtgccaccacgcccagctaatttttttgtatttttagtagaggtggggttttgccatgttggccagagtggtctcgaactcctgacgtcaaatgatccgcccgcttcggcttcccaaagtgttgggattacaggtgtgagccaccatgcccagcccatgtcagatgatccttaatatgggaattactgttcttcttagttacttcagaaaatagttgaataacaattacttcagtgtccacatttctttgcttcagttgatgttcacacatttaatgtcttaagattaaagataaatgtaaacttttgtttaaaagtactgttgtcttggtattgcatagaagaaatactgtttgcttggggctgtaggcaaaggcatttcatctggttcagagaaactatttgtgcagtgccatgaaattagctggaagagagaagataggctttgaagccaggcagacttgcgtttaaatatcattagcatcagttcctatggggatatccttggcaagtttcttagcctttccagtctcagctgctttacctataaatgggaataagcacacccaaaatcgacgttgttgtgaagatttgagttttcatgtaaaatacatgttataggtatct

SEQ ID NO: 41937 - DNA, 602 bp, Homo sapiens
gcctggagaaaatagaagggaacctggcaaacaaaatccttaacccacttctgaaaatacagacatactgtgtgaggaaacattctgttagttcctggttttctgttacatatttctataatttaggtattattttattaacagtgactttaagatccagtgtggctgccacctatggtcttagtgaggtccgtttacaagtttcacagtttattttattcatgttgattacaatgtgaaatacagtaccctaaagctgtgtagtacacaatctatacaaccaaatgtgagggccctggaaactctccagacctggggtcmtctccgaatttcatccaaattaactcatatttaaattcccttataaatggcccaaagtaatagtaaactcctcaaaacagagtaaaatagagggacagttgataccaagataaccattaaaaaagtcccagcactggtattttattggccatttaaagtgcttatatatgtagatctgtatccgcatctacatctaggaatttatctctaattagtatatcatcaatatcaatatactattcacaattgatcacatctggttattcaaaatcaatttgaaa

SEQ ID NO: 41938 - DNA, 602 bp, Homo sapiens
gcctggagaaaatagaagggaacctggcaaacaaaatccttaacccacttctgaaaatacagacatactgtgtgaggaaacattctgttagttcctggttttctgttacatatttctataatttaggtattattttattaacagtgactttaagatccagtgtggctgccacctatggtcttagtgaggtccgtttacaagtttcacagtttattttattcatgttgattacaatgtgaaatacagtaccctaaagctgtgtagtacacaatctatacaaccaaatgtgagggccctggaaactctccagacctggggtcctctccgaatttcatccaaattaactcatatttamattcccttataaatggcccaaagtaatagtaaactcctcaaaacagagtaaaatagagggacagttgataccaagataaccattaaaaaagtcccagcactggtattttattggccatttaaagtgcttatatatgtagatctgtatccgcatctacatctaggaatttatctctaattagtatatcatcaatatcaatatactattcacaattgatcacatctggttattcaaaatcaatttgaaa

SEQ ID NO: 41939 - DNA, 602 bp, Homo sapiens
gcctggagaaaatagaagggaacctggcaaacaaaatccttaacccacttctgaaaatacagacatactgtgtgaggaaacattctgttagttcctggttttctgttacatatttctataatttaggtattattttattaacagtgactttaagatccagtgtggctgccacctatggtcttagtgaggtccgtttacaagtttcacagtttattttattcatgttgattacaatgtgaaatacagtaccctaaagctgtgtagtacacaatctatacaaccaaatgtgagggccctggaaactctccagacctggggtcctctccgaatttcatccaaattaactcatatttaaattcccttataaatggcccaaagtaatagtaaactcctcaaaacagagtaaaatagagggacagttgataccaagataaccattaaaaaagtcccagcactggtattttattggccatttaaagtgcttatatatgtagatctgtrtccgcatctacatctaggaatttatctctaattagtatatcatcaatatcaatatactattcacaattgatcacatctggttattcaaaatcaatttgaaa

SEQ ID NO: 41940 - DNA, 750 bp, Homo sapiens
tcagagaatacaacttttgggtgttgtcttccaccccgtgctaacactccttctttgccactggaagaaacttgatctgatggtgatcttattagcaagcaggaccatgtggcccttttagtttctscttatctcccagagccaaggtgttaactgagccagtgttcacttttgtcagaaaagaactggtaagtatctgtctttctagtctcttttttcctgtgtgcgtaggatatgctcttcttcggtctcctgtaccatgtggctgtctggagactatacaatccttctctttgcgatcggcctccagggtgggacactggcctcccataggctctggttctgagccgtgtgtgccaatctgacttgccagaacctctaccccattagagttttggggactgacctcactaaggataccaagcagtttctcattccccatctgcctgcaaagaggggcagccctgcagatgtgagactacaggattccagtgccttgttgccacctttcacctcacgacagctccacctcataccaaatcacaactctaaatgcaagactgtgatctgtaccttttttttttctttctttcttttgagacagggtctcactatgttgctcaggttggtttcaaactcctggggccaactaatgttcctgcctcagcctcctgagtagctgggattacaggtgtattgtcacactgcttgtcttttgaacccaggtataatgaggactttgaagtcaga

SEQ ID NO: 41941 - DNA, 1916 bp, Homo sapiens
taaatgaacataatagatctttgcctttatttgggtcttctcgctgtccttcagcaacactttattattttctctttaacagacttttgtgccttaaatttttgtttcttttgtttttacacacagagactttgggaaacttttattaatttgaataatatgtccgttgatgcaatgaaactggcattaatgtcattttttttcctttttataccttttatttatttctcttgttttactctactgtattcaagtatccttggattgttccagattttaaagacaaggtgtctggaggttgtatcctgaagtactgcatttgctgtgaatttttgtagataacctatatcaagttttaaaagttctttcccctttatagctttctcagagcttttattaaaaattgagttaaatttttgaaatgtactttttgtatctatttcaatagttgcatgatttttatgtagtgaattatagcatgtggtgttaatgtattcttttactcctaacaaaatccaatttggtcatgagtgattttttttagtgggttaccacatttgaattgttaatattttgaatgatttttaaaaatctatgctcgtaaattatatcgacctacaattttccctttttatactgtccttccctggcttcgaatcaaaattaaactcacctcataaaatgagttctttcattttttattgtgtggaaaattctttatgaaattggaatgatctattcattgactggctggtagaagtcacccataaaaccacgcatgcctctttttaaaatcgaacatgtactatgggtgggctttaaaatacggatccagtttcctcaatgttataggtctatttatgcttgctatctctttttgggtcatcttttgacgttatattttttccaggaatgttttcagtttaactaagtcttcacatttatcggtcttcacatgtttatttgtaaagttctcttatgtttgatgtctttactatgaaatttatcatgcattcagaattgtatatgaactgtttaaacaacagcaaaaatgaaacactctctcttccaacacctgtgttaagaatcaaatcccgaccaacactttcgaagcccccatgtcctcagcccacccatctcttctaattttatgtccccagagttaccgttgttctgaatatgtacaagtatgttcttatatttctttgtgcatctgtaaacattatattatttagtttaaaacgtgagtattaaggacaaaactagcttcctaaggaaaragtcatattacagctgtttagatgaaggcactggaggaaggcaagctaagggagctggtaggcaaaagcacagtctcagcctcttggagagtttaccggagcctcctgtggaattccgtggaacctgaggacctctgcagctggcgagggaggggggcaggggtggggatgggggccatgtcctgactcagggctgtatgtcccagaggaacgcaggcagggaaatgtgtctctggctagccgagtcctccggctctcaggattcggtcaaagcagaacaacagtgcaggttaggacgcaggccctccgctggcccaaaattcaggtcatgcagaggagagtgaaaaactcattggcacacggccaagggaagcccacagcaaagagtctatggcacaacggcgatgaggctggggttcacctgaagttgctgtttctaggggtatgctcccatctgggcgggtgaactcctgcatgtggtgaagagctgttcctgtccctgccgacatctctcaccatcctgcatcaggccaggtgtccactgggtcctggggcagcctccccacgggttactctccattcagtggggcgcttcctctggagtttcgagaagagttcaaaggaggcaagcgtttg

SEQ ID NO: 41942 - DNA, 1041 bp, Homo sapiens
tgcagtcctcacacctgtagcaatttacatggaagtttcttcccatgcacttgattttgaaggcatctttcccatcccgaggaataatgggattctcacagatgctgcatacgggagcraatttcttgtagaattcgtctaggcagtacatctcgttttggctgcccagggcagagctctcatcctggatgcaccgggcacaggtcacacacatgaagcaggaggggtggaaggcctggcccagggccctgatgatgtgctcccggaccacctggccacacttgccgcacttctccagcgtgtcctggtagcagggttcgcagaggggtcgcccatcctggtagaagctctgcccagctagctggcggtggcaggtgtgccacgtgaagcactgggcatggtactgcctctttatggcctccacagccagctcttgcgggggacacggttttgtggcagaaggcacagatgtctgtggacgactctctctcaacaggctctgctggggaaggcggaagctcttcctccccaggcccgaggggactgggcccaggctggactgaaggtccctccactggggcctgtggtcggggtgggggcgagggcaggtgcaactgctctaagtctgcaatgagtgaggcccccattggagcaggagcctcttcttcagaagacaggagcaccggagggggcagtggagggggtgggacgaggtccaggtcaggaagtgcgtccttaccatccaggacaggaggagggggtgagcatcctccattggagagctgcagaggtgcagctggcactgtggctgcagccctgccagggggtgcccaggggctgggctttcccgctaagccagctccgggtgccttcatgggggcaggagcctcccaggggaggccacatcaggcctcacaaaccgcctgcccccttcctcaaccacagctaaatcgtggcacaggggtgcaagggtgataaagacagacgatgccacactcttctcaggctttgaggccatggcttcagctcctggtgtggctg

SEQ ID NO: 41943 - DNA, 1041 bp, Homo sapiens
tgcagtcctcacacctgtagcaatttacatggaagtttcttcccatgcacttgattttgaaggcatctttcccatcccgaggaataatgggattctcacagatgctgcatacgggagcgaatttcttgtagaattcgtctaggcagtacatctcgttttggctgcccagggcagagctctcatcctggatgcaccgggcacaggtcacacacatgaagcaggaggggtggaaggcctggcccagggccctgatgatgtgctcccggaccacctggccacacttgccgcacttctccagygtgtcctggtagcagggttcgcagaggggtcgcccatcctggtagaagctctgcccagctagctggcggtggcaggtgtgccacgtgaagcactgggcatggtactgcctctttatggcctccacagccagctcttgcgggggacacggttttgtggcagaaggcacagatgtctgtggacgactctctctcaacaggctctgctggggaaggcggaagctcttcctccccaggcccgaggggactgggcccaggctggactgaaggtccctccactggggcctgtggtcggggtgggggcgagggcaggtgcaactgctctaagtctgcaatgagtgaggcccccattggagcaggagcctcttcttcagaagacaggagcaccggagggggcagtggagggggtgggacgaggtccaggtcaggaagtgcgtccttaccatccaggacaggaggagggggtgagcatcctccattggagagctgcagaggtgcagctggcactgtggctgcagccctgccagggggtgcccaggggctgggctttcccgctaagccagctccgggtgccttcatgggggcaggagcctcccaggggaggccacatcaggcctcacaaaccgcctgcccccttcctcaaccacagctaaatcgtggcacaggggtgcaagggtgataaagacagacgatgccacactcttctcaggctttgaggccatggcttcagctcctggtgtggctg

SEQ ID NO: 41944 - DNA, 1041 bp, Homo sapiens
tgcagtcctcacacctgtagcaatttacatggaagtttcttcccatgcacttgattttgaaggcatctttcccatcccgaggaataatgggattctcacagatgctgcatacgggagcgaatttcttgtagaattcgtctaggcagtacatctcgttttggctgcccagggcagagctctcatcctggatgcaccgggcacaggtcacacacatgaagcaggaggggtggaaggcctggcccagggccctgatgatgtgctcccggaccacctggccacacttgccgcacttctccagcgtgtcctggtagcagggttygcagaggggtcgcccatcctggtagaagctctgcccagctagctggcggtggcaggtgtgccacgtgaagcactgggcatggtactgcctctttatggcctccacagccagctcttgcgggggacacggttttgtggcagaaggcacagatgtctgtggacgactctctctcaacaggctctgctggggaaggcggaagctcttcctccccaggcccgaggggactgggcccaggctggactgaaggtccctccactggggcctgtggtcggggtgggggcgagggcaggtgcaactgctctaagtctgcaatgagtgaggcccccattggagcaggagcctcttcttcagaagacaggagcaccggagggggcagtggagggggtgggacgaggtccaggtcaggaagtgcgtccttaccatccaggacaggaggagggggtgagcatcctccattggagagctgcagaggtgcagctggcactgtggctgcagccctgccagggggtgcccaggggctgggctttcccgctaagccagctccgggtgccttcatgggggcaggagcctcccaggggaggccacatcaggcctcacaaaccgcctgcccccttcctcaaccacagctaaatcgtggcacaggggtgcaagggtgataaagacagacgatgccacactcttctcaggctttgaggccatggcttcagctcctggtgtggctg

SEQ ID NO: 41945 - DNA, 1041 bp, Homo sapiens
tgcagtcctcacacctgtagcaatttacatggaagtttcttcccatgcacttgattttgaaggcatctttcccatcccgaggaataatgggattctcacagatgctgcatacgggagcgaatttcttgtagaattcgtctaggcagtacatctcgttttggctgcccagggcagagctctcatcctggatgcaccgggcacaggtcacacacatgaagcaggaggggtggaaggcctggcccagggccctgatgatgtgctcccggaccacctggccacacttgccgcacttctccagcgtgtcctggtagcagggttcgcagaggggtcgcccatcctggtagaagctctgcccagctagctggcggtggcaggtgtgccacgtgaagcactgggcatggtactgcctctttatggcctccacagccagctcttgcgggggacacggttttgtggcagaaggcacagatgtctgtggacgactctctctcaacaggctctgctggggaaggcggaagctcttcctccccaggcccgaggggactgggcccaggctggactgaaggtccctccactggggcctgtggtcggggtgggggcgagggcaggtgcaacygctctaagtctgcaatgagtgaggcccccattggagcaggagcctcttcttcagaagacaggagcaccggagggggcagtggagggggtgggacgaggtccaggtcaggaagtgcgtccttaccatccaggacaggaggagggggtgagcatcctccattggagagctgcagaggtgcagctggcactgtggctgcagccctgccagggggtgcccaggggctgggctttcccgctaagccagctccgggtgccttcatgggggcaggagcctcccaggggaggccacatcaggcctcacaaaccgcctgcccccttcctcaaccacagctaaatcgtggcacaggggtgcaagggtgataaagacagacgatgccacactcttctcaggctttgaggccatggcttcagctcctggtgtggctg

SEQ ID NO: 41946 - DNA, 1041 bp, Homo sapiens
tgcagtcctcacacctgtagcaatttacatggaagtttcttcccatgcacttgattttgaaggcatctttcccatcccgaggaataatgggattctcacagatgctgcatacgggagcgaatttcttgtagaattcgtctaggcagtacatctcgttttggctgcccagggcagagctctcatcctggatgcaccgggcacaggtcacacacatgaagcaggaggggtggaaggcctggcccagggccctgatgatgtgctcccggaccacctggccacacttgccgcacttctccagcgtgtcctggtagcagggttcgcagaggggtcgcccatcctggtagaagctctgcccagctagctggcggtggcaggtgtgccacgtgaagcactgggcatggtactgcctctttatggcctccacagccagctcttgcgggggacacggttttgtggcagaaggcacagatgtctgtggacgactctctctcaacaggctctgctggggaaggcggaagctcttcctccccaggcccgaggggactgggcccaggctggactgaaggtccctccactggggcctgtggtcggggtgggggcgagggcaggtgcaactgctctaagtctgcaatgagtgaggcccccattggagcaggagcctcttcttcagaagacaggagcaccggagggggcagtggagggggtgggacgaggtccaggtcaggaagtgcgtcctyaccatccaggacaggaggagggggtgagcatcctccattggagagctgcagaggtgcagctggcactgtggctgcagccctgccagggggtgcccaggggctgggctttcccgctaagccagctccgggtgccttcatgggggcaggagcctcccaggggaggccacatcaggcctcacaaaccgcctgcccccttcctcaaccacagctaaatcgtggcacaggggtgcaagggtgataaagacagacgatgccacactcttctcaggctttgaggccatggcttcagctcctggtgtggctg

SEQ ID NO: 41947 - DNA, 555 bp, Homo sapiens
aactggattgttgtgataattgctcaaatctattaatttactcaaatcattaaattttacatatacagtgagtgaattttgtagtatgaaaattatgtttcagtaaatctgttaaaataattcttttttaaaaaataagacttcgtaagcaagacaaaatccagaagacacaaatgaaaaaatatttgaagaaaattactgatttcattgcatgaagaaaataacaaaattaaaagaagtatatgacgctcaggaaaaattttgatcacgtaaggcagacaatgggctaactttcttatgaaaaattgttaactatcaataaataaattcatggaaatgccatagacaattgggcaaaggatatagactcactatagaagagaatttcctaatagtcgataaatataaatatttgctcaaactcaccaatgaacagaaaaatccaaattcgaacagcaatgtaataaactagttctcctactccaaaattaamaagtacaatagtttgttttaaactcaaggatttagaagattctaagggaatagactctctca

SEQ ID NO: 41948 - DNA, 548 bp, Homo sapiens
tgtacaccaaagccctgtgacatgcagtttacttatataacaaacttgcacatgtacccctgaacctaaaataaaaattttaaataaagaaaaaaaragaaaaggtacccatgagtttattgcccacactaactcatttctcacacaagcagttacttcagcacaacccctggtttgctcattaaaccaatgctggcaatagaagtgtatacgagggacacagtagagaacatgatctaagccagtttcattggccagaacttccccttctgcaaattagctatgtgaccttaggcaagtgactttaccaatccatgcttaagtttctgcatctaaatgggaataataacagtacccttcctaacagtgttgtatgaaagttaaatgagttcacacttatgaagtacttaagtcaacacttaacacgtagtaagctccatatacatgctggctaggcttggccattggcaatctgttgatgaatgttttaggtataaatgtctaaatagtattatgatcccattccatcccaatggccttctgaaatt

SEQ ID NO: 41949 - DNA, 542 bp, Homo sapiens
gtctgtcttcagtgtgccactcttcccatcaagtgcccagagcccctgccccacactggctcctcagggaaggacacatgggcatgcctgagattctggctggtgcctagcacacaagtgagggatcaggcttaacttggacataatgagcgaatttgaggggacctactgacggcttagtgtggtcactctctgaggttatatttggactgagccataaacctaaagcaatgactaatacaggcaaataagcccctctgtgctggcaaatcatttcggtaccatcctactgacagcatagagtcaccttctaccccagggtgcctaccatatcttgttcgattcagaactcaagtggctgctataaatgactgatatgggaagttctggcagaacacagyggctcatgtctgtattcccaacactttgggaagccaaggtgggaggaactcttgagcccaggagttcaagaccaacctggataacatagtgacaccccatctctacaaaaaatacgaaaaatagctgggcatgttgtcatg

SEQ ID NO: 41950 - DNA, 528 bp, Homo sapiens
atgttagaaacatgcataaatcgtgtgtatgggaaaaggatgggagtgtatggtatgctatttttgcttatcaataacttttgcctttcttttggtgacaataggtggtcttttatttgggtaagtacctttcctccaactgccgcaaatactaatacggtaccttgccctccatccctcccaagagagaggcatatgactcaagtgaaatcagactctstcctgggattggaactgtgagcaggatgatacagggaaggaagttgactggaggcagatcatgtgggtagcagtgtcttaaacagaaggttcatgagtcttgctactgaggtccctagagctcccctcattcctgtatttcctgaggcctcgtcagtcagctcttcctttggtcgggtgaatttcacagatacccttctgtagtgggccagatggtggccccaaacacctgtccatattttaatctctggaacccgtaactattaccttatttgggaaagggtctttttgcaaatgtggttaagttaa

SEQ ID NO: 41951 - DNA, 1159 bp, Homo sapiens
tgacttttttctttcttttttaaagagatgaggtcttgctccgtcaaccagactggggtgcagtggtgcaagcatggctcactgcagccttgaactcaggcaatcctcctgccttagcctcccacacagctgcagttacaggcatgagcaaccactgcatccagctatgacccttttcttgactcacaaggtgtgaggaacacaaaacagaatggctgcttttgagaacaagcacattccacaaatgtgatccttgggatcacaggaaacaaagtgagcagagtggtggggaaagaggttatttacacttccacaagctggatctttggctatttctactaagaggaaaaaagctttcttaaacaacaaaattcttcctggaatatccatgcaacattaaaaccaaagttccaagtacgcagattcttctasgcagtatgtaaaatagcatgtatggccaggcacggtggcactttgggaggctgagacgggtggatcgtttgaggtcaggaattcaagaccagcctgaccaacatggtgaaaccccacctctactaaaaatacaaaaaaattaaccaggcgtggtggcgcatgcctatggtcccagctacttgggaggctgaggcaggagaatcgcttgaacctggaagccagaggttgcactgagctgagatcatgccattgcactccagcctgggcaacagagtgagactccatctcaaaaaaaataaagaaataaaataaaaataaacttactgcaggaaatgacatctgttcattgaatttgttcagatctttcacattatcttaacagggaccactggatctagtttttctttgttggctgtgcaggtgagataaaaacggagtttccagaagatttaactcaaactcagcatgcactccaggttcttccatgctagtctctctgcctgcactctttgccccaatccaatccccatacaatggcaaagaaatattttcaagctaaaaattgaatcatgttactcctttactttaagaagccttcaatgacaataacgaaagctaacgtctatcaagcacttaagtacccgttgtcaggaacttttcaatgcacttcaggtatattaattcactcagtcctaacaataacctaataaagtagatattactcagg

SEQ ID NO: 41952 - DNA, 519 bp, Homo sapiens
tggcaccccccgtggacagcttgagaagcctctgcacctcccctccaggctccacgactcctccccctgcaaaatgacgccaactgctgttggaccccggccccgtggcccaagggctatctctgatggtctccattttcactgccctctccagccccgccgctgcaccaggagatcaagctccccagccctctcactgagcccccggccmtcacccgcgaatcccacctgagcagtcctcctgcctctcaacctgcctcggggcacggtgtcctctaaacaacccccttccaacctgagctcttcgcgcctctcttacgtgtagacagcggctcctggtgcctgaagccaagccctgtctacaggccaggagccccagctcccacccccgatggcaacacgacagcaggaccagcccaccacgaaggacagccaagcccctggcccgaggcttgcctcacacgcttgcggccgcatgttttcttctccagccactcaaattctcacgtttcttttcct

SEQ ID NO: 41953 - DNA, 2106 bp, Homo sapiens
tcccacctgagccttcccgagtagctcagactacaggtgcacaccaccctgcctggttaatttttaaatttttgtagagacgaggtcttgctttgttgcccaggctggtcttgagctcctgggcttaagcgatcctcccatcttggccccccaaagtgctgggattacaggtgtgagccactgtgcccggcagcaacaagttcttaatatcagccaatgctcagtgttcaaattcctaattgcctcaaatatttaatttttttttttttttgagacagagtttcgctcttgttgcccaggctagagtgcaatgatgccatctcagctcactgcaacctccgcgtcccgggttcaagctattctcctgcctcagcctcccaagtagctgaaattacaggcatgcgccaccacacctggctaattttgtatttttaatagagacaaggttttaccatgttggccatgctggtctcaaactactgacctcaggtgatccgcccgccttggcgtcccaaagtgctgggattgcaggcgtgagccaccatgcctggccctttgatctttcttttaaattccttccaaactttaaccccctgctcctttggagtgtttttgttgttttgttttgtttttgacctggagtctcactccatcacccaggctggagtgtagtggcgtgatctcagctgactgcaacctccgcctcctgggctcaaatgattctcgtgcctcagcctccggagtagctgggattacaggcacctgtcaccatgcctggctaattttttttttttttttttttgtatttttagtagagatagggtttcaccatgttggccaggctagtttcgaactcctgacctcaagtgatctgcccaccctaggcttcccaaattgcagggattacaggcatgacccaccgcccccaggctgtgctgctttttcatagcagccagtggtctccacctcagaggtacagagggggatccctggatggggtcacagagggagtcggaacaggtgggaggcacagggctgcctgaacttctccagggacccatggcagtttcctctggctgcagggagggcaggtctstttagcctggctaaagagtaaccagatctttctgtgaagaggcatctgaggccgggcacggtggctcacacctgtgatcccaacactttgggaggccgaggcaggcagatcacaaggtcaggagattgagaccatcctggccaacatggtgaattagctacttgtggtggcgtgcacctgtaaacccagctactcgggaggctgaggcaggagaatcgcttgaatccgtgtggcagaggttgcagtgagccaagattgtgccactgtactccagcctgggtgacagagtgagattctgtctcaaagaaaggaggcatctgaaggccaaggctgggtgtatgggggctccgtgaatccccactttaatttcccaggcagccggtgaggaggtagatttgaattgagactgagtcattgaattggactttagccaatgatgataatagaaaccatctgtggctcacttactttgtgcagggctgtgcgttccaggtagtggggagggggggaacatagcgtgtgcaaaggccgtgaggtggcagtggggggtgtatttgaggggcagccgggaggccggtgtgccagggcaaaggcagtggggtgggagtgaatgacatgagctctggagggcagcaggtccaaaccacaggctctttcaggcttgtgcaggggtttgaatgttattccaagaatgacaggaagcccttgacagagggttgtcatggaaggtgttgaataggcagtttggatattcaagtttgagttgggagagaggtcggtcctgagatctgggtttaggagtggaggacacggatttaccatttttttaggcgggagaagagaaagcccagtgtgaacccagcaggcacaagtgtggatggtagggatcatggcagaggccccagctgcatccacttcagggacagcctggaatggcagagaaagaggtgaacgaggtggatggtggggtgaccctggagtgtgggtggaaccaggccacgctgggcctt

SEQ ID NO: 41954 - DNA, 615 bp, Homo sapiens
ataaccagaaaagaagtgtgtgtgcacatgctagaaagaggatgaggggggtgggggcaacatcgaaacaatcatctcattcatcaaagagagagcagagacctgacgcagtgatacagaaaagactctatggctgttatgacttacctgagtggctggatcttatacactctttggactccagtagagttatgtaaaatttcccttttactgttgtaaattcaaaaaccttttatgaccttttactatttgccaagcaggcactgagagagacatgagaccacagaggtgaagaaaacacaatcccccataaccccactttatgcctatacyctaccttatacatatctctattatttgacccaccacttcctcccaaatgaaaagaggagaatccttgtatctccagtgcctattacaatgtctggagcattgtagaaactcaatacaggaggcaaacaagaacaattatgaataaagtgaattctattttttcactgactccagagactgatgtattttcctaatggatcttcaatgatcgctaattgcaaacactttagtttttagtcctctcaatcaatgctctatgatatgttaacaaagcataaaaga

SEQ ID NO: 41955 - DNA, 818 bp, Homo sapiens
catctgtagtcccagctacttgggaggctgaggtgagaggatcacatgagacaggtaattcaatgttgcagtgaggtatgatcataccactctactccagcctgggcaacagagtgagaccctgtctcaggaaaaaaaaaatcaaagttgcatttgkgtttgtttgtttgtttgtttcctgcagttccagcagaaacgtctcagtgaatacttaccggcccattgtgggttatatgcctattcctgaaccaagcactgtaatctggagttggaatattctgattggccatgcccgggtcacaggcctaaacttgtggccatgtgtggggcaggatcagcttccacaagtgtattcttccagaaaagagaaattctggtactagctggggagaagagacaaagactagaatgttctttacaggtggaaactgaggttttggatattcgtgaggtcacccttggaggaaatataatgagaagaaccctgagatgatgtcaaagtcctgagaagcatgacacttaggagctgaatagaaaaagatgatcctgcaaaagagacagaggagtggccagaggggtagaaggagatcctgaagctactgttgtcccagaaaccaactcactcagttttgaaaagggctgagtggtcaattatgtcaacagttgcagaggagtcaatgaaaacgaagggaggagaggatgtattataataccctgggctaaaagactgtgagggaaagctacacaatgcccatcacaggatggaaggtagtattaaggaggagctggtaaaaagtacaccagataatttgggagga

SEQ ID NO: 41956 - DNA, 597 bp, Homo sapiens
taatactagagtgcttccattgtcttccattgctgaattcattgtcagataaaatagggtcctgaaagtgttaaactgaaatacagtaaattaagttggaatctccttttagggtaaattagtcaaatatctcaaattgaatgtaattaataaatacatattgagcaattcaaaaatttcccactgctaacaatgtgacctgtcaattgttctctgcataattagggagaaaacaattgttaatctgataaaagtctgatgtctttaatggaatctagacttcttcctgcatctacactatatgtagttttctgagcaaacctacaaagacagtcsaaatgagaaccaattgttccaagctcaaagtaaagaccatctttgttacatcccctactgtaaaaaatatgtggcagtgactttctctccgcaggaatttcagaatcatatatcttccctgatggctcaagattccttgcccagccctttcaaatacagcaacaggattagtgatgcatcatattcaggcaggaagagaaaaccagaccaaaccaaattgagtccaaaaattgttaaagactaaattaggagaattttaat

SEQ ID NO: 41957 - DNA, 569 bp, Homo sapiens
gatttttgcatttctactggtaatatctgctgaatacacaggaatatatatgcatgcagtatcttgccaaacattactatcaagaagccaacagaaaggcccaaaggatttccagtcatttaagagatctagatgtactgtatctttacaaaattttgccatctgtacaaccacatcctatggtggtcaagagcaacttagtatatccatcttttaacactacattttccaaaaatcatctccatccagattcagtaactgtatattgttcctaatgttcaaaatgcactacctattgttcctttctcaaaggtatagtcttcatttgtaagaattaaaatttaaaacatagcaaaaatctgaagtagtcatgtaccacataacaatgtttcagtcaacagtggaccacatatatcactctgtcacctgggctggaatgcagtggcgcaatcatggttcaatataaccgctgcccctgggctcaaatgatcctctcaccttagactccccagtagctgggactacaggcatgcaccacyatgctcggctaattttttaaatttttttgt

SEQ ID NO: 41958 - DNA, 1724 bp, Homo sapiens
taaagtgtaaaactgtcccaagtccgtaataccctgccctcccgaggccggcagcggtccgaggtaagcgaatgattaaacatgatgaatagcagagcggaagatgcagcgtggtgaaagagctcactttagctgcaactctgagatttgttgctgagtgccacaagtaatgaaatcatcaatcttccctgaactaaaaaaaaggaatccaccacagcaagtttgaaaagggcagggaggaaaagtcctgcctcctcattggagcaatttatggcctggttgctctgtgatctygctgcccagctaatctgccccagacaccctgggaactgtgcagaggggacatcgctgacctgtcacctgcccagttgctctgatcctgaaactcgctgactcacttctgggaggagaggacggtctcgggtctgtgagctgtgttacaggcacaccaatgggtgttttctggttcacgcatcatcacaatagcacagcccttggcctgggccagaaaggtgcatttcaaagctgccacaaagggacttctggggcaggcttcctaaacgggagggcgcccaggcctgtggaaatctgctcttctccagtccttctttcctttagctgctcattagccctggatcctccagcagctgtgacctggggccctttccacacgtctcactgccctgggttgaactgtgtccctttcaaaattcctttcttggaatcctaacctccagtacctcagaatgtgaccttctttgcagaggtaatcaaagtaaaataagggccgggcatgatggctcgcacctgaaatgccagcactttgggaggccgaggcagacagatcatgtgaggtcaggagttcgagactggcctggccaacatggtgaaaccccatctctactaaaaatacaaaaaattagctgggcgtggtggtgcacacctgcaatcccagctactcgggaggccgagcctggagaaccgcttgaacctgggaggcagaggttgcagtgagccgagatcatgccattgcactctagcctgggcaacagagtgagactttgtcaaaaaaaaaaaaatccaacaaaaaaaaaagtaaaatgaggtgattagggtaggccctcatagaacatgaccagtgtcctcattaaaaaaaataagaagaagaagaaagaaatttgggcacagaaacacacatagaggaaagatggaaggagaagatggcccatctacaagccaagaagacaggcctggaacacagcattccctcacagttctcagaaggaaccaaccccactgccaccttgatctcagactcctggcctccagaactgcaggacaatacgtttctgctgtcaaagcgcccagtccagggtactgggttacaacggcccttgcagatgagcaccctcaccaacagacatgtttcatttggccctctctcttttgtgtttgtttttgttaaatgagccaacattcaagactcaaattattttacataagaatctctttcattgaaactctagacactggccaaccctacatggcaggagctgagtggaggccaccccctcccaagccctccagagcccccggtgctggccgctgtctccctggcaccaagaccggatgtcagccattatttgtctcaggagggtttagttccagataccaggaacaacattagccatgttaggcagaaagggattgaatacaggggacta

SEQ ID NO: 41959 - DNA, 1724 bp, Homo sapiens
taaagtgtaaaactgtcccaagtccgtaataccctgccctcccgaggccggcagcggtccgaggtaagcgaatgattaaacatgatgaatagcagagcggaagatgcagcgtggtgaaagagctcactttagctgcaactctgagatttgttgctgagtgccacaagtaatgaaatcatcaatcttccctgaactaaaaaaaaggaatccaccacagcaagtttgaaaagggcagggaggaaaagtcctgcctcctcattggagcaatttatggcctggttgctctgtgatctcgctgcccagctaatctgccccagacaccctgggaactgtgcagaggggacatcgctgacctgtcacctgcccagttgctctgatcctgaaactcgctgactcacttctgggaggagaggacggtctcgggtctgtgagctgtgttacaggcacaccaatgggtgttttctggttcacgcatcatcacaatagcacagcccttggcctgggccagaaaggtgcatttcaaagctgccacaaagggacttctggggcaggcttcctaaacgggagggcgcccaggcctgtggaaatctgctcttctccagtccttctttcctttagctgctcattagccctggatcctccagcagctgtgacctggggccctttccacacgtctcactgccctgggttgaactgtgtccctttcaaaattcctttcttggaatcctaacctccagtacctcagaatgtgaccttctttgcagaggtaatcaaagtaaaataagggccgggcatgatggctcgcacctgaaatgccagcactttgggaggccgaggcagacagatcatgtgaggtcaggagttcgagactggcctggccaacatggtgaaaccccatctctactaaaaatacaaaaaattagctgggcgtggtggtgcacacctgyaatcccagctactcgggaggccgagcctggagaaccgcttgaacctgggaggcagaggttgcagtgagccgagatcatgccattgcactctagcctgggcaacagagtgagactttgtcaaaaaaaaaaaaatccaacaaaaaaaaaagtaaaatgaggtgattagggtaggccctcatagaacatgaccagtgtcctcattaaaaaaaataagaagaagaagaaagaaatttgggcacagaaacacacatagaggaaagatggaaggagaagatggcccatctacaagccaagaagacaggcctggaacacagcattccctcacagttctcagaaggaaccaaccccactgccaccttgatctcagactcctggcctccagaactgcaggacaatacgtttctgctgtcaaagcgcccagtccagggtactgggttacaacggcccttgcagatgagcaccctcaccaacagacatgtttcatttggccctctctcttttgtgtttgtttttgttaaatgagccaacattcaagactcaaattattttacataagaatctctttcattgaaactctagacactggccaaccctacatggcaggagctgagtggaggccaccccctcccaagccctccagagcccccggtgctggccgctgtctccctggcaccaagaccggatgtcagccattatttgtctcaggagggtttagttccagataccaggaacaacattagccatgttaggcagaaagggattgaatacaggggacta

SEQ ID NO: 41960 - DNA, 1724 bp, Homo sapiens
taaagtgtaaaactgtcccaagtccgtaataccctgccctcccgaggccggcagcggtccgaggtaagcgaatgattaaacatgatgaatagcagagcggaagatgcagcgtggtgaaagagctcactttagctgcaactctgagatttgttgctgagtgccacaagtaatgaaatcatcaatcttccctgaactaaaaaaaaggaatccaccacagcaagtttgaaaagggcagggaggaaaagtcctgcctcctcattggagcaatttatggcctggttgctctgtgatctcgctgcccagctaatctgccccagacaccctgggaactgtgcagaggggacatcgctgacctgtcacctgcccagttgctctgatcctgaaactcgctgactcacttctgggaggagaggacggtctcgggtctgtgagctgtgttacaggcacaccaatgggtgttttctggttcacgcatcatcacaatagcacagcccttggcctgggccagaaaggtgcatttcaaagctgccacaaagggacttctggggcaggcttcctaaacgggagggcgcccaggcctgtggaaatctgctcttctccagtccttctttcctttagctgctcattagccctggatcctccagcagctgtgacctggggccctttccacacgtctcactgccctgggttgaactgtgtccctttcaaaattcctttcttggaatcctaacctccagtacctcagaatgtgaccttctttgcagaggtaatcaaagtaaaataagggccgggcatgatggctcgcacctgaaatgccagcactttgggaggccgaggcagacagatcatgtgaggtcaggagttcgagactggcctggccaacatggtgaaaccccatctctactaaaaatacaaaaaattagctgggcgtggtggtgcacacctgcaatcccagctactcgggaggccgagcctggagaaccgcttgaacctgggaggcagaggttgcagtgagccgagatcatgccattgcactctagcctgggcaacagagtgagactttgtcaaaaaaaaaaaaatccaacaaaaaaaaaagtaaaatgaggtgattagggtaggccctcatagaacatgaccagtgtcctcattaaaaaaaataagaagaagaagaaagaaatttgggcacagaaacacacatagaggaaagatggaaggagaagatggcccatctacaagccaagaagacaggcctggaacacagcattccctcacagtyctcagaaggaaccaaccccactgccaccttgatctcagactcctggcctccagaactgcaggacaatacgtttctgctgtcaaagcgcccagtccagggtactgggttacaacggcccttgcagatgagcaccctcaccaacagacatgtttcatttggccctctctcttttgtgtttgtttttgttaaatgagccaacattcaagactcaaattattttacataagaatctctttcattgaaactctagacactggccaaccctacatggcaggagctgagtggaggccaccccctcccaagccctccagagcccccggtgctggccgctgtctccctggcaccaagaccggatgtcagccattatttgtctcaggagggtttagttccagataccaggaacaacattagccatgttaggcagaaagggattgaatacaggggacta

SEQ ID NO: 41961 - DNA, 1982 bp, Homo sapiens
tctcctccgcgggttcctctccctggagctgggcggcgagcaggtcgcctgcttcgcagtgggaagtggaccttctcctccagtcataaatcaaacccagccatcctcgggcctcctccctcattagagatgtttattggagatcgtgtttattcggctgtcacggcgagaaaacgcggtgacataattacctctgaccagagtcctcgctccgcgcccagggcragccgaggacctcctctgtcgccttctcatgcccgtgcccttcgtgatcggagggcgcccgtgataggcttgtctttttttcctcagaccctctcatagaatttggatgactggaattactattcagatttccccagggcccggagtttatttatttattttagaattggaaaggaaaaccgaagggaacccaacgcccctccggggcagaagggggcagcgcgcgcgaggcggaaggacagtcactctcgctgcacaaactttcccgcgggccgcgccgcgcgtgcaggggctggacgccacccggcgccagagccgggcctgaggagcggggtctggccgggaacgagggctgccagcctgggtggtgtcatttgttgcttcatttttcattccctttcctctcgtgaggaatcagaggcatcgggccgcgcgggctgagaattcttaaattctccccggccgcattcggctgagccaacccgcagttcctgtcagcccctctgtcccccgggcagcggttttccccgctagccaggtttggaagtcaccctctgtgagactgggttaggaagtgacgaaaagcgccgaattgttttcaaattgaaaatacttttttttttttttttggagatagcgctgacaaatatatgggatcccggcttttgatccctggctgccgcctctgttctcctgtcgctaataaaactcgcattgagccccttagtgccttgattaacaggcagattaactcttactggggttgggaacagcttgtcctaatcaatgtcattttaaaagcccgtcaggatgcgcttagcttcggttccctggatgcttgagcgagccagccatgacatttgctccctccccctccccagcctcaaatcccccagtaaagcccccagttcccgcctgcctgttcccaggtctacaacgggacaaatcgcaggaccgggtcgttggcctttagaataggcagcggtttagagaggggatatccagggagaagggactgaggtggccttgacttgcttgcttttcctttgaagctgaactcttgcctcttgggggcagaggttacagggaaaagagagatggggggatcgtcacagggtgatgaaatggaaagcaaacttttctaggaaccctatttgcaaaaatcggagagtgccgctgatttcagttgtcctacatgtcaggagttttaaacctaactcctatctggacaacagcatggagggactgggaggcaaagccttgggagtctgacccgctgggctgctaggaatccctttgctgggagactccactggacaatgttattttaaaggtattttgggggtgggcagggagaagacagagagagaaagagagagagagagagagagagagagagagagagagagacaggctggcctcccagagcgaacggaagaggactgaggactgaacccagggagcccctagcactggccatttggcaggaggcgaggaagggcgagggcaccgcggcttccccccaagccgagcagtggccacagcctgaaggtgccacggggcggctctgggatcttcttggcttttctaggctctgggctcggcgaggctgccgggttagcgggaaccggcaggttgctggagaaaggagagggacaaaggcctggaagtgggggaggcaccagggactgggcggccgggatgggagcctttgcctttagggctcactggacccgtttgccagctccgcggacaag

SEQ ID NO: 41962 - DNA, 1982 bp, Homo sapiens
tctcctccgcgggttcctctccctggagctgggcggcgagcaggtcgcctgcttcgcagtgggaagtggaccttctcctccagtcataaatcaaacccagccatcctcgggcctcctccctcattagagatgtttattggagatcgtgtttattcggctgtcacggcgagaaaacgcggtgacataattacctctgaccagagtcctcgctccgcgcccagggcgagccgaggacctcctctgtcgccttctcatgcccgtgcccttcgtgatcggagggcgcccgtgataggcttgtctttttttcctcagaccctctcatagaatttggatgactggaattactattcagatttccccagggcccggagtttatttatttattttagaattggaaaggaaaaccgaagggaacccaacgcccctccggggcagaagggggcagcgcgcgcgaggcggaaggacagtcactctcgctgcacaaactttcccgcgggccgcgccgcgcgtgcaggggctggacgccacccggcgccagagccgggcctgaggagcgsggtctggccgggaacgagggctgccagcctgggtggtgtcatttgttgcttcatttttcattccctttcctctcgtgaggaatcagaggcatcgggccgcgcgggctgagaattcttaaattctccccggccgcattcggctgagccaacccgcagttcctgtcagcccctctgtcccccgggcagcggttttccccgctagccaggtttggaagtcaccctctgtgagactgggttaggaagtgacgaaaagcgccgaattgttttcaaattgaaaatacttttttttttttttttggagatagcgctgacaaatatatgggatcccggcttttgatccctggctgccgcctctgttctcctgtcgctaataaaactcgcattgagccccttagtgccttgattaacaggcagattaactcttactggggttgggaacagcttgtcctaatcaatgtcattttaaaagcccgtcaggatgcgcttagcttcggttccctggatgcttgagcgagccagccatgacatttgctccctccccctccccagcctcaaatcccccagtaaagcccccagttcccgcctgcctgttcccaggtctacaacgggacaaatcgcaggaccgggtcgttggcctttagaataggcagcggtttagagaggggatatccagggagaagggactgaggtggccttgacttgcttgcttttcctttgaagctgaactcttgcctcttgggggcagaggttacagggaaaagagagatggggggatcgtcacagggtgatgaaatggaaagcaaacttttctaggaaccctatttgcaaaaatcggagagtgccgctgatttcagttgtcctacatgtcaggagttttaaacctaactcctatctggacaacagcatggagggactgggaggcaaagccttgggagtctgacccgctgggctgctaggaatccctttgctgggagactccactggacaatgttattttaaaggtattttgggggtgggcagggagaagacagagagagaaagagagagagagagagagagagagagagagagagagagacaggctggcctcccagagcgaacggaagaggactgaggactgaacccagggagcccctagcactggccatttggcaggaggcgaggaagggcgagggcaccgcggcttccccccaagccgagcagtggccacagcctgaaggtgccacggggcggctctgggatcttcttggcttttctaggctctgggctcggcgaggctgccgggttagcgggaaccggcaggttgctggagaaaggagagggacaaaggcctggaagtgggggaggcaccagggactgggcggccgggatgggagcctttgcctttagggctcactggacccgtttgccagctccgcggacaag

SEQ ID NO: 41963 - DNA, 1982 bp, Homo sapiens
tctcctccgcgggttcctctccctggagctgggcggcgagcaggtcgcctgcttcgcagtgggaagtggaccttctcctccagtcataaatcaaacccagccatcctcgggcctcctccctcattagagatgtttattggagatcgtgtttattcggctgtcacggcgagaaaacgcggtgacataattacctctgaccagagtcctcgctccgcgcccagggcgagccgaggacctcctctgtcgccttctcatgcccgtgcccttcgtgatcggagggcgcccgtgataggcttgtctttttttcctcagaccctctcatagaatttggatgactggaattactattcagatttccccagggcccggagtttatttatttattttagaattggaaaggaaaaccgaagggaacccaacgcccctccggggcagaagggggcagcgcgcgcgaggcggaaggacagtcactctcgctgcacaaactttcccgcgggccgcgccgcgcgtgcaggggctggacgccacccggcgccagagccgggcctgaggagcggggtctggccgggaacgagggctgccagcctgggtggtgtcatttgttgcttcatttttcattccctttcctctcgtgaggaatcagaggcatcgggccgcgcgggctgagaattcttaaattctccccggccgcattcggctgagccaacccgcagttcctgtcagcccctctrtcccccgggcagcggttttccccgctagccaggtttggaagtcaccctctgtgagactgggttaggaagtgacgaaaagcgccgaattgttttcaaattgaaaatacttttttttttttttttggagatagcgctgacaaatatatgggatcccggcttttgatccctggctgccgcctctgttctcctgtcgctaataaaactcgcattgagccccttagtgccttgattaacaggcagattaactcttactggggttgggaacagcttgtcctaatcaatgtcattttaaaagcccgtcaggatgcgcttagcttcggttccctggatgcttgagcgagccagccatgacatttgctccctccccctccccagcctcaaatcccccagtaaagcccccagttcccgcctgcctgttcccaggtctacaacgggacaaatcgcaggaccgggtcgttggcctttagaataggcagcggtttagagaggggatatccagggagaagggactgaggtggccttgacttgcttgcttttcctttgaagctgaactcttgcctcttgggggcagaggttacagggaaaagagagatggggggatcgtcacagggtgatgaaatggaaagcaaacttttctaggaaccctatttgcaaaaatcggagagtgccgctgatttcagttgtcctacatgtcaggagttttaaacctaactcctatctggacaacagcatggagggactgggaggcaaagccttgggagtctgacccgctgggctgctaggaatccctttgctgggagactccactggacaatgttattttaaaggtattttgggggtgggcagggagaagacagagagagaaagagagagagagagagagagagagagagagagagagagacaggctggcctcccagagcgaacggaagaggactgaggactgaacccagggagcccctagcactggccatttggcaggaggcgaggaagggcgagggcaccgcggcttccccccaagccgagcagtggccacagcctgaaggtgccacggggcggctctgggatcttcttggcttttctaggctctgggctcggcgaggctgccgggttagcgggaaccggcaggttgctggagaaaggagagggacaaaggcctggaagtgggggaggcaccagggactgggcggccgggatgggagcctttgcctttagggctcactggacccgtttgccagctccgcggacaag

SEQ ID NO: 41964 - DNA, 1089 bp, Homo sapiens
tcccttccttacaycttatacaaaattaattcaagatggattaaagacttaaacgttagacctaaaaccataaaaaccctagaagaaaacctaggcattaccattcaggacataggcatgtgaagctatttaggttttaaaaacaaaagttgtcatttgacaactttgtattatttcaatgaagttacaattatttttaaatgagtccaatataaaagctatataaaacattatatcttcaggaaaattagccacaaatgtgacatgtgtgtgtgtatgtgtctgtgtatccatttaagaactttttaaccgctgtagagaccactgttaatgagaaagtgatattagaattaagatattctcatattgaggtttacctgtacatgaagacatccagtacctagaatgcaaaaattggtatttgtctgatgtttgtatttgggaataatcatattgtgttcaaattgcaaagttcacaactactttgatcaggcaatggtataaatataaattaatatatttttaaataaaatgaaatatttaatataaaacttttagtaaatgtttcattaactaattattgattgataacatttgaattacattgagtcaaagtatgataattgtattcttatttctttatttgcacttggtaaaacttaagaatgtaaatgtattgatttctactttttgtttcaagtctgtcctccacaaacactgtcaaatatactacaaaccgccagagctaaccacattatcaaagcccaaactgaatattatcattttttaatattactttatttatttttaattattgtggatacacagtaggtgcacatatttagtgtgtacatgagaagttttgttacaggcatgcaatgtgaaataagcacatcacagagaatggggtgtccatcccctcaagcatttatcctttgagttgcaaatattccaaatacattcttaaagttattttaaaatatacaattaagttattattagctatagtcaccctattatgctatcagatagtaattcttatttattctttccatttttttgtacccactaaccatctgtacctcccct

SEQ ID NO: 41965 - DNA, 1626 bp, Homo sapiens
aataaccaagatctcctgcaggtgcctttgccttggctttgtgagcctggagttgctggctggcactgggcagcaggcagcagagctggtcccatttctccatgctttactcactctttgggggacacaggcacattgaacaacctgggtcctggcctggcgctggctgggaagctatttgatgtcaggctgaatgtgggcttctgagttgaaaagagagtatgggtcaccctgccccacttactcattttaccaagaatgaaaatggggatctattccagacatgatagtatacattgtaagtctgtgcaagcttgctgcacttgtatccactcagcacacacttactgagtgtcaagtgtctccagcatgaaaggcgctctagttcccggggtcccaccctccacagaggacagcagcaccttgagggacggaggtgcaaagagcaaggtgggggctcttctgctggagaggcagctagggagggtccttagaagaagtgacagctgagttcttctctgaagggtgaagctgaattacttgaagcttagggtgaaggggtgtccagggaagtggagcctgtgagccaaaagcataatgacttgtccagagaagtgtaacaagttccatattgtttctatgccaaatctgcacaagagtcgccacaggaaagagcaggatcctggagccagggccttggatttcayctgctggcaatggaaatgttcactgggaattttggggggcaaaacgtgaaaatgtttcctcttagctccaattctctgtctctctgtctctttctgtccctctctctctcctttatctttaatttttgtattatcctaagaaaacacagatgtctcagacatggggattagcagcctgcctctttctggatgacttcaggggagcacttcagcctctgtgagcttatttacaataattcacaaatcttgccaaaaaaaaaagtcatggtagcagaggttagaaaatctcctagtgtttcttctgacactttgaatttatgattaatatgtttaatcttcatcttctgaaaagtcaccagttacacagtcaggaccataaagggagtctgtttctgtggtttgtggcttcaacagtcaaaggttttgcagcaacagcattgcatgtgggttttaggctgatgatgctcaacagtggacaattctcttcacctgcctgggccccactgcccgcccttccaaacagtgcagggtcacagctgagctctctgagacacctcacaggatctcagcttctaaactatcaagtgtcttctaggtgaaggcttggtctcatagcctttgtggtttcctccaggtaacacttggttttctgacctaaccctggtatatgtgtgacacatgtgtgaatgtgctccctgtggcagcgctgaggaaggactcagtcatcacagatgctgaaaggcaaatgcagtgtgcttttttccaacatctccagtcttgtattatttttacccatcagcccatttgaaaaagaaaaaaaaaagcctcctgttagaattaaatcccctctggagataatgagtattttttaaatctttcattttttttatatagtcatgtttgctcccagttcctgcca

SEQ ID NO: 41966 - DNA, 1626 bp, Homo sapiens
aataaccaagatctcctgcaggtgcctttgccttggctttgtgagcctggagttgctggctggcactgggcagcaggcagcagagctggtcccatttctccatgctttactcactctttgggggacacaggcacattgaacaacctgggtcctggcctggcgctggctgggaagctatttgatgtcaggctgaatgtgggcttctgagttgaaaagagagtatgggtcaccctgccccacttactcattttaccaagaatgaaaatggggatctattccagacatgatagtatacattgtaagtctgtgcaagcttgctgcacttgtatccactcagcacacacttactgagtgtcaagtgtctccagcatgaaaggcgctctagttcccggggtcccaccctccacagaggacagcagcaccttgagggacggaggtgcaaagagcaaggtgggggctcttctgctggagaggcagctagggagggtccttagaagaagtgacagctgagttcttctctgaagggtgaagctgaattacttgaagcttagggtgaaggggtgtccagggaagtggagcctgtgagccaaaagcataatgacttgtccagagaagtgtaacaagttccatattgtttctatgccaaatctgcacaagagtcgccacaggaaagagcaggatcctggagccagggccttggatttcatctgctggcaatggaaatgttcactggsaattttggggggcaaaacgtgaaaatgtttcctcttagctccaattctctgtctctctgtctctttctgtccctctctctctcctttatctttaatttttgtattatcctaagaaaacacagatgtctcagacatggggattagcagcctgcctctttctggatgacttcaggggagcacttcagcctctgtgagcttatttacaataattcacaaatcttgccaaaaaaaaaagtcatggtagcagaggttagaaaatctcctagtgtttcttctgacactttgaatttatgattaatatgtttaatcttcatcttctgaaaagtcaccagttacacagtcaggaccataaagggagtctgtttctgtggtttgtggcttcaacagtcaaaggttttgcagcaacagcattgcatgtgggttttaggctgatgatgctcaacagtggacaattctcttcacctgcctgggccccactgcccgcccttccaaacagtgcagggtcacagctgagctctctgagacacctcacaggatctcagcttctaaactatcaagtgtcttctaggtgaaggcttggtctcatagcctttgtggtttcctccaggtaacacttggttttctgacctaaccctggtatatgtgtgacacatgtgtgaatgtgctccctgtggcagcgctgaggaaggactcagtcatcacagatgctgaaaggcaaatgcagtgtgcttttttccaacatctccagtcttgtattatttttacccatcagcccatttgaaaaagaaaaaaaaaagcctcctgttagaattaaatcccctctggagataatgagtattttttaaatctttcattttttttatatagtcatgtttgctcccagttcctgcca

SEQ ID NO: 41967 - DNA, 1626 bp, Homo sapiens
aataaccaagatctcctgcaggtgcctttgccttggctttgtgagcctggagttgctggctggcactgggcagcaggcagcagagctggtcccatttctccatgctttactcactctttgggggacacaggcacattgaacaacctgggtcctggcctggcgctggctgggaagctatttgatgtcaggctgaatgtgggcttctgagttgaaaagagagtatgggtcaccctgccccacttactcattttaccaagaatgaaaatggggatctattccagacatgatagtatacattgtaagtctgtgcaagcttgctgcacttgtatccactcagcacacacttactgagtgtcaagtgtctccagcatgaaaggcgctctagttcccggggtcccaccctccacagaggacagcagcaccttgagggacggaggtgcaaagagcaaggtgggggctcttctgctggagaggcagctagggagggtccttagaagaagtgacagctgagttcttctctgaagggtgaagctgaattacttgaagcttagggtgaaggggtgtccagggaagtggagcctgtgagccaaaagcataatgacttgtccagagaagtgtaacaagttccatattgtttctatgccaaatctgcacaagagtcgccacaggaaagagcaggatcctggagccagggccttggatttcatctgctggcaatggaaatgttcactgggaattttggggggcaaaacrtgaaaatgtttcctcttagctccaattctctgtctctctgtctctttctgtccctctctctctcctttatctttaatttttgtattatcctaagaaaacacagatgtctcagacatggggattagcagcctgcctctttctggatgacttcaggggagcacttcagcctctgtgagcttatttacaataattcacaaatcttgccaaaaaaaaaagtcatggtagcagaggttagaaaatctcctagtgtttcttctgacactttgaatttatgattaatatgtttaatcttcatcttctgaaaagtcaccagttacacagtcaggaccataaagggagtctgtttctgtggtttgtggcttcaacagtcaaaggttttgcagcaacagcattgcatgtgggttttaggctgatgatgctcaacagtggacaattctcttcacctgcctgggccccactgcccgcccttccaaacagtgcagggtcacagctgagctctctgagacacctcacaggatctcagcttctaaactatcaagtgtcttctaggtgaaggcttggtctcatagcctttgtggtttcctccaggtaacacttggttttctgacctaaccctggtatatgtgtgacacatgtgtgaatgtgctccctgtggcagcgctgaggaaggactcagtcatcacagatgctgaaaggcaaatgcagtgtgcttttttccaacatctccagtcttgtattatttttacccatcagcccatttgaaaaagaaaaaaaaaagcctcctgttagaattaaatcccctctggagataatgagtattttttaaatctttcattttttttatatagtcatgtttgctcccagttcctgcca

SEQ ID NO: 41968 - DNA, 1626 bp, Homo sapiens
aataaccaagatctcctgcaggtgcctttgccttggctttgtgagcctggagttgctggctggcactgggcagcaggcagcagagctggtcccatttctccatgctttactcactctttgggggacacaggcacattgaacaacctgggtcctggcctggcgctggctgggaagctatttgatgtcaggctgaatgtgggcttctgagttgaaaagagagtatgggtcaccctgccccacttactcattttaccaagaatgaaaatggggatctattccagacatgatagtatacattgtaagtctgtgcaagcttgctgcacttgtatccactcagcacacacttactgagtgtcaagtgtctccagcatgaaaggcgctctagttcccggggtcccaccctccacagaggacagcagcaccttgagggacggaggtgcaaagagcaaggtgggggctcttctgctggagaggcagctagggagggtccttagaagaagtgacagctgagttcttctctgaagggtgaagctgaattacttgaagcttagggtgaaggggtgtccagggaagtggagcctgtgagccaaaagcataatgacttgtccagagaagtgtaacaagttccatattgtttctatgccaaatctgcacaagagtcgccacaggaaagagcaggatcctggagccagggccttggatttcatctgctggcaatggaaatgttcactgggaattttggggggcaaaacgtgaaaatgtttcctcttagctccaattctctgtctctctgtctctttctgtccctctctctctcctttatctttaatttttgtattatcctaagaaaacacagatgtctcagacatggggattagcagcctgcctctttctggatgacttcaggggagcacttcagcctctgtgagcttatttacaataattcacaaatcttgccaaaaaaaaaagtcatggtagcagaggttagaaaatctcctagtgtttcttctgacactttgaatttatgattaatatgtttaatcttcatcttctgaaaagtcaccagttacacagtcaggaccataaagggagtctgtttctgtggtttgtggcttcaacagtcaaaggttttgcagcaacagcattgcatgtgggttttaggctgatgatgctcaacagtggacaattctcttcacctgcctgggccccactgcccgcccttccaaacagtgcagggtcacagctgagctctctragacacctcacaggatctcagcttctaaactatcaagtgtcttctaggtgaaggcttggtctcatagcctttgtggtttcctccaggtaacacttggttttctgacctaaccctggtatatgtgtgacacatgtgtgaatgtgctccctgtggcagcgctgaggaaggactcagtcatcacagatgctgaaaggcaaatgcagtgtgcttttttccaacatctccagtcttgtattatttttacccatcagcccatttgaaaaagaaaaaaaaaagcctcctgttagaattaaatcccctctggagataatgagtattttttaaatctttcattttttttatatagtcatgtttgctcccagttcctgcca

SEQ ID NO: 41969 - DNA, 1626 bp, Homo sapiens
aataaccaagatctcctgcaggtgcctttgccttggctttgtgagcctggagttgctggctggcactgggcagcaggcagcagagctggtcccatttctccatgctttactcactctttgggggacacaggcacattgaacaacctgggtcctggcctggcgctggctgggaagctatttgatgtcaggctgaatgtgggcttctgagttgaaaagagagtatgggtcaccctgccccacttactcattttaccaagaatgaaaatggggatctattccagacatgatagtatacattgtaagtctgtgcaagcttgctgcacttgtatccactcagcacacacttactgagtgtcaagtgtctccagcatgaaaggcgctctagttcccggggtcccaccctccacagaggacagcagcaccttgagggacggaggtgcaaagagcaaggtgggggctcttctgctggagaggcagctagggagggtccttagaagaagtgacagctgagttcttctctgaagggtgaagctgaattacttgaagcttagggtgaaggggtgtccagggaagtggagcctgtgagccaaaagcataatgacttgtccagagaagtgtaacaagttccatattgtttctatgccaaatctgcacaagagtcgccacaggaaagagcaggatcctggagccagggccttggatttcatctgctggcaatggaaatgttcactgggaattttggggggcaaaacgtgaaaatgtttcctcttagctccaattctctgtctctctgtctctttctgtccctctctctctcctttatctttaatttttgtattatcctaagaaaacacagatgtctcagacatggggattagcagcctgcctctttctggatgacttcaggggagcacttcagcctctgtgagcttatttacaataattcacaaatcttgccaaaaaaaaaagtcatggtagcagaggttagaaaatctcctagtgtttcttctgacactttgaatttatgattaatatgtttaatcttcatcttctgaaaagtcaccagttacacagtcaggaccataaagggagtctgtttctgtggtttgtggcttcaacagtcaaaggttttgcagcaacagcattgcatgtgggttttaggctgatgatgctcaacagtggacaattctcttcacctgcctgggccccactgcccgcccttccaaacagtgcagggtcacagctgagctctctgagacacctcacaggatctcagcttctaaactatcaagtgtcttctaggtgaaggcttggtytcatagcctttgtggtttcctccaggtaacacttggttttctgacctaaccctggtatatgtgtgacacatgtgtgaatgtgctccctgtggcagcgctgaggaaggactcagtcatcacagatgctgaaaggcaaatgcagtgtgcttttttccaacatctccagtcttgtattatttttacccatcagcccatttgaaaaagaaaaaaaaaagcctcctgttagaattaaatcccctctggagataatgagtattttttaaatctttcattttttttatatagtcatgtttgctcccagttcctgcca

SEQ ID NO: 41970 - DNA, 529 bp, Homo sapiens
aatagctcattcacaaaaaagtcacacacacacacacacacacacacggtaaagactatatcaaatgtgaatttacgtatgcctctgtatgtttgccaggatgaagaagtagagaggaagagattaaggaaatttcagaaggacagatgcacaagaagataatactctcaagtaattttattgaaaaacatcaattacctaggagggaaagactgggcatctcccaaagtctacagaaccattctaaaagagagagtaaagtaattgaaaatgtacatgcagccatgtgaattctcaaaagaatatctaatgaaatatttttctttgggcacaactagggaatagcatatttccctgaaattgatactaaatagaaacaagatgtctgataacaatgtatatatagctcagaatgctttcattctcaaagtatyatcaagtaagagattgtggtgctgtgtgcaatatggaaaatgacaacagatatgacatggctagaaagtaagaagactatctcccttaagccaca

SEQ ID NO: 41971 - DNA, 599 bp, Homo sapiens
caagtagtgatggtccctggcttgcaaacatgttgctcttccaggttccaagggaggctgttgttcaaccggtatttacctatgtagcaagttctgggttcggaaccctacttctctcaggaggcaggaaggatggaaggacatccctcctgcagctgaagacggcagagccccagccactgctggcagtggccgtggacacacagtgcagtgtctgagcagtgtgtgaagagactcccttactgtctgaagggcttcactcaccctacactagtgagaagcctctgaatattgtcwtggaagggaagcattcacatattaagggtaaaatcaaagtcagagcaaaatttaaagtctgctctttgcccctcaagaccctgaaagtccccagtgactgtcattccactcacctcctctcccattcactgctccccagccccatggcctcttattagtctttctgggcagcaggctccccttgcctcttgcatgctgtgccctctgcctcgcatacttagatgtatatgcagaagtggtttctaaactcctctctctcatcatgtgtgtgggctgtgatacccaaccatcagtaacagcag

SEQ ID NO: 41972 - DNA, 629 bp, Homo sapiens
tgtatttgagcacagaagttgagaatttactagtctgggagactcagtaaaaagtgaaagaaagcattctacagagaggacagtgtagtgaatatcaaccaaggtgggggtggggacagaattgctgatggtgagtggggtggggagggtctgggagaagccctcactttagagaatacctactccttctaactatattcggcccaggttatagttaggaattttgcaaaattaagaatctaatattgaaggtgtaagtggagtttgttttgctaayttcagctgaagagaaaatttagaaaggacgaggactgtttctatatagctaaaagagccaaaggcttctttttaatattccccatctctccgcaggagacaatcgtttcccactcgagtagacttccagcgggatacaaagagcgccagactcctggtttcatccctgagtccctttgggggtgggggagagtctgctctagccatcctttcccgagacactcccctcttccctgattcacagtctgagcctcattgtcactgcaggctggaggcccagctgtcctgacttccaagtagctcacaacagctttcttggcaactcttgatgggagcccaaaaactaggattgc

SEQ ID NO: 41973 - DNA, 546 bp, Homo sapiens
cctgccagcagcaagtttggcaaaacattccttgcacgcttctctggggcaggagcagtccaagagctccacaagaccccaggctccctgtgagtccagggaaaagtcagggactctgaggaatggggtttgcaatgtctgaatcatattgtgtgcttggaggctgtggacaagcggtctttgtattggatcacaggctttgaattgatttcctgggctgggttcaaatgctgaatctgtagattgaaactctgggaccttgggcaagaggtttaactttacttagcacagttcctagcacttagcaagctctgggctcatggcgaagggcataaagaaacacattcaraaagcccaaggtcacacagcaagttaagaacgatcccaacttctaggcgaagatttttcccggagcacagctgtaaattataaggctcagtcctgagggggatttatcttgatagattctgacttgggtagtgatgtcaagggaggagaagagagaggaatgaaggaggtcccttttattattgatgtcaagagtca

SEQ ID NO: 41974 - DNA, 543 bp, Homo sapiens
tgccggcctggggctccctgggcacgggactctcctgcaccagctcactggtagcacagacacgcatgggaagggacccatccccaattcactgtgatgagtgcccctaaaacgacccagcccgtgcggttctgcggggtcacaggtacagcctcctggggtccccgaggacaggggagcctgcagtgtgcagaactggccaccaggtggcagcaacaccgtctccccaggggttactttgttacaacttcgggaggatggaagggagcaggtggttgcaaggaagcagccccagagagctggaaggaggrtactctgccctgtgaaccacatcaggggacgtccagtgaatcccagcagacccagaagccagacccccaagtatgcctgtccaatctctgccctacagcccagcattttcccccaacccgtttctctccccaaccaggtttaaggaagctttgcaaattcctcaggacctgcaagtttctgagaacgaaattttgtgtttttattcaacgagtctaaaatacatcctgccag

SEQ ID NO: 41975 - DNA, 508 bp, Homo sapiens
ctgtgtgtgtgcgcatgtgtgtgtgagagagagagagagggaaagagagaaatggagggagggagagagagaaaggaagatcatctcttcaagccaggctcttagaaaaagagcatcaaaaatattttgtgaggaatttcctgagttccacatctttaactcttggaatagaggcagaaggagattgtaattaaaattggtagtggggcgggggaagcatcattatatacagaatttctaaatgcctggaagtgatcttacgaagacaaattggttttccaaccccaccccagctataaaaagttataattgagtcatcagcaccctgctgaactaggagtctggattgtttttaggtrgatgaatgaacttgagaaaattcttctctccaggccgcgatttcccttagttttcaaactgcatcctaaagagtgcggggcttcagctgagaagcctcatggatggtggtctgtccccactcccccactcctgccattcaggcaggagg

SEQ ID NO: 41976 - DNA, 508 bp, Homo sapiens
ctgtgtgtgtgcgcatgtgtgtgtgagagagagagagagggaaagagagaaatggagggagggagagagagaaaggaagatcatctcttcaagccaggctcttagaaaaagagcatcaaaaatattttgtgaggaatttcctgagttccacatctttaactcttggaatagaggcagaaggagattgtaattaaaattggtagtggggcgggggaagcatcattatatacagaatttctaaatgcctggaagtgatcttacgaagacaaattggttttccaaccccaccccagctataaaaagttataattgagtcatcagcaccctgctgaactaggagtctggattgtttttaggtagatgaatgaacttgagaaaattcttctctccaggccgsgatttcccttagttttcaaactgcatcctaaagagtgcggggcttcagctgagaagcctcatggatggtggtctgtccccactcccccactcctgccattcaggcaggagg

SEQ ID NO: 41977 - DNA, 590 bp, Homo sapiens
caggcagagctgaagtggccccagggagggcctgtgtggaggagggcctgcacgccagcctcaggacccagggcatgagggtgccctgcttggaggctccggcagggtcaggcggcccggtgacccctgactaggccccagctgccggcatgcccttggcgggctctgtgcttgtgccctaggcctggccccagcctctgcctcctggcagggatgcatcttgccatccccttctgcctcccccagccccataggctctagagaaactcccaaaagatgccccagayccagagcaggccccaaaatgccatgagggcacgtgggggtaccaagccctctgagccagtgccccgccagttgccctcacctctgtctggggatccccagcagggctcaccactgcagagaccccagctgggggtgggaggagctccccaagccccacccctgcagtccacaccaacacagacccctccatgtgtttgggccagagggcctcaaccatgatgggacacttcctccttgccaggcctgtgtctcccaaatgcttgaggctttagagagccgggcccaccttctgcttgaagtgg

SEQ ID NO: 41978 - DNA, 1030 bp, Homo sapiens
catgaaggtaaaacaaacactttaagccctctgatagtggtgctagtttaggtcttgccctattttatatacaatacatgtcaattctagtcatccagtggttgggtggttttccagttgttttccttagaagcctctgaccaatcatccaagccatttaccatcattcatgagtttgtatgtattcttctcttgggccacttctctttccacacaaagtagatgatcaaatgcattgcctgaaactgcccactgggaccaatttcccttgctgctatcatttagggccaccctgagaagagctgcagagcagcagttttgcaattcctgcttgcacttacctactgaattgacaaaaccaaacttgagggttttctttttttctctttaagctgactataagagactccttggacaaacatagggataaattcagggagaggtgctggtgcaatattagtgaataatatgggggtctgggctacctgcttgttcccttaggccctacttgtgcacaattctcaacgtaccacttccatcttgtagattgctgctgggcctgctcaaactcatgactttcaggatctaatagaactactcgaaatgggctatttcaagtasttctattactcatttggtcacctcccaggaactttgtgtaaaacttcattgcagatgaacttacattgtaattctcctattggagcttgccacaaaacatctttgtgagtcaccaatacctcttaccagaaggtcttctgcttagtatcaaccaagtggctgtggggccacttgccccactgcctggacctgcagggtcctttcctgctctaatatctgctcaaagtcagcagactttcatgttagtcagtatatgggttgcagcagtattcctaagtatggaatatgctacctcagcatccaaagaggcctaccaggcattgtgcttctttcttagtggtgggaggtacaaggtgcaatattttgtcctttaatttgcaggggatggaaaatcatgccccagacctct

SEQ ID NO: 41979 - DNA, 1030 bp, Homo sapiens
catgaaggtaaaacaaacactttaagccctctgatagtggtgctagtttaggtcttgccctattttatatacaatacatgtcaattctagtcatccagtggttgggtggttttccagttgttttccttagaagcctctgaccaatcatccaagccatttaccatcattcatgagtttgtatgtattcttctcttgggccacttctctttccacacaaagtagatgatcaaatgcattgcctgaaactgcccactgggaccaatttcccttgctgctatcatttagggccaccctgagaagagctgcagagcagcagttttgcaattcctgcttgcacttacctactgaattgacaaaaccaaacttgagggttttctttttttctctttaagctgactataagagactccttggacaaacatagggataaattcagggagaggtgctggtgcaatattagtgaataatatgggggtctgggctacctgcttgttcccttaggccctacttgtgcacaattctcaacgtaccacttccatcttgtagattgctgctgggcctgctcaaactcatgactttcaggatctaatagaactactcgaaatgggctatttcaagtagttctattactcatttggtcacctcccaggaactttgtgtaaaacttcattgcagrtgaacttacattgtaattctcctattggagcttgccacaaaacatctttgtgagtcaccaatacctcttaccagaaggtcttctgcttagtatcaaccaagtggctgtggggccacttgccccactgcctggacctgcagggtcctttcctgctctaatatctgctcaaagtcagcagactttcatgttagtcagtatatgggttgcagcagtattcctaagtatggaatatgctacctcagcatccaaagaggcctaccaggcattgtgcttctttcttagtggtgggaggtacaaggtgcaatattttgtcctttaatttgcaggggatggaaaatcatgccccagacctct

SEQ ID NO: 41980 - DNA, 1214 bp, Homo sapiens
ccgtacctccttgctcaccagccaggctcgacctrctgccctgtggggcaggtcaggctttttccacagctccctctctgggaggagggtccttccaagtgagggtgtggtgtagctggagaatccctctttctaggggatttaaataagcagccccagccggacgcggtggttcacgcctgtactcccagcactttggggggccgaggcgcacagatcacgaggtcaggagtttgagaccagcctggccaacatagtgaaaccccatctctactaaaaaaaacaatacaaaaagttagctgggcatggtggcaggtgcctgtaatcccagctacctgggaggctgaggcaggagaatggcttgaacccggaaggcagaggttgcagtgagctgagattgcaccactgcactccagcccaggtgacagtgcaagactctgtcgcaaaaaaaaaaaaaaaaaaaaaaaaaaaaattaaataagtaaataaataagcagccgcatgacccatgctgaggaccctctgcctcacgttggtggccacgtgtggtggctgcacgctgggtgcctggggatggctgtgtccccgagtcagccccagaagtgcctacgcctctaggacagctcagaagtgctgacaggtcgtggcctctcaggatgggctctgggttgcagcttcatgcctggagtggctcatgtttgggggcaaggtcatgggcgtttaagagcagcgactggccaagaacatgatctgtatcagcagcagcttttgagaatctgatgaaatccccagagccccagaagggcaccggtgtgttccagctggtgcacgttcacagggcttgtctcctcagagcgtttatggggaaaaagatggaaatgttcaagcccagtccgtactgagaagcaaatcgaacttcatacacttggtagacattttcagtggaaaaatattaacattttatggaattcttactctgctacgtccctagccaagctgtttgtatgcatgaccttggttaaacctcagttgcctctagacccccatttcataggcaaggaagctgggagagggtccccccatttcataggcaaggaaactcggagagggtccccccatttcataggcaaggaagctcggagagggtctcccatttcataggcaaggaagctgggagagggtccccccatttcataggcaaggaagctcggaga

SEQ ID NO: 41981 - DNA, 1214 bp, Homo sapiens
ccgtacctccttgctcaccagccaggctcgacctactgccctgtggggcaggtcaggctttttccacagctccctctctgggaggagggtcctyccaagtgagggtgtggtgtagctggagaatccctctttctaggggatttaaataagcagccccagccggacgcggtggttcacgcctgtactcccagcactttggggggccgaggcgcacagatcacgaggtcaggagtttgagaccagcctggccaacatagtgaaaccccatctctactaaaaaaaacaatacaaaaagttagctgggcatggtggcaggtgcctgtaatcccagctacctgggaggctgaggcaggagaatggcttgaacccggaaggcagaggttgcagtgagctgagattgcaccactgcactccagcccaggtgacagtgcaagactctgtcgcaaaaaaaaaaaaaaaaaaaaaaaaaaaaattaaataagtaaataaataagcagccgcatgacccatgctgaggaccctctgcctcacgttggtggccacgtgtggtggctgcacgctgggtgcctggggatggctgtgtccccgagtcagccccagaagtgcctacgcctctaggacagctcagaagtgctgacaggtcgtggcctctcaggatgggctctgggttgcagcttcatgcctggagtggctcatgtttgggggcaaggtcatgggcgtttaagagcagcgactggccaagaacatgatctgtatcagcagcagcttttgagaatctgatgaaatccccagagccccagaagggcaccggtgtgttccagctggtgcacgttcacagggcttgtctcctcagagcgtttatggggaaaaagatggaaatgttcaagcccagtccgtactgagaagcaaatcgaacttcatacacttggtagacattttcagtggaaaaatattaacattttatggaattcttactctgctacgtccctagccaagctgtttgtatgcatgaccttggttaaacctcagttgcctctagacccccatttcataggcaaggaagctgggagagggtccccccatttcataggcaaggaaactcggagagggtccccccatttcataggcaaggaagctcggagagggtctcccatttcataggcaaggaagctgggagagggtccccccatttcataggcaaggaagctcggaga

SEQ ID NO: 41982 - DNA, 1214 bp, Homo sapiens
ccgtacctccttgctcaccagccaggctcgacctactgccctgtggggcaggtcaggctttttccacagctccctctctgggaggagggtccttccaagtgagggtgtggtgtagctggagaatccctctttctaggggatttaaataagcagccccagccggacgcggtggttcaygcctgtactcccagcactttggggggccgaggcgcacagatcacgaggtcaggagtttgagaccagcctggccaacatagtgaaaccccatctctactaaaaaaaacaatacaaaaagttagctgggcatggtggcaggtgcctgtaatcccagctacctgggaggctgaggcaggagaatggcttgaacccggaaggcagaggttgcagtgagctgagattgcaccactgcactccagcccaggtgacagtgcaagactctgtcgcaaaaaaaaaaaaaaaaaaaaaaaaaaaaattaaataagtaaataaataagcagccgcatgacccatgctgaggaccctctgcctcacgttggtggccacgtgtggtggctgcacgctgggtgcctggggatggctgtgtccccgagtcagccccagaagtgcctacgcctctaggacagctcagaagtgctgacaggtcgtggcctctcaggatgggctctgggttgcagcttcatgcctggagtggctcatgtttgggggcaaggtcatgggcgtttaagagcagcgactggccaagaacatgatctgtatcagcagcagcttttgagaatctgatgaaatccccagagccccagaagggcaccggtgtgttccagctggtgcacgttcacagggcttgtctcctcagagcgtttatggggaaaaagatggaaatgttcaagcccagtccgtactgagaagcaaatcgaacttcatacacttggtagacattttcagtggaaaaatattaacattttatggaattcttactctgctacgtccctagccaagctgtttgtatgcatgaccttggttaaacctcagttgcctctagacccccatttcataggcaaggaagctgggagagggtccccccatttcataggcaaggaaactcggagagggtccccccatttcataggcaaggaagctcggagagggtctcccatttcataggcaaggaagctgggagagggtccccccatttcataggcaaggaagctcggaga

SEQ ID NO: 41983 - DNA, 1214 bp, Homo sapiens
ccgtacctccttgctcaccagccaggctcgacctactgccctgtggggcaggtcaggctttttccacagctccctctctgggaggagggtccttccaagtgagggtgtggtgtagctggagaatccctctttctaggggatttaaataagcagccccagccggacgcggtggttcacgcctgtactcccagcactttggggggccgaggcgcacagatcacgaggtcaggagtttgagaccagcctggccaacatagtgaaaccccatctctactaaaaaaaacaatacaaaaakttagctgggcatggtggcaggtgcctgtaatcccagctacctgggaggctgaggcaggagaatggcttgaacccggaaggcagaggttgcagtgagctgagattgcaccactgcactccagcccaggtgacagtgcaagactctgtcgcaaaaaaaaaaaaaaaaaaaaaaaaaaaaattaaataagtaaataaataagcagccgcatgacccatgctgaggaccctctgcctcacgttggtggccacgtgtggtggctgcacgctgggtgcctggggatggctgtgtccccgagtcagccccagaagtgcctacgcctctaggacagctcagaagtgctgacaggtcgtggcctctcaggatgggctctgggttgcagcttcatgcctggagtggctcatgtttgggggcaaggtcatgggcgtttaagagcagcgactggccaagaacatgatctgtatcagcagcagcttttgagaatctgatgaaatccccagagccccagaagggcaccggtgtgttccagctggtgcacgttcacagggcttgtctcctcagagcgtttatggggaaaaagatggaaatgttcaagcccagtccgtactgagaagcaaatcgaacttcatacacttggtagacattttcagtggaaaaatattaacattttatggaattcttactctgctacgtccctagccaagctgtttgtatgcatgaccttggttaaacctcagttgcctctagacccccatttcataggcaaggaagctgggagagggtccccccatttcataggcaaggaaactcggagagggtccccccatttcataggcaaggaagctcggagagggtctcccatttcataggcaaggaagctgggagagggtccccccatttcataggcaaggaagctcggaga

SEQ ID NO: 41984 - DNA, 2136 bp, Homo sapiens
atcctgatggggccaggtgcggtggctcacacctgtaatcctggcactttgggaggccgaggcaggcggatcacctaaggtcaggagttcgagaccagcctggccaatatggtgaaaccccatctctactaaaataaaaatattagccgagcgtggtggcgtgcacctgcaatcccagctactcaggaggttgagacaggagaattgcttgaacccgggaggcagaggttgccgtgagctgagatcgtgccactgcactccagcctaggtgacagagtgagactccgtctcaaaaaaaaaaaaaaaaaaaaaagaaaggatcgtgatgcccttcttgttttccttgccatggcgatgaccccatactcgaactgtattaactcaggaagttcacaggaggacgctgagcccattatctcccttctacaggtggagaaactgaggcagggaggcatctggtgagccaccctgccctgctcactcacagcgggtgcccctccagtacccaccagtgggaagaaagcctctcacatacgtgctcaggccaagagtctgagaccccgcctgcccccctcactcgcctgtagggggtgagggttctttggrgaccgtagcctgcggcttcggtcttcagttcctgaggtcatgtagagggaatgggtgtccagaacggtccctgacagagtatagggagagagagaaacacaccgacgtcctcgccccaaaagaggtttcagagacaattaccgataaatcagaacgacgcgcctggtatgaattcagctgattaaggcggttaaattgtttttcccttgccaaagggttgcccgattaacaactaaacaagcaatttgttgcacctaaaatacctattttctgatttattggcaaggagagtggagcctcgcgcagcccacccacgaggaggcggagggccaggaacgcaaggcccaggaaggcggaggcggggggcgttcctggcaggatcatgcacagggcagaggggccagaagcctctgagccgatggcccctggggccctggctggaagtggtggcaggtgaaggccagacaaggtgcaggatgggggtgcctggatggcctggtcttggtttcagctccgtgggtgagaagcaccatgacaggatactggatttggaggatccgtttcctccgccttgaaacacagctttcggggttgactgttgctcccaggagtcatgagcatccggcatgagcacgagcgtgaacccgctttcaagctgtaaagctcccagcacagctgagccttggaaaaattcaggagaggcagagaaatcctggcagctgggaaacagccccgccaaggccgccccctctcgcggatgcccagcagcagaggggatgagagcctggaggggcaggtcaggggagaggctggttctcttgctttccttccaacgagaaaaggggtgactgtccctcagccaggctccctggcctggggcagcatccacatttcatcactgcccccggttgagacccccccagccccgctccctcctggccctgtagaacttggtgcacacctggccaacgatggatgcatttcccactcgctgacaaagacaagactcagtgcctgccctggaggggtagtgtggagcatggggcgacaccagtgcccagggccaggaaatgtccctaaacccccaggaggcccgaggaggggatgcgcccatccagaccctccaggaggtttgtggcctctgaagtcagtccgctccttcactgtcaccagggcctgttcctgaggcagggctgctgcccaccctcccaccaccaagaggtcccagatgctgagctgggtctgcaaagtccagcccttccccactttcagctacttgtgtgacctcttgtttcaaggatgggagcccgtggaatggccactggcagcccccacagctacgccctctcttcgtcatggagccacaaccaggagctgtcaccaggggcgcgtggaggtggctgcagtacgggagaggggacgtcgcggctgctttctgcgcctcttggctggtggttgcagagcactgcccctgtctgggagaaacacggtgtcccccacttttattgggtgtcactgtgcctgagtcct

SEQ ID NO: 41985 - DNA, 2136 bp, Homo sapiens
atcctgatggggccaggtgcggtggctcacacctgtaatcctggcactttgggaggccgaggcaggcggatcacctaaggtcaggagttcgagaccagcctggccaatatggtgaaaccccatctctactaaaataaaaatattagccgagcgtggtggcgtgcacctgcaatcccagctactcaggaggttgagacaggagaattgcttgaacccgggaggcagaggttgccgtgagctgagatcgtgccactgcactccagcctaggtgacagagtgagactccgtctcaaaaaaaaaaaaaaaaaaaaaagaaaggatcgtgatgcccttcttgttttccttgccatggcgatgaccccatactcgaactgtattaactcaggaagttcacaggaggacgctgagcccattatctcccttctacaggtggagaaactgaggcagggaggcatctggtgagccaccctgccctgctcactcacagcgggtgcccctccagtacccaccagtgggaagaaagcctctcacatacgtgctcaggccaagagtctgagaccccgcctgcccccctcactcgcctgtagggggtgagggttctttggggaccgtagcctgyggcttcggtcttcagttcctgaggtcatgtagagggaatgggtgtccagaacggtccctgacagagtatagggagagagagaaacacaccgacgtcctcgccccaaaagaggtttcagagacaattaccgataaatcagaacgacgcgcctggtatgaattcagctgattaaggcggttaaattgtttttcccttgccaaagggttgcccgattaacaactaaacaagcaatttgttgcacctaaaatacctattttctgatttattggcaaggagagtggagcctcgcgcagcccacccacgaggaggcggagggccaggaacgcaaggcccaggaaggcggaggcggggggcgttcctggcaggatcatgcacagggcagaggggccagaagcctctgagccgatggcccctggggccctggctggaagtggtggcaggtgaaggccagacaaggtgcaggatgggggtgcctggatggcctggtcttggtttcagctccgtgggtgagaagcaccatgacaggatactggatttggaggatccgtttcctccgccttgaaacacagctttcggggttgactgttgctcccaggagtcatgagcatccggcatgagcacgagcgtgaacccgctttcaagctgtaaagctcccagcacagctgagccttggaaaaattcaggagaggcagagaaatcctggcagctgggaaacagccccgccaaggccgccccctctcgcggatgcccagcagcagaggggatgagagcctggaggggcaggtcaggggagaggctggttctcttgctttccttccaacgagaaaaggggtgactgtccctcagccaggctccctggcctggggcagcatccacatttcatcactgcccccggttgagacccccccagccccgctccctcctggccctgtagaacttggtgcacacctggccaacgatggatgcatttcccactcgctgacaaagacaagactcagtgcctgccctggaggggtagtgtggagcatggggcgacaccagtgcccagggccaggaaatgtccctaaacccccaggaggcccgaggaggggatgcgcccatccagaccctccaggaggtttgtggcctctgaagtcagtccgctccttcactgtcaccagggcctgttcctgaggcagggctgctgcccaccctcccaccaccaagaggtcccagatgctgagctgggtctgcaaagtccagcccttccccactttcagctacttgtgtgacctcttgtttcaaggatgggagcccgtggaatggccactggcagcccccacagctacgccctctcttcgtcatggagccacaaccaggagctgtcaccaggggcgcgtggaggtggctgcagtacgggagaggggacgtcgcggctgctttctgcgcctcttggctggtggttgcagagcactgcccctgtctgggagaaacacggtgtcccccacttttattgggtgtcactgtgcctgagtcct

SEQ ID NO: 41986 - DNA, 522 bp, Homo sapiens
tgacagctgttggagacaaccatctccctgaagcctcaacatccacattgcttgacttggttaaaatctgtgacctcaacacagcatgaatrcagcttaaaaaaaaagtcatgcctctgtgtgtttcattttatgtactcaaaaagcaggtagaatgcagaaaagtggagcttcagcctctgcaggaaaatggcaatggaaacacaaccatggaattgtcccagcaggaagagactctggctgcccaaggagtgacatcaagatattggtggaaattccagacaacacctggtttgatctattatttacattcccacgtaatttttacatcttttctggattttaaaattatctctgccaactacccattcctccgctttgctatcaaatgtcgccttgcttatcaagttactccctacaaagtagggaaaacaagtatgtcacagagcagtagccatagacaaaaaacaaacaatagcaaaaaccaaggtaggtgttttaatctagtagaacataatacag

SEQ ID NO: 41987 - DNA, 615 bp, Homo sapiens
tacctgcctttagacatgctatccagttgctcagccaatgctttttwaattaaatacaatagagttcccttgcaaggaggaaagttagaattgaggagactgcttatgaccatgagatgaaatacacagaggctgtatcacacatatagcactgttttaagggcacaggctatggagctgtacttcctgcgttcaattcttgtctctgccatctattgggtgctactttaaacaagtcacctaatctctttaagcctccattttgtcagtgataaaatgaggctaatgaaagtacccacctcctagggttgttatgaggtttaaatgagataagtaaaacacttgagaagaggaaattttttattcatctctctccaatacagtacactttcagaaaggaggtctctaatcctcacccaagccctcaactttcttctctccataccagcctgcctaccccacccagactcattcacaccctgtcagaatgccccctagagcctgcactcttaatcattacactccattgctgaactgggaagcaagggaggctaaaggcatgaaacccaggggtgcatttgctggtagtctagatgttagctgatggagcctgga

SEQ ID NO: 41988 - DNA, 569 bp, Homo sapiens
agcaaggagaagtgtcatttcctacccgttctggcaatgccacaacagcttctcttgcaatcattcacaggcatggtaagaagtgagagtcacaaagagaggagaggtcaccactcacaccaatgggaaaatcctgggccaacaagccagtgtctgcctcttaaatggaaatggtcctagtggtcagaaggagtccacatgtrtcccacaagcatctaactcattcctggagaaaactgggctcagtatttaagggaacttttttgtttttgaatcaagctgagagaaaatattatttattctttctgtagagatttataacctttatatacaggtaaatagaatgtccttggacaatgattttttgacaatactcacctttccaaagattgaaatgaagcttctctgaaaatgtgtttttttaaaccagaatttctcactgggaggtttttaatagcaagcattaatgctggaatggtaatttataaattatacttagtatttgaaagcccagtgcccaaataatgatgccactaagcagcacatctaaaataatccccagaactcac

SEQ ID NO: 41989 - DNA, 545 bp, Homo sapiens
agggttactttgaaaagcctagtgtgccatgctgagaatgatggactttatgaagcaatggaggagcttttaaatgtgttttcaataagaaattgtcatggacaaatcagcattgaattcagatctcattaaaaacgtgtccaaaggataactcgacagtaaacatatctcgaaagtacccatggctgtaaaaaaggcgaagtatttctttctccatttaatttaccctcccctgggtgattggtttgtggttaggccgtttgtccagctgcagcagactggttttacaccctgaagtaaacttgaatttctttttttttttttgagacggagtctcgctctgtcacccaggctggatggagtgcagcggtgcgatctcggctcactgcaacctccgcctcccaggtttaagcgattctcctacctcagtytcccaggtagctgggattacaggtgcccgccatcacgccgggctaattttcgtatttttagtagagatgggatttcaccatgttggccaggttggtctcgaactcctgacctca

SEQ ID NO: 41990 - DNA, 595 bp, Homo sapiens
ttctgccgtttgaagcaacatggatggaatgggacaccactatgttgagtgaaatgagtcagacacagaaaaataaataccgcatttctcagcgttacttctagaagtaaatagtagagtagtggtgatgagatgccaggaatgagagaaggctgagataagaagaggtttgttaacaaacacacaattacaggtagacaggagggatgtgctctagtgttctacagcacagtagggtgactacagttaacaatatattgtacgttttctgtttacaagaagccagaagagagaattttctatgctaccaacacaaataaatgttagtgtctgaactgacgaatttgctcattgttctgattttggtcataccaagtggcacacatgtattcaaatatcacactgtatcccataaacataagcagttattatgtgccaamtttgaaaaatcctttaattaaaaagaattatattggcgtacattacaaatgattcaacacagagacaggaataaataccatttttctttgaaatagttaattaactaacaatgtagttacattcatttgcaccaaatcgtgtatttgataatggt

SEQ ID NO: 41991 - DNA, 514 bp, Homo sapiens
aaccagccctattgttagttgtctgtataagtttttcagaatgtagttagcattgtgaccagaatttcatctggaaaagttaaccccttgctgcttgcagactggcagcacgggaatcactgggatctcagacccactgcagttctaccaagtcagaatctgaattttaacaagrtccctgggtgatttgtgtgcaccttgaaatttgagacatggtgcactaaaccatgtaatgatatattctgctgttatggtccaataagagattgtgattgtagagagggcaaatttagagggaaaatttgtttcagtctctgtgtacaatgagtgataaaaattttactactccttcggtaacatattttactcaaacttatctcaaaagttcacggtagttatcagataactcaatatattttcagctctgaaataaaatgtgcaataatatacatccaatatgtttatgaatttaaacaaccatggaattggaatgagtgatgagtagagaagaaag

SEQ ID NO: 41992 - DNA, 673 bp, Homo sapiens
gaggattcagctgttctctgccttcaattgtagggtcctcttgagctggctagaaggatgcccatgtgaatgagggcttctctatgattttaaagcttgatgaatgtgcttcaaatagactttgctaactgtcttttctaatggatctcctgatggctctacaattttactagcagtgatttattttttaatattttgcacttcaagctctgataaattcagtgttctttctaagcacttgtacaaattagattgcagtcagaggagttcagcatttttacatgttcaatacatcaagatctgataagcagctgttgcagctgtctgcttaccwctctggtcctcattgaaatctgccctactccacagccttccttggctggattgatcccaagaagaggttttcattactttatatctagaaatagccttcagcttgttctaatgatctccagtcaccaatttgaaagagtgcccttagatgtccaccagttacctcttgaacttcattcttccagccagagaacaaactgccccaaaaatgctgcagactggctgactcagcagtggtgctactgcctgctgataaagatgtgagtttaagaccatcagctaggaaagtggaaagcagtaggacatgaggtttcacacgggggtcagataagcctgggtt

SEQ ID NO: 41993 - DNA, 524 bp, Homo sapiens
gatttcggtaattgacttttcgtaggggttatgcaaggtggaaagggagcaaacagggaagaccagcaactttctggcttgagtcactggaggagctgatgtcattgaggcttgaaacatgactaggagataagatctgtgagtataattaaacttgagggtctgtgtggtaattgagtcagcaaygtgggtctggagagcaacctgggtgatggtgaaactgacggggttgagaaattgatggtgccatcaatcagcggaatgttggagctggagtcagggatttgcccctttgctgcagccaaagaagccctataattactgaaagccaggctgatggccctagaagtatcatagaggcttggcttgcggcaagccctacctctccaaatgtgctggctagagtatctcatccactgtttccactgccaccaccacaccctcttgttaaacttgatttaatatgtctcacgacaaaaagccccgagcacaaagttcataggcttttagtgggctaactgtct

SEQ ID NO: 41994 - DNA, 524 bp, Homo sapiens
gatttcggtaattgacttttcgtaggggttatgcaaggtggaaagggagcaaacagggaagaccagcaactttctggcttgagtcactggaggagctgatgtcattgaggcttgaaacatgactaggagataagatctgtgagtataattaaacttgagggtctgtgtggtaattgagtcagcaacgtgggtctggagagcaacctgggtgatggtgaaactgacggggttgagaaattgatggtgccatcaatcagcggaatgttggagctggagtcagggatttgcccctttgctgcagccaaagaagccctataattactgaaagccaggctgatggccctagaagtatcatagaggcttggcttgcsgcaagccctacctctccaaatgtgctggctagagtatctcatccactgtttccactgccaccaccacaccctcttgttaaacttgatttaatatgtctcacgacaaaaagccccgagcacaaagttcataggcttttagtgggctaactgtct

SEQ ID NO: 41995 - DNA, 1056 bp, Homo sapiens
atatttgtctcagaagattgaattgtggactgtgaccttctctcccaaaagtctctttcagggtagaacttctggttatggcaacatgaagagatagaccagcaagttttcctccaacagcaacatgaaaactgtactaaatactaaaaacaaacatttgaagtcactggaaaattaacaaaggcaagcaatatgtgataagagctttcttgtttaagactcctgtcttaggtaaggactgcaagttggtggcctttccttcttacctatgagtgctcttcagcctcccagcagataactgcagccctagtggctcaatatgggcagtttatagagttcagagcccaaatcagctagaaatgtaaatgagaatgttgaaagagagctgcagaagagttgagatcaacaatgtgaatgcaaattatgctcatccctagttgaacactaaactctgcatgggtgtgggccacttgggaatctggtgaaaaaccagaaagaaactagagggaggtctaccctccaaagagataaatgatcctggtgagatctgcaagtcttcagtaacatggactgagtrcatttgccaacctgcacagagctcagtagaagaaagcaaaaatcttactggcttgagaggtgaaaaggcaggatttgaggctaacaaaacaattggaaattcaaagagaattccagaaacaaagcaaccacaatgaagttgaatcacaaaatctgagtataaatgacccaaatacttggtcaacctctaaattacacagatgcaggacacacactcagaaacccctgctgaaaccacgtaagatactaagtggaaattctcaaacagaaaaaaaaagaaaatgaaagtattctggaagaggtccacagaagttttgagatggcagaataaagaacaagcctgtgactttgaatataaatctccagaatgtgctcaattctaaaatccaaaacacagattgaaataagattaaagaaaaaaatgaagagaacctcatgaacccatcagagaatataaagcaggtgaccagatatgcaagt

SEQ ID NO: 41996 - DNA, 1056 bp, Homo sapiens
atatttgtctcagaagattgaattgtggactgtgaccttctctcccaaaagtctctttcagggtagaacttctggttatggcaacatgaagagatagaccagcaagttttcctccaacagcaacatgaaaactgtactaaatactaaaaacaaacatttgaagtcactggaaaattaacaaaggcaagcaatatgtgataagagctttcttgtttaagactcctgtcttaggtaaggactgcaagttggtggcctttccttcttacctatgagtgctcttcagcctcccagcagataactgcagccctagtggctcaatatgggcagtttatagagttcagagcccaaatcagctagaaatgtaaatgagaatgttgaaagagagctgcagaagagttgagatcaacaatgtgaatgcaaattatgctcatccctagttgaacactaaactctgcatgggtgtgggccacttgggaatctggtgaaaaaccagaaagaaactagagggaggtctaccctccaaagagataaatgatcctggtgagatctgcaagtcttcagtaacatggactgagtacatttgccaacctgcacagagctcagtagaagaaagcaaaaatcttactggcttgagaggtgaaaaggcaggatttgaggctaacaaaacaattggaaattcaaagagaattccagaaacaaagcaaccacaatgaagttgaatcacaaaatctgagtataaatgacccaaatacttggtcaacctctaaattacacagatgcaggacacacacycagaaacccctgctgaaaccacgtaagatactaagtggaaattctcaaacagaaaaaaaaagaaaatgaaagtattctggaagaggtccacagaagttttgagatggcagaataaagaacaagcctgtgactttgaatataaatctccagaatgtgctcaattctaaaatccaaaacacagattgaaataagattaaagaaaaaaatgaagagaacctcatgaacccatcagagaatataaagcaggtgaccagatatgcaagt

SEQ ID NO: 41997 - DNA, 1056 bp, Homo sapiens
atatttgtctcagaagattgaattgtggactgtgaccttctctcccaaaagtctctttcagggtagaacttctggttatggcaacatgaagagatagaccagcaagttttcctccaacagcaacatgaaaactgtactaaatactaaaaacaaacatttgaagtcactggaaaattaacaaaggcaagcaatatgtgataagagctttcttgtttaagactcctgtcttaggtaaggactgcaagttggtggcctttccttcttacctatgagtgctcttcagcctcccagcagataactgcagccctagtggctcaatatgggcagtttatagagttcagagcccaaatcagctagaaatgtaaatgagaatgttgaaagagagctgcagaagagttgagatcaacaatgtgaatgcaaattatgctcatccctagttgaacactaaactctgcatgggtgtgggccacttgggaatctggtgaaaaaccagaaagaaactagagggaggtctaccctccaaagagataaatgatcctggtgagatctgcaagtcttcagtaacatggactgagtacatttgccaacctgcacagagctcagtagaagaaagcaaaaatcttactggcttgagaggtgaaaaggcaggatttgaggctaacaaaacaattggaaattcaaagagaattccagaaacaaagcaaccacaatgaagttgaatcacaaaatctgagtataaatgacccaaatacttggtcaacctctaaattacacagatgcaggacacacactcagaaacccctgctgaaaccacgtaagatactaagtggaaattctcaaacagaaaaaaaaagaaaatgaaagtattctggaagaggtccacagaagttttgagatggcagaataaagaacaagcctgtgactttgaatataaatctccagaatgtgctcaattctaaaatccaaaacacagattgaaataagattaaagaaaaaaatgaagagaacstcatgaacccatcagagaatataaagcaggtgaccagatatgcaagt

SEQ ID NO: 41998 - DNA, 1023 bp, Homo sapiens
gatccaccagcctcagcctcccaaagtgctggggttataggtgtgagccaccgcacccggccacaaattatattaattctaaaatggaaggaattgctaataatgctattagaatgtggtatgttaaaggtcagttgtctgcctccccagtcatcctgggttagcattatcttgatgaattcccgtggtctgatatagaaacctacctcaattttttaacatcagaaacttgatttgtctgtatgctaaaagtgattcctattaaatgagagttttgtttctaccagactaatttttatgtcgtaaaaaattattaacagattatgttagtttctttattcaatttattcatgtcataatttaaaatgattacttctttttatggttttcagttcattttaaaagccttattactccatttacaaagctagcaaattttcaatctctttaaaggaagcccttagtaactatctagaaccagttataaaccttgttaattaaactcattttaacattttaaactacattaatacctttatatactcaatttctttctacacatacttacatttatctaataaactttctcaagtattaagtwatacttataaaattaataaataaaacttttaaatggtttcttttaattttccttaaataatcaaatatcacatttatacttaattgtattcagtctacatacacatttctaaatcaactctcaattagacattttaaaatggtgttacaagcttgatctgttattctaacaaagtctttaatcattatggatgcttattatagcaaatacatgcatgttaattaatgtaaaaatagtaatatcacattgtggttgccttaaacatatctactattaattctaagtctccccagatataaaaaatgcttttccacaaaggaaacataccatctcacaacattttgggggttatatccctacataatttttggagctgccttctcagcttttcaatgatcagaggatagttgagcaatgagact

SEQ ID NO: 41999 - DNA, 475 bp, Homo sapiens
gggccttgacctaggcttctcttctgtgggtcatgactcctccctcctgatctgacggctccccagccaacactggcagccctgaaaggtgtttccagggctgtggtttctccacaccatcacagggtgcaggcctgggcacgctggtcgctcctaccctagtccctgccacgccctggctcctgtgtttatcctggagagaataagaagtggaggctggaggcccgggtgccttaagaggcttcacacacattctcagtgggccctgctcagggtgaggcrttagggtgggcaccaacaaggtgtgctcagcacagtcccatctccgcagagaagacagcctctgcaaagcagggagtccggtttctaaagctccagctaaccaagactggcacgaggttccactgcagtggttcgtaaggcactgccacaggagttcccctcaggactaagctcactgatgcccaagaggccc

SEQ ID NO: 42000 - DNA, 628 bp, Homo sapiens
tttcttttattgttgttatagtactattttctatattatataaagaacactttaaaataactacaaaaagatagcaagatgtacttggtacataatgtttccctgattttctgttttgataacttgatcaaaagaggaagcaagtctaatttgctgtaacttgtattttatggcttctgatcactaccgcattctacttgaagtgttcacaagttatctgttcaattacctatgctgagtgcctcccaaatttgatggcaagcaggttggtctaaattgatggtttccacctttttttcttttttgactgttgagaaagtatttacctataaatttaaactatcctgttgaaggaataacgtgactaataaagatacactatttatggggataaaatatgtagagtttgaaatgtaaatttgttgttattgttcttgcaaaagagcctagactgattccaaattcatttgagaattattcatttgatatcatgtaataatgcttcctattgtgtggtactaaatttaaactgaaagtacaaattgagagactaaatatgctcytttatcgcttgtgatacaagttttgcttctaaggagctctaacttgttgacaaagccaatgaatt

SEQ ID NO: 42001 - DNA, 715 bp, Homo sapiens
atatatattattaytatatataatatatataatatatattattattatatataatatatataatatataatatagtatacatatattatatattatataatatgtatatttacattatatattatatatattataaagataatatatataaaatatatacattctgcatcaaccccaagctttttagagggctccaccaaggcctggctgatggtacccccagcatgggacctgccaaggtgctgggtttgagagatgaggtggctaatcccagcaagttagaccatgtgttaaaatggttcatgtataaaaaacaattcctagacagagccattttgcacaccaagggtggaggaaaaagaagttacagttaaagccccactttctgttctgcaaatatcacacgcaccttcccccaggattcaaatgggctttagcagacatggaaccaacccatatgcccaagaaaatgtggtacatatacaccatggaatactatgcagccataaaaaggaaggaaatcgtgtcctttccagagatatagatgaagctggaagccatcatcctcagcgaactaacaagggaaagagaaaaccaaacgctgcatgttctcactcataaatgggagttgaacattgagaacacatgggcacagggaggggaacaacgcacaccagggcctgctggggggtgggggttgaggggagggaacata

SEQ ID NO: 42002 - DNA, 715 bp, Homo sapiens
atatatattattattatatatwatatatataatatatattattattatatataatatatataatatataatatagtatacatatattatatattatataatatgtatatttacattatatattatatatattataaagataatatatataaaatatatacattctgcatcaaccccaagctttttagagggctccaccaaggcctggctgatggtacccccagcatgggacctgccaaggtgctgggtttgagagatgaggtggctaatcccagcaagttagaccatgtgttaaaatggttcatgtataaaaaacaattcctagacagagccattttgcacaccaagggtggaggaaaaagaagttacagttaaagccccactttctgttctgcaaatatcacacgcaccttcccccaggattcaaatgggctttagcagacatggaaccaacccatatgcccaagaaaatgtggtacatatacaccatggaatactatgcagccataaaaaggaaggaaatcgtgtcctttccagagatatagatgaagctggaagccatcatcctcagcgaactaacaagggaaagagaaaaccaaacgctgcatgttctcactcataaatgggagttgaacattgagaacacatgggcacagggaggggaacaacgcacaccagggcctgctggggggtgggggttgaggggagggaacata

SEQ ID NO: 42003 - DNA, 1152 bp, Homo sapiens
aagcaaacaaattccctacaagactgccaaataaggcagccttcctcagctataccctggccttatcctatggttcaagtgtagcatattccagtaaatggaggcaccaggaaggggttaggggtgggaaggatgtagccccttcataatctccatcatcccccaaagctaccctagtaacacactactccagacaaaagcaatgtgcttgcctcactttcactctcatgcaacaaatatttattgcacagttactatttgccaggcaatgatcttagggagctggagacacagaagtgaattagaaaaagttcctactctcaccctagtagttcaggggagagataaatacataaataaactkagaaacaataatttcgggtagtgataagagctaggaagaaaaaagtagcttaatgaggagagggggatgggcatggctgggggaccactttggataaggtcttttggagggaggataccttctgcacagacctaaaggaaaaggagcaagccaggcaaggtggggggaagcgagtctcactcagaggcaggaatgaccttggaacagcacagagaccagaggctctgagtgtgacgcagaacaggaaggggagcggtgatgatgcaagaggagcaactttgagataagctcctaaaccatcttccaacaagactgtactccccattccccaccttacggtgtttcagggacacaagtgtctctagagccacctcagggtacagtgcaggagcaaaagtctgccatgtgaggaagaggagagggaaaggaaggggaggggaggagtgaaaacaagaagggaggagagaggaagagaagagtgagtccacggaaccctaaaggtcatctcctttccaggtcaaggcccagtccctttccaaccctaccccacccccagaaaagcttccatgccagtggaaagtacattcttaaactgatctcccctagaaaacagtgaatggcttttctggccaaagccccctgtctctcaatgaacagtttgttccagacactcaatcaaggctctgggatatcccaggcagtggtcaacaggacatatattccagaaagttctgaagcttgcttttcattagaattgacagtctcctgacagctgcatactaggcgaa

SEQ ID NO: 42004 - DNA, 1152 bp, Homo sapiens
aagcaaacaaattccctacaagactgccaaataaggcagccttcctcagctataccctggccttatcctatggttcaagtgtagcatattccagtaaatggaggcaccaggaaggggttaggggtgggaaggatgtagccccttcataatctccatcatcccccaaagctaccctagtaacacactactccagacaaaagcaatgtgcttgcctcactttcactctcatgcaacaaatatttattgcacagttactatttgccaggcaatgatcttagggagctggagacacagaagtgaattagaaaaagttcctactctcaccctagtagttcaggggagagataaatacataaataaactgagaaacaataatttcgggtagtgataagagctaggaagaaaaaagtagcttaatgaggagagggggatgggcatggctgggggaccactttggataaggtcttttggagggaggataccttctgcacagacctaaaggaaaaggagcaagccaggcaaggtggggggaagcgagtctcactcagaggcaggaatgaccttggaacagcacagagaccagaggctctgagtgtgacgcagaacaggaaggggagcggtgatgatgcaagaggagcaactttgagataagctcctaaaccatcttccaacaagactgtactccccattccccaccttacggtgtttcagggacacaagtgtctctagagccacctcagggtacagtgcaggagcaaaagtctgccatgtgaggaagaggagagggaaaggaaggggaggggaggagtgaaaacaagaagggaggaragaggaagagaagagtgagtccacggaaccctaaaggtcatctcctttccaggtcaaggcccagtccctttccaaccctaccccacccccagaaaagcttccatgccagtggaaagtacattcttaaactgatctcccctagaaaacagtgaatggcttttctggccaaagccccctgtctctcaatgaacagtttgttccagacactcaatcaaggctctgggatatcccaggcagtggtcaacaggacatatattccagaaagttctgaagcttgcttttcattagaattgacagtctcctgacagctgcatactaggcgaa

SEQ ID NO: 42005 - DNA, 625 bp, Homo sapiens
gagaaatttaaaaaagcagtaagagggtaaatatctgggtgaatataatctcgagtttaaaaattatatttgatgggcaaaagcaaaaccataacattatctcagtggttctcaatgaatgtagaggtgatattcaagacaacaataccataaagaagggcagaggggcctagaaagcagtagagtttctacattccacttgaattggyaaaaggttgatactagccaatgatcataagtatgtataatataatctctacagccacctataaaatcctatacaaaaatatatactaaatggcatactgaattgatttagcacggcatatgaagttaaatggcatactaagaaatgtctaagtaccccataaaaaggcaagaaaagggaaacaggtataaaaaaacccagagggaacaagtagaaaatagataataaaaacccgtccaaaattaaatataaatcttctaaacacagcaatcaaaaaggttgttggaatctgtttttttaaaaatgactcatggccaagtgtggtagcttatgcctataatcccagcacgttagggggccgaggcggagggaatcacttgagctcaggagtttgagaccagcctgggcatgatagcg

SEQ ID NO: 42006 - DNA, 1262 bp, Homo sapiens
gcatgtaaattaaaaataggttagcaaagcatgagtaaaaatagtcaattttcaaatacttttcacagctctccgagtctgacatatttctctggctaaaagggaagaaacatatcggcactcatgttgggaagaccttagaacagcaaagtactaaaacttgccaaaccaacttcaagtggctttcttgttagtgcaatacacactgcactgagttcctgagcataatatttccaccctttcccatggagtctgcttaaatttgaagatttttttctggtaggtgtattgtccttaattttggaggaagttttaaaaaggtggattaatgttatatatgcttctgagaatattatgcaaccatgaagctttgcacttcaacataaatgaatcccaaaaagagccagatgaactgttggctgggaggcagagccttaggatgtttcaaattcattgtgacttcacataaaggtactctctggagtatgaaagtcaattttacaggtgtaaaataaaggaaaagaagacagtctgaaagtcaaatgaaattccaggaccacctgtatttcagtgaggtaagtgttataataaagtgttatgggtagatacataaaagacaactaatttagagtaaaaataaattgggggactattaagagactgtcttaacgtggaatgaattttacagagtctttatggtaacatttgtagatwaaaattaggttagtaaagcataagtaaaaatagttaattttcaaatatttatcacagagctctctagtttacatttaataatatattctgttgcattggattgatatgcacaggattattttgtctccacgtaggggtaggaaagaaaacaaatttgttttgcaatagcccagtttaatagaggtggtacaaactttaggaagtattttaattttagttaaattgatccaggttaatttggagacagttatgaagcacatacaaattacaaatcataaaatggtaattgtatttgcagttgtaagaacccaaaagatttaagctccattagctaagaataaaatgctgataaccatgagtcgcagccatggtttggatgtactcagaaaagttaactacgtaaaaaatgtcaccttcttattcagcatattagctccctgggtgttttcaagacatatctgctggcttttcttttaaaattacacttcccttagctacgctgtgatattacagctatggaagagtgagctggcttcaccctgcctcat

SEQ ID NO: 42007 - DNA, 1246 bp, Homo sapiens
tttatatacctaaatctttttttatgttactaatatcattttgtagatttctatgtaaagtttgtgcacacttttcataaagtatgcacattactaaagtatttataaagttgttgctgatatgaatgagacttatttttcaattttattctccaactggttatggtaggaatgaaaataatatcatttatattaaattctcttatttattctaaagtgttttgagtacctactatgtgcaaggaactatgctaggaattgggataagtgggaaaaatacaaagaatctgtcttcaaggagcttttggcctacatgggccaataaccctgtcttgagtgagggcagaatggaagaattgtaattgagactgttgagacaattatcctgtggcattcttgcacctctctatatctcgatagcagaggtactgactgcctttgtcccaactatcttttcaatgatatttgtacagtgaatagacttggaagatatagtatctcagtccagagcgaagacaggcttgcttatagtcttagaagtataacctctctcttggcagcaaaaggtagacatgcttattattcattataaaagttgggctccctaagctcaaggtttctctcctgaaatgcaacaggtatgcaggtgtcactttaaccctcttggcatcaccctatgggaacagagggtcagagaatcagagaaaatactaaaactctgctactgctattgccatgattaataaatttttttccctgacccaggaatgtcccatcttctgccagcatctataaaactattgaagcctaacttgttagcttgcaagtagagtaaactatcaaactttttaaagtttttgacatggatctaaagtcaaagtaggacataaccaagccaaagcaggccaggggtaaggacttcataaagagcattgtaaaaaaaggccatcacatttattggcctggtttgttcagcatcacagaaatggaactgcagttgaggatatgaactggaaagaccaaaatttaacaggtaatcctagcctaatttgttgagtgctcactatgttctaggcactattcacatttcacattaattaacttatttaattttctacaaactttcacataggrtatatttgtgattctcattttatacccgaagaaacaaaggcaaagaaaagataagttacttgtccacagtcacatatttagttagaagtagaatcagaattcaaactcaaga

SEQ ID NO: 42008 - DNA, 2133 bp, Homo sapiens
ttagaaactaacgtgtcctggccctgtrtatcagttggaaagcactcgatgcaagaatcaaaaaagccaaatcaaactgacttgaatgataaagggatttatagactcgtatatccagaaggtccagctccatttccttgtaatcctctctgctctgctgccctccatgtgttaattttatcttcagagcaggtttgctcatggtcccaaaatggccaccaatagcaaccaggactccatgcttcactttttacatccaaagggaaagagagtgtcatttccgagaccactgaactaaagccctagactttgttctgactggaccatctctccctctctctctctatccctccagcaagtgggaagtgggatttccctgactcacttggaccaatcaggtccacccaaagcatgaagctgctggacctggggagggtgagatggatactggcaaggcacccatggtgtccatttcctcctgcatctgagcaggatggcactaagccctccagccttcatcctcttcctaacagttctgtctccttccttggaaatggctttgggtccaggagcactgtctgtgatggcattcagtttaagccaaacctcaggagtcctaggaatgctgagaaccactcatctcctctccaggactgtgaatcctgaaatcaccagtactttggacatgaattcctctattcagtaggacatgcccaatagcccttgtaggtgtgtctagaactctgggataggccactggccatgtttacctacaagagtagccaattactgctcttccattgagagtatgttaagccagtcttctcatctcagcccttcaacatcttggaattaattaagtgactctaacaactgactcttattctctaaaaagggccagatcatcagcttagggcacagatggagccctagctcctccttccttggttttcttgacaaataattcccttcgtgcatttatctgcattacagatgaacctctcatgacggtcccacagcccctctgagcctcctccatgcattttccaggcagacctggctccctgtgagcatctgctggaccagctgactgcacagacccatagcccagacagcaggatcccatccagcacattcatctgggcctttgtttccccaagtaccttcattttatagtttataaagcctcatcacaactcctccccacctcccccaaccaaccctgggaaaaggaaaaacagatatagctaaccattcttcaaaaagagagagactgaaatatgaagtgaggaggcaggtgatctgaggtaccccaagggcaagaggcagaccaagaccccaggcccctgacccttctccacctctgctgactgccttgttcaggcagcccctggcaatacttctggaacagaaaaacatggcagcagacgggcccgtgctcaattcaccagagcccaagccagcccaaggcagctgcttcctgctacagagagtcgcttcagaagtgctttgtgctacagtccctgcccgtggcatccagggctggccagagcccaagccctccccaggctcagaggtaactgttcagagagtgagcttcagaaaagccaatttgtctttcctcttgcagtctttactttgcttattgctttgagatttcttttgcagtgatgtgggtctttgattcacagtttgggtctttggtgaacactgccttttccttcctccttcctgcccagctcccagcccagccttcctagaaaaccaaagtagcctctttccttcaggaagatgccaggcagagggctctgggatcagagcagcccaggttcaagttctggtgtggccattttcttctttcacctattgaatcactcagcctacaaatacacagcgggcccgtatgatgcaccaggcatgattccaggagtgggaacctggggacccagcagagaacaagccaaaggtccccttcatgaggcatctcatctcctgaaaccatgccataggcaagccaaagaattagctcccccaattccttgcaaatccaaagaaaagccctagactttctcccccaaaacaatgcacctaagcacaggcacataaaaccatgtgccttttcagagggctggt

SEQ ID NO: 42009 - DNA, 2133 bp, Homo sapiens
ttagaaactaacgtgtcctggccctgtatatcagttggaaagcactcgatgcaagaatcaaaaaagccaaatcaaactgacttgaatgataaagggatttatagactcgtatatccagaaggtccagctccatttccttgtaatcctctctgctctgctgccctccatgtgttaattttatcttcagagcaggtttgctcatggtcccaaaatggccaccaatagcaaccaggactccatgcttcactttttacatccaaagggaaagagagtgtcatttccgagaccactgaactaaagccctagactttgttctgactggaccatctctccctctctctctctatccctccagcaagtgggaagtgggatytccctgactcacttggaccaatcaggtccacccaaagcatgaagctgctggacctggggagggtgagatggatactggcaaggcacccatggtgtccatttcctcctgcatctgagcaggatggcactaagccctccagccttcatcctcttcctaacagttctgtctccttccttggaaatggctttgggtccaggagcactgtctgtgatggcattcagtttaagccaaacctcaggagtcctaggaatgctgagaaccactcatctcctctccaggactgtgaatcctgaaatcaccagtactttggacatgaattcctctattcagtaggacatgcccaatagcccttgtaggtgtgtctagaactctgggataggccactggccatgtttacctacaagagtagccaattactgctcttccattgagagtatgttaagccagtcttctcatctcagcccttcaacatcttggaattaattaagtgactctaacaactgactcttattctctaaaaagggccagatcatcagcttagggcacagatggagccctagctcctccttccttggttttcttgacaaataattcccttcgtgcatttatctgcattacagatgaacctctcatgacggtcccacagcccctctgagcctcctccatgcattttccaggcagacctggctccctgtgagcatctgctggaccagctgactgcacagacccatagcccagacagcaggatcccatccagcacattcatctgggcctttgtttccccaagtaccttcattttatagtttataaagcctcatcacaactcctccccacctcccccaaccaaccctgggaaaaggaaaaacagatatagctaaccattcttcaaaaagagagagactgaaatatgaagtgaggaggcaggtgatctgaggtaccccaagggcaagaggcagaccaagaccccaggcccctgacccttctccacctctgctgactgccttgttcaggcagcccctggcaatacttctggaacagaaaaacatggcagcagacgggcccgtgctcaattcaccagagcccaagccagcccaaggcagctgcttcctgctacagagagtcgcttcagaagtgctttgtgctacagtccctgcccgtggcatccagggctggccagagcccaagccctccccaggctcagaggtaactgttcagagagtgagcttcagaaaagccaatttgtctttcctcttgcagtctttactttgcttattgctttgagatttcttttgcagtgatgtgggtctttgattcacagtttgggtctttggtgaacactgccttttccttcctccttcctgcccagctcccagcccagccttcctagaaaaccaaagtagcctctttccttcaggaagatgccaggcagagggctctgggatcagagcagcccaggttcaagttctggtgtggccattttcttctttcacctattgaatcactcagcctacaaatacacagcgggcccgtatgatgcaccaggcatgattccaggagtgggaacctggggacccagcagagaacaagccaaaggtccccttcatgaggcatctcatctcctgaaaccatgccataggcaagccaaagaattagctcccccaattccttgcaaatccaaagaaaagccctagactttctcccccaaaacaatgcacctaagcacaggcacataaaaccatgtgccttttcagagggctggt

SEQ ID NO: 42010 - DNA, 2133 bp, Homo sapiens
ttagaaactaacgtgtcctggccctgtatatcagttggaaagcactcgatgcaagaatcaaaaaagccaaatcaaactgacttgaatgataaagggatttatagactcgtatatccagaaggtccagctccatttccttgtaatcctctctgctctgctgccctccatgtgttaattttatcttcagagcaggtttgctcatggtcccaaaatggccaccaatagcaaccaggactccatgcttcactttttacatccaaagggaaagagagtgtcatttccgagaccactgaactaaagccctagactttgttctgactggaccatctctccctctctctctctatccctccagcaagtgggaagtgggatttccctgactcacttggaccaatcaggtccacccaaagcatgaagctgctggacctggggagggtgagatggatactggcaaggcacccatggtgtccatttcctcctgcatctgagcaggatggcactaagccctccagccttcatcctcttcctaacagttctgtctccttccttggaaatggctttgggtccaggagcactgtctgtgatggcattcagtttaagccaaacctcaggagtcctaggaatgctgagaaccactcatctcctctccaggactgtgaatcctgaaatcaccagtactttggacatgaattcctctattcagtaggacatgcccaatagcccttgyaggtgtgtctagaactctgggataggccactggccatgtttacctacaagagtagccaattactgctcttccattgagagtatgttaagccagtcttctcatctcagcccttcaacatcttggaattaattaagtgactctaacaactgactcttattctctaaaaagggccagatcatcagcttagggcacagatggagccctagctcctccttccttggttttcttgacaaataattcccttcgtgcatttatctgcattacagatgaacctctcatgacggtcccacagcccctctgagcctcctccatgcattttccaggcagacctggctccctgtgagcatctgctggaccagctgactgcacagacccatagcccagacagcaggatcccatccagcacattcatctgggcctttgtttccccaagtaccttcattttatagtttataaagcctcatcacaactcctccccacctcccccaaccaaccctgggaaaaggaaaaacagatatagctaaccattcttcaaaaagagagagactgaaatatgaagtgaggaggcaggtgatctgaggtaccccaagggcaagaggcagaccaagaccccaggcccctgacccttctccacctctgctgactgccttgttcaggcagcccctggcaatacttctggaacagaaaaacatggcagcagacgggcccgtgctcaattcaccagagcccaagccagcccaaggcagctgcttcctgctacagagagtcgcttcagaagtgctttgtgctacagtccctgcccgtggcatccagggctggccagagcccaagccctccccaggctcagaggtaactgttcagagagtgagcttcagaaaagccaatttgtctttcctcttgcagtctttactttgcttattgctttgagatttcttttgcagtgatgtgggtctttgattcacagtttgggtctttggtgaacactgccttttccttcctccttcctgcccagctcccagcccagccttcctagaaaaccaaagtagcctctttccttcaggaagatgccaggcagagggctctgggatcagagcagcccaggttcaagttctggtgtggccattttcttctttcacctattgaatcactcagcctacaaatacacagcgggcccgtatgatgcaccaggcatgattccaggagtgggaacctggggacccagcagagaacaagccaaaggtccccttcatgaggcatctcatctcctgaaaccatgccataggcaagccaaagaattagctcccccaattccttgcaaatccaaagaaaagccctagactttctcccccaaaacaatgcacctaagcacaggcacataaaaccatgtgccttttcagagggctggt

SEQ ID NO: 42011 - DNA, 2133 bp, Homo sapiens
ttagaaactaacgtgtcctggccctgtatatcagttggaaagcactcgatgcaagaatcaaaaaagccaaatcaaactgacttgaatgataaagggatttatagactcgtatatccagaaggtccagctccatttccttgtaatcctctctgctctgctgccctccatgtgttaattttatcttcagagcaggtttgctcatggtcccaaaatggccaccaatagcaaccaggactccatgcttcactttttacatccaaagggaaagagagtgtcatttccgagaccactgaactaaagccctagactttgttctgactggaccatctctccctctctctctctatccctccagcaagtgggaagtgggatttccctgactcacttggaccaatcaggtccacccaaagcatgaagctgctggacctggggagggtgagatggatactggcaaggcacccatggtgtccatttcctcctgcatctgagcaggatggcactaagccctccagccttcatcctcttcctaacagttctgtctccttccttggaaatggctttgggtccaggagcactgtctgtgatggcattcagtttaagccaaacctcaggagtcctaggaatgctgagaaccactcatctcctctccaggactgtgaatcctgaaatcaccagtactttggacatgaattcctctattcagtaggacatgcccaatagcccttgtaggtgtgtctagaactctgggataggccactggccatgtttacctacaagagtagccaattactgctcttccattgagagtatgttaagccagtcttctcatctcagcccttcaacatcttggaattaattaagtgactctaacaactgactcttattctctaaaaagggccagatcatcagcttagggcacagatggagccctagctcctccttccttggttttcttgacaaataattcccttcgtgcatttatctgcattacagatgaacctctcatgayggtcccacagcccctctgagcctcctccatgcattttccaggcagacctggctccctgtgagcatctgctggaccagctgactgcacagacccatagcccagacagcaggatcccatccagcacattcatctgggcctttgtttccccaagtaccttcattttatagtttataaagcctcatcacaactcctccccacctcccccaaccaaccctgggaaaaggaaaaacagatatagctaaccattcttcaaaaagagagagactgaaatatgaagtgaggaggcaggtgatctgaggtaccccaagggcaagaggcagaccaagaccccaggcccctgacccttctccacctctgctgactgccttgttcaggcagcccctggcaatacttctggaacagaaaaacatggcagcagacgggcccgtgctcaattcaccagagcccaagccagcccaaggcagctgcttcctgctacagagagtcgcttcagaagtgctttgtgctacagtccctgcccgtggcatccagggctggccagagcccaagccctccccaggctcagaggtaactgttcagagagtgagcttcagaaaagccaatttgtctttcctcttgcagtctttactttgcttattgctttgagatttcttttgcagtgatgtgggtctttgattcacagtttgggtctttggtgaacactgccttttccttcctccttcctgcccagctcccagcccagccttcctagaaaaccaaagtagcctctttccttcaggaagatgccaggcagagggctctgggatcagagcagcccaggttcaagttctggtgtggccattttcttctttcacctattgaatcactcagcctacaaatacacagcgggcccgtatgatgcaccaggcatgattccaggagtgggaacctggggacccagcagagaacaagccaaaggtccccttcatgaggcatctcatctcctgaaaccatgccataggcaagccaaagaattagctcccccaattccttgcaaatccaaagaaaagccctagactttctcccccaaaacaatgcacctaagcacaggcacataaaaccatgtgccttttcagagggctggt

SEQ ID NO: 42012 - DNA, 581 bp, Homo sapiens
cacatattgtgttatgcctctgactctggaacttttttggatattgagaatctttggcatgagaacttaagggaatctgaggcagagaaattgaatggtgtttctcagatgttgtccgcttttgtttcacttgtgccctcttgttcaccctttcttttttatcactgtacygtaaagcattgtttgtaaaagcctgagtatacacagacatattgacagtaaacaacactgaaatggactgacttgagaaaatttcatgtatagaaaataagcaaaaacaaagtaagaaacactgcaaaagagaaaaatgaaaagatatttcctttttagagagtaaaaatattaagtatttcttatccttacactaatataaaacatatacagatatttttaaaggaactagatatacagtttctaggtctttgtagagaaaagaaatagtggtaatatgtgacagcaaaatgcacctgggatagaggcttaactacaaagtaaatcatttattaagagggagcttttgtttaatggttttctcccttgagaataaactggatgtggtacatgttgtaaacttaacttgt

SEQ ID NO: 42013 - DNA, 624 bp, Homo sapiens
gaaaaaaaaaatgtgtttttctctggagtcctgttcacaagttcattagtaaaagcttgtacggatactcataattgcatgtcacagttcctctaagtttatttttctaaaaccatacttatccttcttctttcttattgattaaaaaaatactaatgtatttttcacgtttcaacactgcaaacacacaaattctccatttactcttcattggttttcataatactgcatttcccactacatctccttaagtataatggaatcacataataaaaataaataactaatgttttagaaaatctacttctttctagaacaagtatattgaaatgtttgaagtcatagaaaaaatatatatgaaagcctggactgaaaagtcaagttttatttttatatatttatttgccaagtgaccataaaatatacatgtaccctctctctccagaaaaggcacgttaagaaaagcaatacttactaaacttagtttacctgttaaaattaattacatctagcttaccagataatgcaatcaaaatcattaggataagcttttccagcatatgagattgaaagttcatcagaaatcttcctttttttttttggagataaacgtagccatcwtcc

SEQ ID NO: 42014 - DNA, 1393 bp, Homo sapiens
ttaatattttatctccctacttctgcccaaaattgtggctaaaatgaaattaaaatacaaatcatatgcatttttagatgaagatgtgtggatttataaacttctagaaaaaaacaagtctgaaagagaaattattcagccacattttttaaaacaagtactatagcaaagctttcaaaataataagcaatagttgatgttgtttttcactctaccctgaaaatgcttaatgttgaccaaaggttgtagaaagctcatcttataggtcttaatattaaaagactatttcaagcctgattcatattgaaccacctggtctcaacattgtttctcgtatatatggcaaaaagaaagatatttggggcagwtgggcatgggtatgaatggttttatgagccaagtcagtattataataggaataagctataagcttttccatcagtattacaacaggaataagctataagattttacatcagttctaagtaggttgtgttgccaggagagtgtatcaaatgatggttatacatatgcagaatcattattttaaccaggtctatttaaaaatagattcattgcggatgattgcatatttctatttgctaggatagacatctacaaatagtctatgaaagcactttgtaagcttcaaggtagtttatcaatatgaaagagcatatgccgcaaatggtttatttgtggctgcttcccactggccaaaagcagccttttagtttctaaacaaatatgattgtctttctatataggtcatgatgtgcaagtcagggaacaatggctagcctagcatagaatagcaagataggtcagtttttgtcaacagataatgggtagccagtccaagatttgtctgagagtgcaaggatggtcactgttactaataggcataaatataatttattttgtatgttgatcttgtatccaaccaccttgtcgaacatgttcattataataatgttctatatctgatattgtcttctataaaaataatttaatcacatgtgataacagttttgacagccctgtgatttccttaactaatcatgacatcttttttctttgtttatgttattattgtttgctgacacgtccagtaaaatatgaagtagatgcggcaacagtgggtatctttgattgtccctgactgaatgagaaagatttcagtagtgaacagtttttttgctggagaatattagtaaataatttaacaaattaaggaaattttttttcttcctaaaagaaagcgttcacctgaaaataacatacatcatatccactcacattttattgaccaaaggaagtcacacagaatcatgtctaacttcagacagggtaagaaaatacaatttcgccatggcccaggaagcagctaggt

SEQ ID NO: 42015 - DNA, 606 bp, Homo sapiens
tgttcccagatcctcaaagaaagattcagagatccatgaaatcttaatatgcctgtttgaagccaggaaaaataaataacagtatgccagtatttcagactgggaagagagtgtatcaatacttgagggggaatttggttcagtcctgaaaattactaagtctttcttccctacttaacagggaagtaatgtcaaatggttgaaatttgcacggaattctactagcctggagggtgctcctgaagtaatcttacaaacttggcaattagtccagcagcctaaatctttgtctcttggtagatgagtggcagcaatttttgttttttcctacagaacttgtacttgacatcagttagcctaactcagaccctgaccttgcctttgtatttggggaagagtctgatcttcaagatggacccaacctcaatagaaacaaagtaygtgtgaaagttcttacccaacccttttcttagtgtgttctatttcatctttaatgcagatctttaatctcagacgttcatcagaaaggggtaacatcaaatactccaaatctgagcaacattcaactcatttgttgttgttctggggttttgttttggttttggt

SEQ ID NO: 42016 - DNA, 599 bp, Homo sapiens
ctgggacccaaataaagacacaattagcaagaggaatacaagacctcgtagagggaataccttgtgtgccggggcttgaagatcaaggtggatttctacaggcagaaaattaacctgtgtcccttttctttgggtctgcctggtgaatggaggctgtggtcacttgaacccatcaccttttcagtatttgccaacatgcatgagctgagagccatccactccaggatctcccgtgatgagtctgcccaaagtcctgggcttccctctccacgtgtgcaactgctgtaagccgctctgctacttgaagagccgggtctctctcctgmccagcagacccctcagcagctgtgcaccatcacagcaccagccccctccccattgtcactgccaagctctccctgagggcttgcctggagccacactgcacctctcaaccctaggtacctgatgtccaagcaggcaactgtaagggaacactgcaaagagagagaaagtggagactccagtctgtccccgacgctgcccaagggaagggacatctggagactggcacagggacatctggagactgacacagactggcatctgcacagagcgcc

SEQ ID NO: 42017 - DNA, 1055 bp, Homo sapiens
gaattctcctgcctcagcctcctaagtagctggggctacaggtctgcaccaacatgcgcagttaattttttaattttgtgtgtgtgtgtgtgtgtgtgtgtagatgggktcttactatgttgcccagactggtctcaagctcctgaactcaagtgatccttccactttggcctcccaaagtgtgggattatgggcgtgagccaccgtgccactgtgcccggcttaatatgtcttttatttttaaaaaatgctggtaaaatacacataacataaaatgtgtcatcggtgatatttaatgcaaccgccatcactgtccagtttcagaacatttttattacttcaaaaggaaccccatatccattaagctgtccctctccattctgtcctctccttagcctctggcaattgctacagaacaaagacatggagaggttaagtggcctgctttagacccacattactgagtggcaaaactagtatttgaggctgggaagtctgctaccctagtgcagaacacttaactgttaaggtaattagctccccattagaaagacctttcccccaccatccaattcacaggaggcaggggcttgtttctagctaacacaaaagatgattttctctgaggcctcattacgggatgccaagcattcccaccagtgggcagcctgtggcacctagaaggtccgctccttccacttgctttccttacacccagcccagtgggaaggagggtgtcacttcagcagtgggggcagatgggtcttcagatcccacaggatgcccccacactgtgctggtcatccaactcattgtcaggtcagcaggggtgcctgctggcacccagagcttttgcctggggcggaaatgtggctgtctgacttttcttagttttcatccttgtcttaaaggtaggatgagtctcccaaggtgggatagaatgctgggagagaagtgaactttgggattttggtaaaattctctgcacaaataactcccagagagaagggtaatctgctaccccactcatctttactctttgaaaaatttaggat

SEQ ID NO: 42018 - DNA, 1055 bp, Homo sapiens
gaattctcctgcctcagcctcctaagtagctggggctacaggtctgcaccaacatgcgcagttaattttttaattttgtgtgtgtgtgtgtgtgtgtgtgtagatggggtcttactrtgttgcccagactggtctcaagctcctgaactcaagtgatccttccactttggcctcccaaagtgtgggattatgggcgtgagccaccgtgccactgtgcccggcttaatatgtcttttatttttaaaaaatgctggtaaaatacacataacataaaatgtgtcatcggtgatatttaatgcaaccgccatcactgtccagtttcagaacatttttattacttcaaaaggaaccccatatccattaagctgtccctctccattctgtcctctccttagcctctggcaattgctacagaacaaagacatggagaggttaagtggcctgctttagacccacattactgagtggcaaaactagtatttgaggctgggaagtctgctaccctagtgcagaacacttaactgttaaggtaattagctccccattagaaagacctttcccccaccatccaattcacaggaggcaggggcttgtttctagctaacacaaaagatgattttctctgaggcctcattacgggatgccaagcattcccaccagtgggcagcctgtggcacctagaaggtccgctccttccacttgctttccttacacccagcccagtgggaaggagggtgtcacttcagcagtgggggcagatgggtcttcagatcccacaggatgcccccacactgtgctggtcatccaactcattgtcaggtcagcaggggtgcctgctggcacccagagcttttgcctggggcggaaatgtggctgtctgacttttcttagttttcatccttgtcttaaaggtaggatgagtctcccaaggtgggatagaatgctgggagagaagtgaactttgggattttggtaaaattctctgcacaaataactcccagagagaagggtaatctgctaccccactcatctttactctttgaaaaatttaggat

SEQ ID NO: 42019 - DNA, 1055 bp, Homo sapiens
gaattctcctgcctcagcctcctaagtagctggggctacaggtctgcaccaacatgcgcagttaattttttaattttgtgtgtgtgtgtgtgtgtgtgtgtagatggggtcttactatgttgcccagactggtctcaagctcctgaactcaagtgatccttccactttggcctcccaaagtgtgggattatgggcgtgagccaccgygccactgtgcccggcttaatatgtcttttatttttaaaaaatgctggtaaaatacacataacataaaatgtgtcatcggtgatatttaatgcaaccgccatcactgtccagtttcagaacatttttattacttcaaaaggaaccccatatccattaagctgtccctctccattctgtcctctccttagcctctggcaattgctacagaacaaagacatggagaggttaagtggcctgctttagacccacattactgagtggcaaaactagtatttgaggctgggaagtctgctaccctagtgcagaacacttaactgttaaggtaattagctccccattagaaagacctttcccccaccatccaattcacaggaggcaggggcttgtttctagctaacacaaaagatgattttctctgaggcctcattacgggatgccaagcattcccaccagtgggcagcctgtggcacctagaaggtccgctccttccacttgctttccttacacccagcccagtgggaaggagggtgtcacttcagcagtgggggcagatgggtcttcagatcccacaggatgcccccacactgtgctggtcatccaactcattgtcaggtcagcaggggtgcctgctggcacccagagcttttgcctggggcggaaatgtggctgtctgacttttcttagttttcatccttgtcttaaaggtaggatgagtctcccaaggtgggatagaatgctgggagagaagtgaactttgggattttggtaaaattctctgcacaaataactcccagagagaagggtaatctgctaccccactcatctttactctttgaaaaatttaggat

SEQ ID NO: 42020 - DNA, 1055 bp, Homo sapiens
gaattctcctgcctcagcctcctaagtagctggggctacaggtctgcaccaacatgcgcagttaattttttaattttgtgtgtgtgtgtgtgtgtgtgtgtagatggggtcttactatgttgcccagactggtctcaagctcctgaactcaagtgatccttccactttggcctcccaaagtgtgggattatgggcgtgagccaccgtgccactgtgcccggcttaatatgtcttttatttttaaaaaatgctggtaaaatacacrtaacataaaatgtgtcatcggtgatatttaatgcaaccgccatcactgtccagtttcagaacatttttattacttcaaaaggaaccccatatccattaagctgtccctctccattctgtcctctccttagcctctggcaattgctacagaacaaagacatggagaggttaagtggcctgctttagacccacattactgagtggcaaaactagtatttgaggctgggaagtctgctaccctagtgcagaacacttaactgttaaggtaattagctccccattagaaagacctttcccccaccatccaattcacaggaggcaggggcttgtttctagctaacacaaaagatgattttctctgaggcctcattacgggatgccaagcattcccaccagtgggcagcctgtggcacctagaaggtccgctccttccacttgctttccttacacccagcccagtgggaaggagggtgtcacttcagcagtgggggcagatgggtcttcagatcccacaggatgcccccacactgtgctggtcatccaactcattgtcaggtcagcaggggtgcctgctggcacccagagcttttgcctggggcggaaatgtggctgtctgacttttcttagttttcatccttgtcttaaaggtaggatgagtctcccaaggtgggatagaatgctgggagagaagtgaactttgggattttggtaaaattctctgcacaaataactcccagagagaagggtaatctgctaccccactcatctttactctttgaaaaatttaggat

SEQ ID NO: 42021 - DNA, 1055 bp, Homo sapiens
gaattctcctgcctcagcctcctaagtagctggggctacaggtctgcaccaacatgcgcagttaattttttaattttgtgtgtgtgtgtgtgtgtgtgtgtagatggggtcttactatgttgcccagactggtctcaagctcctgaactcaagtgatccttccactttggcctcccaaagtgtgggattatgggcgtgagccaccgtgccactgtgcccggcttaatatgtcttttatttttaaaaaatgctggtaaaatacacataacataaaatgtgtcatcggtgatatttaatgcaaccgccatcactgtccagtttcagaacatttttattacttcaaaaggaaccccatatccattaagctgtccctctccattctgtcctctccttagcctctggcaattgctacagaacaaagacatggagaggttaagtggcctgctttagacccacattactgagtggcaaaactagtatttgaggctgggaagtctgctaccctagtgcagaacacttaactgttaaggtaattagctccccattagaaagacctttcccccaccatccarttcacaggaggcaggggcttgtttctagctaacacaaaagatgattttctctgaggcctcattacgggatgccaagcattcccaccagtgggcagcctgtggcacctagaaggtccgctccttccacttgctttccttacacccagcccagtgggaaggagggtgtcacttcagcagtgggggcagatgggtcttcagatcccacaggatgcccccacactgtgctggtcatccaactcattgtcaggtcagcaggggtgcctgctggcacccagagcttttgcctggggcggaaatgtggctgtctgacttttcttagttttcatccttgtcttaaaggtaggatgagtctcccaaggtgggatagaatgctgggagagaagtgaactttgggattttggtaaaattctctgcacaaataactcccagagagaagggtaatctgctaccccactcatctttactctttgaaaaatttaggat

SEQ ID NO: 42022 - DNA, 1192 bp, Homo sapiens
ctttcccattttataagacacagtcatatggattcagaagcccaccctgctcgctactcaggcatgacctcatcttaactaattacatctgcagtgaccccattcccagattaggttacattctgagatactgggagctgggactttagtattggaatttgaaaataagacaattcaaccaataacagtatgtgttcaataaattcaagtcagatatatgaaaaaataaaaattgagtataaagataatttttggctacattgactggattccaagaatcttccattctgtctaaagaagatagacacgttaaaaatcaaacgagaaaaaacagtaagtgaaggggatgaatgcagccagtgggtagttagactatgcaaaaacaagtgcgccagaatcacaactcaacrtatattaaggctttcatttggtggtgttttgaattagaaatatttaatgtcgatcagcctcagtttccttagcattatctacttcgcagttgttgagacaattaactacaatatcctaagttgcacacaattattgggccagacttctacactgtgagtatctgcaaaaaaaagaaaaaaaaaaaacattgttcactgctgtgcttcttccctctgatttaccaataagggaaacatcttccatatttccaaaaacccctggttttccttgagtacaccttgacatcatgcaaaacatcttcttcctcaagtcagccaggccctgctgtacgctaagctgcaacccactgggctcagcattcaatcaggcagacatccttaaaagatcacacatccttagctatggaagaataatatttatgcactgcttaatcatgtgaagaagcacagactctccagtctcaagtggagacattgggtgatgtataggcttagagatcctcatattgggaaagagtcagttactgatcttggctcttcacttgccaagatggaactgtttggtttcaattctatgaacatacttacaaagtagtaggaacttcaatactgtgtgcttctgcttagttgggttgtactgaatttgtaagtccagtgaggttgtattttccctttgttctgatgagaggtctagccactttgtgtttcaactgttataatgtccatattcagttttcttattcccccataaaagttcatgagatagaaatggaggaaacgta

SEQ ID NO: 42023 - DNA, 1192 bp, Homo sapiens
ctttcccattttataagacacagtcatatggattcagaagcccaccctgctcgctactcaggcatgacctcatcttaactaattacatctgcagtgaccccattcccagattaggttacattctgagatactgggagctgggactttagtattggaatttgaaaataagacaattcaaccaataacagtatgtgttcaataaattcaagtcagatatatgaaaaaataaaaattgagtataaagataatttttggctacattgactggattccaagaatcttccattctgtctaaagaagatagacacgttaaaaatcaaacgagaaaaaacagtaagtgaaggggatgaatgcagccagtgggtagttagactatgcaaaaacaagtgcgccagaatcacaactcaacgtatattaaggctttcatttggtggtgttttgaattagaaatatttaatgtcgatcagcctcagtttccttagcattatctacttcgcagttgttgagacaattaactacaatatcctaagttgcacacaattattgggccagacttctacactgtgagtatctgcaaaaaaaagaaaaaaaaaaaacattgttcactgctgtgcttcttccctctgatttaccaataagggaaacatcttccatatttccaaaaacccctggttttccttgagtacaccttgacatcatgcaaaacatcttcttcctcaagtcagccaggccctgctgtackctaagctgcaacccactgggctcagcattcaatcaggcagacatccttaaaagatcacacatccttagctatggaagaataatatttatgcactgcttaatcatgtgaagaagcacagactctccagtctcaagtggagacattgggtgatgtataggcttagagatcctcatattgggaaagagtcagttactgatcttggctcttcacttgccaagatggaactgtttggtttcaattctatgaacatacttacaaagtagtaggaacttcaatactgtgtgcttctgcttagttgggttgtactgaatttgtaagtccagtgaggttgtattttccctttgttctgatgagaggtctagccactttgtgtttcaactgttataatgtccatattcagttttcttattcccccataaaagttcatgagatagaaatggaggaaacgta

SEQ ID NO: 42024 - DNA, 1192 bp, Homo sapiens
ctttcccattttataagacacagtcatatggattcagaagcccaccctgctcgctactcaggcatgacctcatcttaactaattacatctgcagtgaccccattcccagattaggttacattctgagatactgggagctgggactttagtattggaatttgaaaataagacaattcaaccaataacagtatgtgttcaataaattcaagtcagatatatgaaaaaataaaaattgagtataaagataatttttggctacattgactggattccaagaatcttccattctgtctaaagaagatagacacgttaaaaatcaaacgagaaaaaacagtaagtgaaggggatgaatgcagccagtgggtagttagactatgcaaaaacaagtgcgccagaatcacaactcaacgtatattaaggctttcatttggtggtgttttgaattagaaatatttaatgtcgatcagcctcagtttccttagcattatctacttcgcagttgttgagacaattaactacaatatcctaagttgcacacaattattgggccagacttctacactgtgagtatctgcaaaaaaaagaaaaaaaaaaaacattgttcactgctgtgcttcttccctctgatttaccaataagggaaacatcttccatatttccaaaaacccctggttttccttgagtacaccttgacatcatgcaaaacatcttcttcctcaagtcagccaggccctgctgtacgctaagctgcaacccactgggctcagcattcaatcaggcagacrtccttaaaagatcacacatccttagctatggaagaataatatttatgcactgcttaatcatgtgaagaagcacagactctccagtctcaagtggagacattgggtgatgtataggcttagagatcctcatattgggaaagagtcagttactgatcttggctcttcacttgccaagatggaactgtttggtttcaattctatgaacatacttacaaagtagtaggaacttcaatactgtgtgcttctgcttagttgggttgtactgaatttgtaagtccagtgaggttgtattttccctttgttctgatgagaggtctagccactttgtgtttcaactgttataatgtccatattcagttttcttattcccccataaaagttcatgagatagaaatggaggaaacgta

SEQ ID NO: 42025 - DNA, 1192 bp, Homo sapiens
ctttcccattttataagacacagtcatatggattcagaagcccaccctgctcgctactcaggcatgacctcatcttaactaattacatctgcagtgaccccattcccagattaggttacattctgagatactgggagctgggactttagtattggaatttgaaaataagacaattcaaccaataacagtatgtgttcaataaattcaagtcagatatatgaaaaaataaaaattgagtataaagataatttttggctacattgactggattccaagaatcttccattctgtctaaagaagatagacacgttaaaaatcaaacgagaaaaaacagtaagtgaaggggatgaatgcagccagtgggtagttagactatgcaaaaacaagtgcgccagaatcacaactcaacgtatattaaggctttcatttggtggtgttttgaattagaaatatttaatgtcgatcagcctcagtttccttagcattatctacttcgcagttgttgagacaattaactacaatatcctaagttgcacacaattattgggccagacttctacactgtgagtatctgcaaaaaaaagaaaaaaaaaaaacattgttcactgctgtgcttcttccctctgatttaccaataagggaaacatcttccatatttccaaaaacccctggttttccttgagtacaccttgacatcatgcaaaacatcttcttcctcaagtcagccaggccctgctgtacgctaagctgcaacccactgggctcagcattcaatcaggcagacatccttaaaagatcacacatccttagctayggaagaataatatttatgcactgcttaatcatgtgaagaagcacagactctccagtctcaagtggagacattgggtgatgtataggcttagagatcctcatattgggaaagagtcagttactgatcttggctcttcacttgccaagatggaactgtttggtttcaattctatgaacatacttacaaagtagtaggaacttcaatactgtgtgcttctgcttagttgggttgtactgaatttgtaagtccagtgaggttgtattttccctttgttctgatgagaggtctagccactttgtgtttcaactgttataatgtccatattcagttttcttattcccccataaaagttcatgagatagaaatggaggaaacgta

SEQ ID NO: 42026 - DNA, 1192 bp, Homo sapiens
ctttcccattttataagacacagtcatatggattcagaagcccaccctgctcgctactcaggcatgacctcatcttaactaattacatctgcagtgaccccattcccagattaggttacattctgagatactgggagctgggactttagtattggaatttgaaaataagacaattcaaccaataacagtatgtgttcaataaattcaagtcagatatatgaaaaaataaaaattgagtataaagataatttttggctacattgactggattccaagaatcttccattctgtctaaagaagatagacacgttaaaaatcaaacgagaaaaaacagtaagtgaaggggatgaatgcagccagtgggtagttagactatgcaaaaacaagtgcgccagaatcacaactcaacgtatattaaggctttcatttggtggtgttttgaattagaaatatttaatgtcgatcagcctcagtttccttagcattatctacttcgcagttgttgagacaattaactacaatatcctaagttgcacacaattattgggccagacttctacactgtgagtatctgcaaaaaaaagaaaaaaaaaaaacattgttcactgctgtgcttcttccctctgatttaccaataagggaaacatcttccatatttccaaaaacccctggttttccttgagtacaccttgacatcatgcaaaacatcttcttcctcaagtcagccaggccctgctgtacgctaagctgcaacccactgggctcagcattcaatcaggcagacatccttaaaagatcacacatccttagctatggaagaataatatttatgcactgcttaatcatgtgaagaagcacagactctccagtctcaagtggagacattgggtgatgtataggcttagagatcctcatattgggaaagagtcagttactgatcttggctcttcacttgccaagatggaactgtttggtttcaattctrtgaacatacttacaaagtagtaggaacttcaatactgtgtgcttctgcttagttgggttgtactgaatttgtaagtccagtgaggttgtattttccctttgttctgatgagaggtctagccactttgtgtttcaactgttataatgtccatattcagttttcttattcccccataaaagttcatgagatagaaatggaggaaacgta

SEQ ID NO: 42027 - DNA, 613 bp, Homo sapiens
cttcttatttccttatcatttctaaataaaaatttggtaaaacccacacacattttttcctgttacaatgtaaagatggttttctttgagcaaaaattctctaattatattttgttccctgtactactttctatattttgctggagatgataatcttcttatttttaatgcttctttaattatctttaaatagttaaattttatgcagcctccaggaaatctgaaattgttttctatgcagtctaacctcgagatcttttatcagttgcatttttgttctgyagaaccagctcctggaacactttgccctctgctacatcagagggctttgcttgccaagcttggtgaagcagtggtatgactttgctgctattcagagacttctatttgactcttctctgtgttgcattcctggtttcttgattctcatgtcttcctctttactggtttattcctgcattttgttgaagtacatgttctaatagcttcctgagaaatcgtgcatgggaggtaatttttttgaaattgtacacattttaaaatagctttattctaccctcatatttgatcaattgtcctatggctctataattctttcacagcactttaaagg

SEQ ID NO: 42028 - DNA, 548 bp, Homo sapiens
agtgaaaccacgaactgaattcgttcccaaggctagtttggctcacacccaggaaagaacaaggacagcttaaaggttagaagcaagatggagttggttaggtctgacctcyttcactgtcatcatttcctcagtcataatttttgcaaaggccgtttgatactcaaaggacactttgcattatcatcacagaaagctaatcaggctgagagacaagtcctttctctcacttgttttcagtgctccaaatacctttggcttaaccattcccaaacccccacgtgtgctgtgcactttatgtgttttagagttggtttctccattttttctaacatttggcagacagtttttttccacagatttattacactcatcattgaaaaatatgcaattcaaaaaagaaagagagtgaacgagagagagaagagtggggaggggggtgggcatggagagagaaagagaaagagaaaagaaaggggaaagaagaaaggaaaagatagattctggccattaaagttatcagcagttcaacaaccttaaaaacttaa

SEQ ID NO: 42029 - DNA, 548 bp, Homo sapiens
agtgaaaccacgaactgaattcgttcccaaggctagtttggctcacacccaggaaagaacaaggacagcttaaaggttagaagcaagatggagttggttaggtctgacctctttcactgtcatcatttcctcagtcataatttttgcaaaggccgtttgatactcaaaggacactttgcattatcatcacagaaagctaatcaggctgagagacaagtcctttytctcacttgttttcagtgctccaaatacctttggcttaaccattcccaaacccccacgtgtgctgtgcactttatgtgttttagagttggtttctccattttttctaacatttggcagacagtttttttccacagatttattacactcatcattgaaaaatatgcaattcaaaaaagaaagagagtgaacgagagagagaagagtggggaggggggtgggcatggagagagaaagagaaagagaaaagaaaggggaaagaagaaaggaaaagatagattctggccattaaagttatcagcagttcaacaaccttaaaaacttaa

SEQ ID NO: 42030 - DNA, 1653 bp, Homo sapiens
caccccatctgtacaaaacatttaaaaaacatagattgggtgtggaggtgtttggtacttgggaggctgaggtgggaggatcattgagtccaggaggcagaggttgcagccatccaagattgtgccactacactccagcctgggggatagagaccctgtctcaaaaaataaaacaaaaacctggttcacagattcttgggggtgtggtacctccagtttaagaaatgaggcagccttgaactgtgctgtttggagccataggagtcagtttgttctttctgtcccaatcactgtttgaggtggcagacttctaactcatgggtatcctggaatggatttgaattttgttctgtggggcctgaagaaaagggaacttggattgttctgtgtagggaggagtctgggcttgtgcgtggggagtggagccggctctgggaaagaggatgccaggcccagggggggcctccacaggaggcagcatcctcccatgcccatccacagtgggcacaaatgctcactatgaaggaaggacttgcgatggcctcgccagacggcggcaagccctcacggcacctgctggcgctcatgctcagccttttggggcaccgtggcaggagatccaagcgcagcaggggctggacagggcctcctcctagctggctctgttccaccctgagttctggggggcttttccagtgttggggctgtgggcagctgtgacatgttttacagtgaaagagcttgttaactcatccatcttcatactttggtcaccagggtttggatccagctcgagtcaacgtccctgtcattggtggccatgctgggaagaccatcatccccctgatctctcaggtacacgcatatgaccttgtgaggggcttcgaggtcaggattccctttaccaggscctgctttgaggtgatcccggtagactggagaaggcctggccatgtgccaggttttggaagggctcctgttgtaggcagccccgcccctctgctgcagggcggtgtcagtcctggagcgaatgtgggtggaagctgctcagggcccagctccagcacgcaaggagaaccactgttgggaacctcaccgggttactggttaggccggagcgggcgaggtgcttttttcaaaaatgagtccagggctggacacagtggctcatacctgtaatcccagcatttgggaggccaaagcgggaggattgcttgagcctgggaggttgaggctgcagcgagctatgatgcaccactgaagcctgggcgacagagccagaccctggcctcaaaaaacaaatgagtaggggactcaccacacttcccaacagagttgatttcacttcgtcttttttttttttatctttttattattatttttttgctgctccttgtggagcagggctaccccataggcagtgtgcccagaatagcatgtcatttttctataaaggttttctttttcttctttatagaaaacctttcccatgccctggtgatgggagggagaggagaggtcgggaatagtgggggtgggaggcagtgggtctggggtcatgggccggaagccactcactgatcccatggcttggcttgcagtgcacccccaaggtggactttccccaggaccagctgacagcactcactgggc

SEQ ID NO: 42031 - DNA, 589 bp, Homo sapiens
atccctcaataaatctwcctgtataattacagtgaaataatagccacaaagataacctacagctaggcgaagactccaggaggccatgggcttggaaaatgacccagggaactgcaaggccaaaatgaaactgccttcctagagtttgatctaaggtatccttaaaatcaggagccgtctcagtgtaaaccaagtcttggaaattgtcccttcttggaataatctagtggtcactgtgagcaagacaacacatgagaccaccctagtttgatgtaaattgatctaaattacagagactgaatcacagctgctttttactttttaaaaattaaagtaatacatgtatatgataaaaaaattcaaactactgaaaggccaaaaatgaaaagtaacagcctctttgactgcccaaccccatcttcactttcattcccttaaaataactactgtaaagtagtttctctggtcccttggaacctccatagaggaacacagccctgccaaaaccttgattttagcctagtgaggcctagtaagacccgtatcttctgatctccagaactgtagaataattaatttgtattgttta

SEQ ID NO: 42032 - DNA, 645 bp, Homo sapiens
gaataactttcctgtagaacagatttctgagatttggtgtcccattcttcatttctggatgtagttttcatctttactgtcaaataactgaatgaaacatccaaactgactttcatgaattttcttagggagatagagtgaaataaaattatgacccactttgcagagcacagaattccaactatattttcattttagctggctgtttcacgatagcaattctctgggtctcttttcacagatacaagtayatctatgcccaataattatatctatggtaataaactgaaagagctagtatctttgaggtttccacattgccaactcccgaaaatgtggagaagggtgaagtttctaatataaaagtaacaagaatgtcatggagtagaaacataaagtactcaagttttcctttctgttacttgtattataataaaaaaggagacagcaggataagtgcttcaatattgtgtttctcatgtgtttttgaaaatgtgtaggaatattttaatagttttggtttccttttttttttttttttaagatgccaccataggggcctgttggggagcaaagggattatgttttccttgatgttaagtgaattagccaaacatagacttcctgttcattcttggttttttt

SEQ ID NO: 42033 - DNA, 645 bp, Homo sapiens
gaataactttcctgtagaacagatttctgagatttggtgtcccattcttcatttctggatgtagttttcatctttactgtcaaataactgaatgaaacatccaaactgactttcatgaattttcttagggagatagagtgaaataaaattatgacccactttgcagagcacagaattccaactatattttcattttagctggctgtttcacgatagcaattctctgggtctcttttcacagatacaagtacawctatgcccaataattatatctatggtaataaactgaaagagctagtatctttgaggtttccacattgccaactcccgaaaatgtggagaagggtgaagtttctaatataaaagtaacaagaatgtcatggagtagaaacataaagtactcaagttttcctttctgttacttgtattataataaaaaaggagacagcaggataagtgcttcaatattgtgtttctcatgtgtttttgaaaatgtgtaggaatattttaatagttttggtttccttttttttttttttttaagatgccaccataggggcctgttggggagcaaagggattatgttttccttgatgttaagtgaattagccaaacatagacttcctgttcattcttggttttttt

SEQ ID NO: 42034 - DNA, 645 bp, Homo sapiens
gaataactttcctgtagaacagatttctgagatttggtgtcccattcttcatttctggatgtagttttcatctttactgtcaaataactgaatgaaacatccaaactgactttcatgaattttcttagggagatagagtgaaataaaattatgacccactttgcagagcacagaattccaactatattttcattttagctggctgtttcacgatagcaattctctgggtctcttttcacagatacaagtacatctatgcccaataattatatctatggtaataaactgaaagagctagtatctttgaggtttccacattgccaactcccgaaaatgtggagaagggtgaagtttctaatataaaagtaasaagaatgtcatggagtagaaacataaagtactcaagttttcctttctgttacttgtattataataaaaaaggagacagcaggataagtgcttcaatattgtgtttctcatgtgtttttgaaaatgtgtaggaatattttaatagttttggtttccttttttttttttttttaagatgccaccataggggcctgttggggagcaaagggattatgttttccttgatgttaagtgaattagccaaacatagacttcctgttcattcttggttttttt

SEQ ID NO: 42035 - DNA, 665 bp, Homo sapiens
ataggcatatacgacgtggaaaaaaaccaagaatgaacaggaagtctatgtttggctaattcacttaacatcaaggaaaacataatccctttgctccccaacaggcccctatggtggcatcttaaaaaaaaaaaaaaaaaggaaaccaaaactattaaaatattcctacacattttcaaaaacacatgagaaacacaatattgaagcacttatcctgctgtctccttttttattataatacaagtaacagaaaggaaaacttgagtactttatgtttctactccatgacattcttgttacttttatattagaaacttcacccttctccacattttcgggagttggcaatgtggaaacctcaaagatactagctctttcagtttattaccatagatataattattgggcatagwtgtacttgtatctgtgaaaagagacccagagaattgctatcgtgaaacagccagctaaaatgaaaatatagttggaattctgtgctctgcaaagtgggtcataattttatttcactctatctccctaagaaaattcatgaaagtcagtttggatgtttcattcagttatttgacagtaaagatgaaaactacatccagaaatgaagaatgggacaccaaatctcagaaatctgttctacaggaaagttattc

SEQ ID NO: 42036 - DNA, 665 bp, Homo sapiens
ataggcatatacgacgtggaaaaaaaccaagaatgaacaggaagtctatgtttggctaattcacttaacatcaaggaaaacataatccctttgctccccaacaggcccctatggtggcatcttaaaaaaaaaaaaaaaaaggaaaccaaaactattaaaatattcctacacattttcaaaaacacatgagaaacacaatattgaagcacttatcctgctgtctccttttttattataatacaagtaacagaaaggaaaacttgagtactttatgtttctactccatgacattcttgttacttttatattagaaacttcacccttctccacattttcgggagttggcaatgtggaaacctcaaagatactagctctttcagtttattaccatagatataattattgggcatagatrtacttgtatctgtgaaaagagacccagagaattgctatcgtgaaacagccagctaaaatgaaaatatagttggaattctgtgctctgcaaagtgggtcataattttatttcactctatctccctaagaaaattcatgaaagtcagtttggatgtttcattcagttatttgacagtaaagatgaaaactacatccagaaatgaagaatgggacaccaaatctcagaaatctgttctacaggaaagttattc

SEQ ID NO: 42037 - DNA, 2048 bp, Homo sapiens
ttatgccccttggtcaaattctttcttctgaggaggcaaaaactgaggttgctgcaaacctgtagagattcaccaccagtaacaaaatcaataatctaaacttccaccttaagaaaactgaaaaaagaagagcaaactaaaccaaaagcaagaggaaasaaagtaatgaaaatttaagagaaaataagcaaaatacagaatagaaaagcaataaaaagaatcagtgatatcagaagttactacttttaaagattaacaaaatggataaaactttgactagaatgaccaagaaaaaaaggagagaagactgaattactcattgtgtgtcctctttgctagacggcacactccctaaaaaaatggctataattgttttgctcaatactggatctttagcacatacttatttcagtgtttggaacaacgtaagtgtgcattaaatattggttgaatattgaatgaattggtgcaattcagtgaaatgcaattacttatctaattttatgcattagtagcagtcaattttcaaatcacattcctttatgatttctagcctgggtctctacaacttgcaaccagaatatatatctcttaggccttctccatttgaagctgttgctactgatgtgtgctggttctattttgtttcctttttatctgattctgctattccccacccacttctctaaactttacttcatagaaaacctgtctatggtgtttggacaatagcacttttttttttttttttttttttaagtttcaagttatctgatgtggttttaaaatttcctgttaggagattaagacaaatgtgagttagggacataaagttccagagcttgaatatgaagatcggtaacaaagatttctttttggcaaatattttgccataattgttgcagactgtgttgatttcatagccagcatgctattatttctttcacctttcctactggaaaatggagactatttagatgctcatcatttttcatgtggtcctggtgtttcaagagcagtagattccatcctgtaactcagaagacgaatcctaactggtccagataaccatggtgatatcaattctatgctagcaactgggttataaaaggccagtaaggctagcatttgtagctaatgttggctgagcaccaactttcaaccatatattacattaagtgtttttgaagtgtgagctcattaagtttttgcaacaattttatgtgaaagtacacatgttgtctcattttacgattgaaaaaattgaataattaagagaatttgaatttgattattctatacttgacagcccttgataaagaggaattggatagattctctggaacaagctttcttggagacgtgctgtatctaggctaggacattgagattgctaaaggttctggttcatgtgtgaagaacctgaaggaaaatactctaacaattagaagatgagttatatacagttatttatgtcttccttactggttgttcttgtgtctgcctgtgattcttagaacagacacagccattttgtaatcgttaggagaaatgatgccaactaataagaatagcaaaatagaaagataactcctgggttcttgaactgctgaaatcaccacctctcaacctgcaacgagataataacgtttaaatcacgttgagtcaattatctggtatgcacatccacgtgcatcataattgtagagaccccttctgactttcttgttttaagtgattgtgattctttattgttttagtcaactgacacagaagtatttggtttttacagctgaagtcattcttattattcaaatgcaaagaaaagtaaagatattaaagatgatgagtgaaaagatatggaaccagcctaaagaggaatcttagtgtctaagaagtaacaagttgaacattaagaaacgatgagtaaatttctgcctccatgtggtagtgttacctatattcccctttgccccaacaaacacacacacggacccacacaattactgattagaaatatgtcatccagacaaaatacaaaaaaaaaa

SEQ ID NO: 42038 - DNA, 2048 bp, Homo sapiens
ttatgccccttggtcaaattctttcttctgaggaggcaaaaactgaggttgctgcaaacctgtagagattcaccaccagtaacaaaatcaataatctaaacttccaccttaagaaaactgaaaaaagaagagcaaactaaaccaaaagcaagaggaaagaaagtaatgaaaatttaagagaaaataagcaaaatacagaatagaaaagcaataaaaagaatcagtgatatcagaagttactayttttaaagattaacaaaatggataaaactttgactagaatgaccaagaaaaaaaggagagaagactgaattactcattgtgtgtcctctttgctagacggcacactccctaaaaaaatggctataattgttttgctcaatactggatctttagcacatacttatttcagtgtttggaacaacgtaagtgtgcattaaatattggttgaatattgaatgaattggtgcaattcagtgaaatgcaattacttatctaattttatgcattagtagcagtcaattttcaaatcacattcctttatgatttctagcctgggtctctacaacttgcaaccagaatatatatctcttaggccttctccatttgaagctgttgctactgatgtgtgctggttctattttgtttcctttttatctgattctgctattccccacccacttctctaaactttacttcatagaaaacctgtctatggtgtttggacaatagcacttttttttttttttttttttttaagtttcaagttatctgatgtggttttaaaatttcctgttaggagattaagacaaatgtgagttagggacataaagttccagagcttgaatatgaagatcggtaacaaagatttctttttggcaaatattttgccataattgttgcagactgtgttgatttcatagccagcatgctattatttctttcacctttcctactggaaaatggagactatttagatgctcatcatttttcatgtggtcctggtgtttcaagagcagtagattccatcctgtaactcagaagacgaatcctaactggtccagataaccatggtgatatcaattctatgctagcaactgggttataaaaggccagtaaggctagcatttgtagctaatgttggctgagcaccaactttcaaccatatattacattaagtgtttttgaagtgtgagctcattaagtttttgcaacaattttatgtgaaagtacacatgttgtctcattttacgattgaaaaaattgaataattaagagaatttgaatttgattattctatacttgacagcccttgataaagaggaattggatagattctctggaacaagctttcttggagacgtgctgtatctaggctaggacattgagattgctaaaggttctggttcatgtgtgaagaacctgaaggaaaatactctaacaattagaagatgagttatatacagttatttatgtcttccttactggttgttcttgtgtctgcctgtgattcttagaacagacacagccattttgtaatcgttaggagaaatgatgccaactaataagaatagcaaaatagaaagataactcctgggttcttgaactgctgaaatcaccacctctcaacctgcaacgagataataacgtttaaatcacgttgagtcaattatctggtatgcacatccacgtgcatcataattgtagagaccccttctgactttcttgttttaagtgattgtgattctttattgttttagtcaactgacacagaagtatttggtttttacagctgaagtcattcttattattcaaatgcaaagaaaagtaaagatattaaagatgatgagtgaaaagatatggaaccagcctaaagaggaatcttagtgtctaagaagtaacaagttgaacattaagaaacgatgagtaaatttctgcctccatgtggtagtgttacctatattcccctttgccccaacaaacacacacacggacccacacaattactgattagaaatatgtcatccagacaaaatacaaaaaaaaaa

SEQ ID NO: 42039 - DNA, 673 bp, Homo sapiens
atcctagcactttgggaggctaagacaaggcggattgcttgagcccaggagtttgagaccagcctgggcaacacagtgagacatcgtgtctagtataaataaaaaattagccaggcatggtggtgggcacctgtggtctcagctacactcaggaggctgaggtgggagggtcacttgagcccaggaggttgacgctgcagtgagctatgattgtaccattgccctycagcctgggcaacagagtgagaccctgtctcaaaaagaaaagaaaaaaataatcttaggctgagagactgattgtggcaccgcctgttttcagtgatgaaatgtgagatgattctgcctgtttcagggtcaggaggattctttgcttaaaaaattctgcaggttgcttcgtgttctgtggctatgattgctaagtaaatataaagtgtgactgagtctaagttaactaagtacaaattgacctggtaagaaatgacttctttagggtcattgaggcgtctttcagtttcggaacttactggttaaagagaaaagcccaggccttatttctgttctgagcccttttggaacaaggtagaatgtaaataaatacatggagccaagcggcccattcttcagcatctacatgatcatttctctgtttgcagaatgctttaggatgacttat

SEQ ID NO: 42040 - DNA, 769 bp, Homo sapiens
gggcctgcaaggtttccccactcacaacatgccccccaaagacactttcccaatagacacagtagcacttgtcatggggagccctctctcgctaaatatggacacagtaggcagrgccagccatcttgcccagatgcttttctgggaggtggagggaggggaagaagagagttccaaagaactgagtgttgcttcactctttggggtcattacctaactcatactgccaaagcgactgtatgcccgggagccttctggtcataagagtgtgtcagatggcagggaacactccctggttgctaatagagaagcccgtgcagtaggtggggggagagaacaaaccccatatgcaatctgccatttgacctgggccatgccttagaatgttctgtaggctcgggtgggcccgcagcagggcagccatgccggcagcacagcacaggccagtgtcagtggcagagcgggtggcttggccacacaccccgtgtgctcaccagcacgggcctggccccacacgtaggatagagctctccagcctcatcctccagcctcctagtcaagcacatctagtgcataacagaaaagactggaagacaccaagaaaagatcgaacttaccaaatcttcccaccccagggtgtccatgatcaatcccagcatcctttttttcattgtttttcctgttcattcacaatggggtttcttttcccagcagcagagtatttgcccaggtgagaagcagcagaatgaaagcacccagcacaagccaa

SEQ ID NO: 42041 - DNA, 1649 bp, Homo sapiens
gataaaatcttaccttatcagatgtgacatccaaaatgttgcattttccctgtgattttattaataatgcagaagcatccttctaatagacaatatcttttatagaacattgtctttggtaataatcggagttagagtattaactaggtgatccaaagttagagcataaattgtaaacaaccgtggtggtttcagccagtctgaaagttcagaataagaaaaaaaagtaagaatttttgactggccagcaaaaagtaataatctaaaaaaaaatactgaggtttttatattactgtgaatgtgcaggaattttatattttaactgtcttttaatgtcattttatttatagcgatgtggtctctgttacccaggctggagtacagtggcacaatcatagctcactgcagcctcaaattcctgggctcaaggggtcctcccacctcagcctcccaagtagctgggtttacaggtgtgagtcactgcacccggattaattttcttataatccatttttgatcccacaaattactaaaactcaaattatatctatccccagacaaagcaagatggtaatttgtcaattttctactttgaggcctaaattattttccttaatcctctactctgctcaaattcattataaaaattaacaatttaccatctcacttcacatgaagaagataatattatagaatgtggatcctaggatagaacaaccaaatgctacctggggacagatgaacatgcatgtatgcgtaacttgaattgttccaattattcttttgcttataaaacaatttctgtatgagctccagaagccactttgaaggaacatccattagcatacaacattttctacttctggaagccaattcacaataaatctcttaccttatagagagacagaacagcacagggctctaacaggatgagtgatgcataaaatggtcttcagctgacttcccatgggatttatatttccaaacctaggaacaccatctgcctgcacggatggaatgctaagtaatgcagtcaaacaatcagtatgttatgtatagttttttagctttaagaaatctagaaaaaactgtaaaatatgtaaacaaacaagtttgtgtctaaaaattatagcacaaattagctggaaaaatacatagcttaaataaggaaggttagtgatgggctcatatttgtaartgtgattgtgattatgtagataatatgctttttcttggaaactgacgggttgctgcattcttggttataggtttaagagagagactcttttatatcgtataatgcaagtattccacgtggaaatcacaggatctgaattacagataaaatgtcagtcaaggagtccatttttggtggtttatttttcaaaagtacccaagagaataaagaaaagaatctaagaaaataaataagagaaatgtatatgttgaaattctacttacattttctcatttatttgtttgaaaaaagtatcactaattcttttacagtacagtttcaaatcagacttatttcctgtctaaacttagcctctgttaattgtgtcatatttctgcaggcatgggaaaggaaatcaatgcccctactcacctttggaagaatttcactaccaagtctccgtggttctatg

SEQ ID NO: 42042 - DNA, 1649 bp, Homo sapiens
gataaaatcttaccttatcagatgtgacatccaaaatgttgcattttccctgtgattttattaataatgcagaagcatccttctaatagacaatatcttttatagaacattgtctttggtaataatcggagttagagtattaactaggtgatccaaagttagagcataaattgtaaacaaccgtggtggtttcagccagtctgaaagttcagaataagaaaaaaaagtaagaatttttgactggccagcaaaaagtaataatctaaaaaaaaatactgaggtttttatattactgtgaatgtgcaggaattttatattttaactgtcttttaatgtcattttatttatagcgatgtggtctctgttacccaggctggagtacagtggcacaatcatagctcactgcagcctcaaattcctgggctcaaggggtcctcccacctcagcctcccaagtagctgggtttacaggtgtgagtcactgcacccggattaattttcttataatccatttttgatcccacaaattactaaaactcaaattatatctatccccagacaaagcaagatggtaatttgtcaattttctactttgaggcctaaattattttccttaatcctctactctgctcaaattcattataaaaattaacaatttaccatctcacttcacatgaagaagataatattatagaatgtggatcctaggatagaacaaccaaatgctacctggggacagatgaacatgcatgtatgcgtaacttgaattgttccaattattcttttgcttataaaacaatttctgtatgagctccagaagccactttgaaggaacatccattagcatacaacattttctacttctggaagccaattcacaataaatctcttaccttatagagagacagaacagcacagggctctaacaggatgagtgatgcataaaatggtcttcagctgacttcccatgggatttatatttccaaacctaggaacaccatctgcctgcacggatggaatgctaagtaatgcagtcaaacaatcagtatgttatgtatagttttttagctttaagaaatctagaaaaaactgtaaaatatgtaaacaaacaagtttgtgtctaaaaattatagcacaaattagctggaaaaatacatagcttaaataaggaaggttagtgatgggctcatatttgtaagtgtgattgtgattatgtagataatatgctttttcttggaaactgacgggttgctgcattcttggttataggtttaagagagagactcttttatatcgtataatgcaagtattccacgtggaaatcacaggatctgaattacagataaaatgtcagtcaaggagtccatttttggyggtttatttttcaaaagtacccaagagaataaagaaaagaatctaagaaaataaataagagaaatgtatatgttgaaattctacttacattttctcatttatttgtttgaaaaaagtatcactaattcttttacagtacagtttcaaatcagacttatttcctgtctaaacttagcctctgttaattgtgtcatatttctgcaggcatgggaaaggaaatcaatgcccctactcacctttggaagaatttcactaccaagtctccgtggttctatg

SEQ ID NO: 42043 - DNA, 572 bp, Homo sapiens
tttcttagtggagttttaatactgtaatttcctttttccttctagcctcaaagcagtttcttatactataggatgacaatctaggtttgagggctacaactttctaagctagttgcacaattactagctatttcaaaagagccataatttatattaactaagaaggaggaacagatgaattgatagatgagagtagagatggatgattaaatctgatgagaagcaagacaggttgtgctcttaaccagcagatgaacacccawaaactcattatgtacataccaatgattgtaattgttaataatgtgtatttgacaacaaataatcattcagccttaattttttcctgttaagataaaacttaacccccacttaaatggaacatatcagaaacatagagtggtttaaaatttccaaaaatacatcccccagacaccatcgtgtggggaattatattataactagttcacgggaaaatgtaatgtcctctcagctatgggatgataaaaaaatccaatgtaggctattaatagtaaatgtgtactgtacatggaatctacgagctgaaaata

SEQ ID NO: 42044 - DNA, 1244 bp, Homo sapiens
gacactgtggtttcctatattatcaagtgactctgaaggtccttgcctggtagcaatctgatattttgctaaggcttgaatttaaaacactttgcagaaagcacacctggaacaaagcctagcttctgaaatccttaagagtatgatttttttcttctctgcttgtttttggatatatagaaattctcctcaagtgattatttaaggtacacttcaggtaagctcatggtaacagagtaatgtaataaatggtaaagttccttttagtggcagaatgtattattttttgtggcatggcagtctctgttggttggtcatcccacccccatttccagacacctttttccttttttgcctctggaggagaggcgagaaaatccggtatgttcttacttcctagcctttgaggccaggattggcaatgagccaattctggacaatgagctatgtgtggaaatgtgttaaagcygtctgggggaagaccttagcttttactggtaagataaataaggctggcacgctcttttccctccctttatcccttcctgttttgcctagatctactgcaagatggtcaagtggaagaatcccagagaatcagagatacaaccaatctgatatccactgaaatctccctcctcttccctgctagcagccgcccatttctatactacttactaggtgagaaacaggaactttacttctttatgtcaccaatagtagggtgttctttctttctttctttctttttgttttttttttgagatggagtctcactctgtcacacaggctggagtgtggtggcatgatcttggctcactgcaacctccgcctcccgggttcaagcgatattcctgcctcagcctcctgagtagctgggattacagacacgtgacatgatacttggctaatttttgtatttttagtagagacagggtttcaccatgttggtcaggttggtctctatctcctgaccttgtgatccgcctgcctcggcctcccaaagtgctgggattacaggtgtgagccaccatgcccagccaccaatagtagggctttctgttatctgcagcctagagcattcctaaccaacacaaattgtattatgaattaatttagtcctgtatttagatattattattactgacaggatattctttacttttaaaatttttttaaaatttttaactttgagtacatagtaggtatacatatttgtggggtacatgagatgttttcataca

SEQ ID NO: 42045 - DNA, 1244 bp, Homo sapiens
gacactgtggtttcctatattatcaagtgactctgaaggtccttgcctggtagcaatctgatattttgctaaggcttgaatttaaaacactttgcagaaagcacacctggaacaaagcctagcttctgaaatccttaagagtatgatttttttcttctctgcttgtttttggatatatagaaattctcctcaagtgattatttaaggtacacttcaggtaagctcatggtaacagagtaatgtaataaatggtaaagttccttttagtggcagaatgtattattttttgtggcatggcagtctctgttggttggtcatcccacccccatttccagacacctttttccttttttgcctctggaggagaggcgagaaaatccggtatgttcttacttcctagcctttgaggccaggattggcaatgagccaattctggacaatgagctatgtgtggaaatgtgttaaagccgtckgggggaagaccttagcttttactggtaagataaataaggctggcacgctcttttccctccctttatcccttcctgttttgcctagatctactgcaagatggtcaagtggaagaatcccagagaatcagagatacaaccaatctgatatccactgaaatctccctcctcttccctgctagcagccgcccatttctatactacttactaggtgagaaacaggaactttacttctttatgtcaccaatagtagggtgttctttctttctttctttctttttgttttttttttgagatggagtctcactctgtcacacaggctggagtgtggtggcatgatcttggctcactgcaacctccgcctcccgggttcaagcgatattcctgcctcagcctcctgagtagctgggattacagacacgtgacatgatacttggctaatttttgtatttttagtagagacagggtttcaccatgttggtcaggttggtctctatctcctgaccttgtgatccgcctgcctcggcctcccaaagtgctgggattacaggtgtgagccaccatgcccagccaccaatagtagggctttctgttatctgcagcctagagcattcctaaccaacacaaattgtattatgaattaatttagtcctgtatttagatattattattactgacaggatattctttacttttaaaatttttttaaaatttttaactttgagtacatagtaggtatacatatttgtggggtacatgagatgttttcataca

SEQ ID NO: 42046 - DNA, 963 bp, Homo sapiens
catccttcctctggtttagagattagattagttatcttaaatgtttgaggttctttatgatgccctaagaattttaccttcttaaaaccaaacatcagactgaaggacatgcttagaatagctagaaccttaaaatttcatatttttattgactattactatttgttgaatgtatttattctatcttcacccctctatctgccttttctttaaatgaagccagcttgtaaactcaaatcctttgctgctgatataaattacartgagattaaagtcacctcataggactgcggaatcattaaaattagggcataccatgacatttgcatgacatttctgcttctgagcttgcttttgctctccctgctgcctggaatgccttcccctctcttctacagtgatacaaatccaaccaatccttctgaagctcaagccaaatccttccttgatgaatacagccccgctgatcttgcccatctctgagccctgttgccctattgtctgtgtcacacaatttggcaccttctatttcagaggttactgtttataaatcacttgatcttaattgtttcccatgtgtaagttttaccctctctgaaatctatgccttttaattttgtggatcctcacagtaccttatacaatatcagtacatagcaagaagtcaagaaatagttttttatgccataatttgcaagagcatataaatgttaaaagagtctgttaacagtgttggctgaaatggagaaatagcatggggactgtaaaagaaaaataagaaacagggaagtttagaatgatttctcccctttgaaaataaatccgaagtatgcatttgtaaaatttcacaatgagctagactagcttgagttttagtaaaaactctgaaaaaataactgcagatatttcaaattgtttgagaggaatgcctttttttcttttattgtcttcttctttagcaca

SEQ ID NO: 42047 - DNA, 963 bp, Homo sapiens
catccttcctctggtttagagattagattagttatcttaaatgtttgaggttctttatgatgccctaagaattttaccttcttaaaaccaaacatcagactgaaggacatgcttagaatagctagaaccttaaaatttcatatttttattgactattactatttgttgaatgtatttattctatcttcacccctctatctgccttttctttaaatgaagccagcttgtaaactcaaatcctttgctgctgatataaattacagtgagatyaaagtcacctcataggactgcggaatcattaaaattagggcataccatgacatttgcatgacatttctgcttctgagcttgcttttgctctccctgctgcctggaatgccttcccctctcttctacagtgatacaaatccaaccaatccttctgaagctcaagccaaatccttccttgatgaatacagccccgctgatcttgcccatctctgagccctgttgccctattgtctgtgtcacacaatttggcaccttctatttcagaggttactgtttataaatcacttgatcttaattgtttcccatgtgtaagttttaccctctctgaaatctatgccttttaattttgtggatcctcacagtaccttatacaatatcagtacatagcaagaagtcaagaaatagttttttatgccataatttgcaagagcatataaatgttaaaagagtctgttaacagtgttggctgaaatggagaaatagcatggggactgtaaaagaaaaataagaaacagggaagtttagaatgatttctcccctttgaaaataaatccgaagtatgcatttgtaaaatttcacaatgagctagactagcttgagttttagtaaaaactctgaaaaaataactgcagatatttcaaattgtttgagaggaatgcctttttttcttttattgtcttcttctttagcaca

SEQ ID NO: 42048 - DNA, 963 bp, Homo sapiens
catccttcctctggtttagagattagattagttatcttaaatgtttgaggttctttatgatgccctaagaattttaccttcttaaaaccaaacatcagactgaaggacatgcttagaatagctagaaccttaaaatttcatatttttattgactattactatttgttgaatgtatttattctatcttcacccctctatctgccttttctttaaatgaagccagcttgtaaactcaaatcctttgctgctgatataaattacagtgagattaaagtcacctcataggactgcggaatcattaaaattagggcataccatgacatttgcatgacatttctgcttctgagcttgcttttgctctccctgctgcctggaatgccttcccctctcttctacagtgatacaaatccaaccratccttctgaagctcaagccaaatccttccttgatgaatacagccccgctgatcttgcccatctctgagccctgttgccctattgtctgtgtcacacaatttggcaccttctatttcagaggttactgtttataaatcacttgatcttaattgtttcccatgtgtaagttttaccctctctgaaatctatgccttttaattttgtggatcctcacagtaccttatacaatatcagtacatagcaagaagtcaagaaatagttttttatgccataatttgcaagagcatataaatgttaaaagagtctgttaacagtgttggctgaaatggagaaatagcatggggactgtaaaagaaaaataagaaacagggaagtttagaatgatttctcccctttgaaaataaatccgaagtatgcatttgtaaaatttcacaatgagctagactagcttgagttttagtaaaaactctgaaaaaataactgcagatatttcaaattgtttgagaggaatgcctttttttcttttattgtcttcttctttagcaca

SEQ ID NO: 42049 - DNA, 596 bp, Homo sapiens
ttatctaaatatattgcaattacatgttgtcattatcatcaagatggttaactcacagttcataaattctggcaatcctaataattatctagaatatgggcaagtttaaaattcaaaatggcaactggaaggacagagtctacagaggccatcaggacgaatgtctattgggacatctgtcccaatctggcatttactakactatagatcatattcaataaaatgtatgggaggccattatttgagctcctgcactaggccacaacagaccagaccaaaccagaatggagtcactcatgctacatgccacataatcaaactgaacttagaaatgggtcagtttcccaaaatataggagattcccagcaactaatcaaaggaggaccagtgacatgagctggaatgataaagtccctctactttaaccctataaggaatgcaatttggaaatgagcaatcctttttttgttccttgtttctgctttcttcagtctttttctgcctatgaagctcacaccttctgctcatctcactcaaatgcccttctattctgtagatgggatgtggaccaatttatgaatcactaataaaatcca

SEQ ID NO: 42050 - DNA, 596 bp, Homo sapiens
ttatctaaatatattgcaattacatgttgtcattatcatcaagatggttaactcacagttcataaattctggcaatcctaataattatctagaatatgggcaagtttaaaattcaaaatggcaactggaaggacagagtctacagaggccatcaggacgaatgtctattgggacatctgtcccaatctggcatttactatactatagatcatattcaataaaatgtatgggaggccattatttgagctcctgcactaggccacaacagaccagaccaaaccagaatggagtcactcatgctacatgccacataatcaaactgaacttagaaatgggtcagtttcccaaaatataggagattcccagcaactaatcaaaggaggaccagtgacatgarctggaatgataaagtccctctactttaaccctataaggaatgcaatttggaaatgagcaatcctttttttgttccttgtttctgctttcttcagtctttttctgcctatgaagctcacaccttctgctcatctcactcaaatgcccttctattctgtagatgggatgtggaccaatttatgaatcactaataaaatcca

SEQ ID NO: 42051 - DNA, 596 bp, Homo sapiens
ttatctaaatatattgcaattacatgttgtcattatcatcaagatggttaactcacagttcataaattctggcaatcctaataattatctagaatatgggcaagtttaaaattcaaaatggcaactggaaggacagagtctacagaggccatcaggacgaatgtctattgggacatctgtcccaatctggcatttactatactatagatcatattcaataaaatgtatgggaggccattatttgagctcctgcactaggccacaacagaccagaccaaaccagaatggagtcactcatgctacatgccacataatcaaactgaacttagaaatgggtcagtttcccaaaatataggagattcccagcaactaatcaaaggaggaccagtgacatgagctggaatgataaagtccctctactttaaccctataaggaatgcaakttggaaatgagcaatcctttttttgttccttgtttctgctttcttcagtctttttctgcctatgaagctcacaccttctgctcatctcactcaaatgcccttctattctgtagatgggatgtggaccaatttatgaatcactaataaaatcca

SEQ ID NO: 42052 - DNA, 622 bp, Homo sapiens
tagaaaggggtacttctgcctgtaacacccaacaaaataagtgagggggctacaagtaaaccccttagggaatttggaggtaattgtataataggagattgtcaccccacttcctacctgtttattttgtgacttgcaaaaattgactgcctcctcccttccccatgcatgacagcattcttgggagagtctgatgtgtgcttctggagtgaggaggcccagagctggtgtgggatgtgctggagaagtctgaagatgcaaggctggttggaacatctctatggtggggtgaggaggagcggtacagtgggaacaagctgtacttgcatcatttggagggtgggagatcaggaactctaataagccaggtagatgctgtggctgtaagttaagctagagctgtctcaaactggcactgtccaagaagtctaccarccggggtaaggagactcaggggtatatgtctgaggtcagaggcttagggaaataggtcagtgggaaaatcacctacattagtgactggtatagtaaggagcactctaaaaaatccacaaaagtagccacaaagattccttgatggccagattataccagataatgccagttaagtaaaatcctatcc

SEQ ID NO: 42053 - DNA, 622 bp, Homo sapiens
tagaaaggggtacttctgcctgtaacacccaacaaaataagtgagggggctacaagtaaaccccttagggaatttggaggtaattgtataataggagattgtcaccccacttcctacctgtttattttgtgacttgcaaaaattgactgcctcctcccttccccatgcatgacagcattcttgggagagtctgatgtgtgcttctggagtgaggaggcccagagctggtgtgggatgtgctggagaagtctgaagatgcaaggctggttggaacatctctatggtggggtgaggaggagcggtacagtgggaacaagctgtacttgcatcatttggagggtgggagatcaggaactctaataagccaggtagatgctgtggctgtaagttaagctagagctgtctcaaactggcactgtccaagaagtctaccagccggggtaaggagactcaggggtatatgtctgaggtcagaggcttagggaaataggtcagtgggaaaatcacctacrttagtgactggtatagtaaggagcactctaaaaaatccacaaaagtagccacaaagattccttgatggccagattataccagataatgccagttaagtaaaatcctatcc

SEQ ID NO: 42054 - DNA, 1120 bp, Homo sapiens
tttcccatcatttgttattataagatgaaattatgtatgtacaaaaaattcacaaagctgcagtgtactctatatacaygtaatatgttgctactaattaaaaaggaggatcttttcctccacatctgcaggatgtggactcagctcatcaaaagacaatatgggtatctctttgtgaacacctgctctcaaggaacaagcaatctacatgaaggtcaaaatgcaaaactcaaaagcatcccaaacaaggtgggatgtggcaagatacagagggagtggcagaagtcagaggagaaaatgatgactctaggctgaaatagatccttggaatatgagcagcaccaaacagagatggtcctggagacagagtgggcgacagcggagaacatcggcctgccaaggggcagcaagcccagccatgtgtccactgcagagtgctcatggggcctgggagtataggaatgaggttgaacagagagaatgggaaaagaccaacaaggaccttagtggccagataaacaggtttatgacacccactggcaataaggggcctctgaagtcagtgaccctggatccaaacatagtcactctaatgcacatggacaataggcaaggcagggacttatatctataccatgccctagctaggattcaattgctctgagtgggtattgcctcagtaccctaaactgggatggatgttttgctctggcagaacaacaacaacaacaataataataataatgatagctaatctttatttagaacttcccatggtacagtctctgtgccaaatgctttgccttgtcttgacagtcccacagaggggtaatatcattacctgccttttacaaacgtcagcctcccaaaacagaagccacagttctgccccacacattgcagagtcctattttacttttcattattacttacaataaaaatataaaaacacaaggcttttctaaaaagggtttatatcaaaaaaagaaaggaacacttggttcactgctaatactcccacaaaaaaaaaaaaaaactgttttgtgcttattttaaaatcaacttttgagcaatgtgacttatttttatattccctgccttgttctgggtaaaaatttag

SEQ ID NO: 42055 - DNA, 1120 bp, Homo sapiens
tttcccatcatttgttattataagatgaaattatgtatgtacaaaaaattcacaaagctgcagtgtactctatatacacgtaatatgttgctactaattaaaaaggaggatcttttcctccacatctgcaggatgtggactcagctcatcaaaagacaayatgggtatctctttgtgaacacctgctctcaaggaacaagcaatctacatgaaggtcaaaatgcaaaactcaaaagcatcccaaacaaggtgggatgtggcaagatacagagggagtggcagaagtcagaggagaaaatgatgactctaggctgaaatagatccttggaatatgagcagcaccaaacagagatggtcctggagacagagtgggcgacagcggagaacatcggcctgccaaggggcagcaagcccagccatgtgtccactgcagagtgctcatggggcctgggagtataggaatgaggttgaacagagagaatgggaaaagaccaacaaggaccttagtggccagataaacaggtttatgacacccactggcaataaggggcctctgaagtcagtgaccctggatccaaacatagtcactctaatgcacatggacaataggcaaggcagggacttatatctataccatgccctagctaggattcaattgctctgagtgggtattgcctcagtaccctaaactgggatggatgttttgctctggcagaacaacaacaacaacaataataataataatgatagctaatctttatttagaacttcccatggtacagtctctgtgccaaatgctttgccttgtcttgacagtcccacagaggggtaatatcattacctgccttttacaaacgtcagcctcccaaaacagaagccacagttctgccccacacattgcagagtcctattttacttttcattattacttacaataaaaatataaaaacacaaggcttttctaaaaagggtttatatcaaaaaaagaaaggaacacttggttcactgctaatactcccacaaaaaaaaaaaaaaactgttttgtgcttattttaaaatcaacttttgagcaatgtgacttatttttatattccctgccttgttctgggtaaaaatttag

SEQ ID NO: 42056 - DNA, 1120 bp, Homo sapiens
tttcccatcatttgttattataagatgaaattatgtatgtacaaaaaattcacaaagctgcagtgtactctatatacacgtaatatgttgctactaattaaaaaggaggatcttttcctccacatctgcaggatgtggactcagctcatcaaaagacaatatgggtatctctttgtgaacacctgctctcaaggaacaagcaatctacatgaaggtcaaaatgcaaaactcaaaagcatcccaaacaaggtgggatgtggcaagatacagagggagtggcagaagtcagaggagaaaatgatgactctaggctgaaatagatccttggaatatgagcagcaccaaacagagatggtcctggagacagagtgggcgacagcggagaacatcggcctgccaaggggcagcaagcccagccatgtgtccactgcagagtgctcatggggcctgggagtataggaatgaggttgaacagagagaatgggaaaagaccaacaaggaccttagtggccagataaacaggtttatgacacccactggcaataaggggcctctgaagtcagtgaccctggatccaaacatagtcactctaatgcacatgsacaataggcaaggcagggacttatatctataccatgccctagctaggattcaattgctctgagtgggtattgcctcagtaccctaaactgggatggatgttttgctctggcagaacaacaacaacaacaataataataataatgatagctaatctttatttagaacttcccatggtacagtctctgtgccaaatgctttgccttgtcttgacagtcccacagaggggtaatatcattacctgccttttacaaacgtcagcctcccaaaacagaagccacagttctgccccacacattgcagagtcctattttacttttcattattacttacaataaaaatataaaaacacaaggcttttctaaaaagggtttatatcaaaaaaagaaaggaacacttggttcactgctaatactcccacaaaaaaaaaaaaaaactgttttgtgcttattttaaaatcaacttttgagcaatgtgacttatttttatattccctgccttgttctgggtaaaaatttag

SEQ ID NO: 42057 - DNA, 1146 bp, Homo sapiens
attcccatgacataaactcctcctacgaggccccatctcccacactggtgattgcaattcaacatgagatttggtgggaacacatattcaaatcataccaagtggyatatttggggctaattaagcaatcttgcataagtgaaatgtgaagcttaaactcttcattctccttccaccaaatcactgtgttcaaccattctttgttgaaaattcatttttttccaactaaattttcagtcactgtggttaacttattaactcctaagtgcagttgaaaactctagtctcacattggattcagatcttcaccccttgctattctcagtcatattttgcctcctggacttgaagtaggggcaaggcatacaggttctattctttccgtccttctgtcacctcttccaatttggtacagatagaaacagcaggagagatgaaaggagtgttggtttgggaacactttctcctcttctttcctcttctatatctgtctctagtgttgaggaaagaagagaataatggaaaatatagtagaggttgaatttaccacactgtctgatgttgattataccctagtgtcattccagcctgtggtggtcaataatttgatgatctccatctagattgtgtgcctgacttgcttgggatggtacttatgaattgtcctagccagtaaatcacacctaacggcctcattagggaagggggcaccctttcccttggcagccacctgggctattacaagggtcctgccaattccttatcctccctgttcctctgtgtggacccaaaggaatcaccaagttcttcttctaatgacatctgtagccatgtaaatgagatcaggtgatatgtaaaccacatcaggagacaggtaagcccacttcttcaaaagcaccctatttcatggtcctttctcactctcctggtgcccaagggccctgcaaccatcacttccaccttcagaaatatccagtctctgagttaacatacgtgcccatactccaggctccccacagaacagtgctaactgcagttgagagcatcgggatggggatgcagctctttgcagattaacaaacagccatacagaaagcaaggtgcccacctttccttcatgcagaaagctctgaggaatcctttgga

SEQ ID NO: 42058 - DNA, 1146 bp, Homo sapiens
attcccatgacataaactcctcctacgaggccccatctcccacactggtgattgcaattcaacatgagatttggtgggaacacatattcaaatcataccaagtggcatatttggggctaattaagcaatcttgcataagtgaaatgtgaagcttaaactcttcattctccttccaccaaatcactgtgttcaaccattctttgttgaaaattcatttttttccaactaaattttcagtcactgtggttaacttattaactcctaagtgcagttgaaaactctagtctcacattggattcagatcttcaccccttgctattctcagtcatattttgcctcctggacttgaagtaggggcaaggcatacaggttctattctttccgtccttctgtcacctcttccaatttggtacagatagaaacagcaggagagatgaaaggagtgttggtttgggaacactttctcctcttctttcctcttctatatctgtctctagtgttgaggaaagaagagaataatggaaaatatagtagaggttgaatttaccacactgtctgatgttgattataccctagtgtcattccagcctgtgrtggtcaataatttgatgatctccatctagattgtgtgcctgacttgcttgggatggtacttatgaattgtcctagccagtaaatcacacctaacggcctcattagggaagggggcaccctttcccttggcagccacctgggctattacaagggtcctgccaattccttatcctccctgttcctctgtgtggacccaaaggaatcaccaagttcttcttctaatgacatctgtagccatgtaaatgagatcaggtgatatgtaaaccacatcaggagacaggtaagcccacttcttcaaaagcaccctatttcatggtcctttctcactctcctggtgcccaagggccctgcaaccatcacttccaccttcagaaatatccagtctctgagttaacatacgtgcccatactccaggctccccacagaacagtgctaactgcagttgagagcatcgggatggggatgcagctctttgcagattaacaaacagccatacagaaagcaaggtgcccacctttccttcatgcagaaagctctgaggaatcctttgga

SEQ ID NO: 42059 - DNA, 1146 bp, Homo sapiens
attcccatgacataaactcctcctacgaggccccatctcccacactggtgattgcaattcaacatgagatttggtgggaacacatattcaaatcataccaagtggcatatttggggctaattaagcaatcttgcataagtgaaatgtgaagcttaaactcttcattctccttccaccaaatcactgtgttcaaccattctttgttgaaaattcatttttttccaactaaattttcagtcactgtggttaacttattaactcctaagtgcagttgaaaactctagtctcacattggattcagatcttcaccccttgctattctcagtcatattttgcctcctggacttgaagtaggggcaaggcatacaggttctattctttccgtccttctgtcacctcttccaatttggtacagatagaaacagcaggagagatgaaaggagtgttggtttgggaacactttctcctcttctttcctcttctatatctgtctctagtgttgaggaaagaagagaataatggaaaatatagtagaggttgaatttaccacactgtctgatgttgattataccctagtgtcattccagcctgtggtggtcaataatttgatgatctccatctagattgtgtgcctgacttgcttgggatggtacttatgaattgtcctagccagtaaatcacacctaacggcctcattagggaagggggcaccctttcccttggcagccacctgggctattacaagggtcctgccaattccttatcctccctgttcctctgtgtggacccaaaggaatcaccaagttcttcttctaatgacatctgtagccatgtaaatgagatcaggtgatatgtaaaccasatcaggagacaggtaagcccacttcttcaaaagcaccctatttcatggtcctttctcactctcctggtgcccaagggccctgcaaccatcacttccaccttcagaaatatccagtctctgagttaacatacgtgcccatactccaggctccccacagaacagtgctaactgcagttgagagcatcgggatggggatgcagctctttgcagattaacaaacagccatacagaaagcaaggtgcccacctttccttcatgcagaaagctctgaggaatcctttgga

SEQ ID NO: 42060 - DNA, 504 bp, Homo sapiens
gctttataaagtgaaaagtcactatttatataacctctttagaaagtctggtttttagaaatcagcttgaccagaagctacgtttttatttggctggtgtgttactgttgtcgtgaggtttcacaggtraggctaagtttggaaccaagtttgagtgctgaatgcctttgaatcactctccttccttccttcacaaaatcttttattctcttctacatgttcagggctaagcgcttggagataatttcctatgtgtcatttgcatttctgcatgtttgcctggcaagacattgacgtccttttttttttttccccagactttcatttcaaggaatgtttgtatcctgaatggccttggaacacagatatagggtttccctccatgcatatattcttcagtataataaatataatgtttctctctgaagcaaagggcagtcagatttactgcccattataaaatatttgggttctctgagctcagagttctcttataacacaacc

SEQ ID NO: 42061 - DNA, 624 bp, Homo sapiens
ttatgattttcacaggttttctacaaagaaactattatatcaggtgcatggctcatgcctgtaattctagcattttggaaagccaaggcaaaaagattctatgagtctaggagtttgagaccagcttgggtaacacagggagacgccatctctacaaaaaaaaaaaaattaaaaaattagccaggcatggtggtgcatgagtgttatcctagctactcaggaggctgaaaagggaggattgcttgagcctgggaggttgaggctgcagtgagtcatcattacgccactgcccttgagcctggrcaattgagcaagatctcatctcaaaataaaataaatagaataaaatagaaactattaagtccatttatgccaatgtactagattcattatgcattgactataataccagtgttaatgtgtcatgggaagaaaatgtaatcacaatttagtattgataatggcatttactatcctctaggaggaagaatctagaactaaaggtaacctgtggataaagaatttgaaaatcttcaggttgtggtccatgtataattttagaatttacattttatccagccagtgggatgatgggggcgtcagatgtattggcatggttcaaaa

SEQ ID NO: 42062 - DNA, 876 bp, Homo sapiens
ttttaaaaggttcccatgaaatactgaaatggagaaacaaataaatttattctttaattcataaagtatattgggaagaaagatagctgttgattggtaaaaaactctactgtatttttgtttaaactgaagaatgtggttgatgtaaaaacaacttctcctcacttttttttccagttttcttctttatgttgacaatttcccrctattttgaaggacattactaacgtgtaaaagtcccttctttcttactgcaagtaagcctgttttcaaatttaggcagaaggaaaaaattcctttttctttctttaatttaagcagactgtgcctgagtgcatttttttaaaaggctgcagaggtaaaactaggccacagaagtgatattagctccaggaaaaatagtctgatttacacttgaatgcagttatttcaacttttcaagtaatgtaatcttacagagatctccattccaaaaatatgacaatgtacaaagtagaaaaatcaaacttcacaggatcattttatttccattaaattccactctgaatattgcagaaggtaatatttagttttattattattaattccaaatataacaaatagtggtctccatctgggttgatttattatcatttaaaatagtagaacattttaagctttcactttatagaagatagcataggatatgttccaaactactgtttcttcaattccccttttgctaaaagtagaatggtctagattcttagaaagcatgtattatagacaggactatttttgagaaaacaacagtaattggacttgtaattattaaaagatttatacatgaatgccttgagaaaacaataataacacatgaagagttattagagaata

SEQ ID NO: 42063 - DNA, 876 bp, Homo sapiens
ttttaaaaggttcccatgaaatactgaaatggagaaacaaataaatttattctttaattcataaagtatattgggaagaaagatagctgttgattggtaaaaaactctactgtatttttgtttaaactgaagaatgtggttgatgtaaaaacaacttctcctcacttttttttccagttttcttctttatgttgacaatttcccgctattttgaaggacattactaacgtgtaaaagtcccttctttcttactgcaagtaagcctgttttcaaatttaggcagaaggaaaaaattcctttttctttctttaatttaagcagactgtgcctgagtgcatttttttaaaaggctgcagaggtaaaactaggccacagaagtgatattagctccaggaaaaatagtctgatttacacttgaatgcagttatttcaacttttcaagtaatgtaatcttacagagatctccattccaaaaatatgacaatgtacaaagtagaaaaatcaaacttcacaggatcattttatttccattaaattccactctgaatattgcagaaggtaatatttagttttattattattaattccaaatataacaaatagtggtctccatctgggttgatttattatcatttaaaatagtagaacattttaagctttcactttatagaagatagcataggatatgttccaaactactgtttcttcaattccccttttgctaaaagtagaatggtctagattcttagaaagcatgtattatagacaggactatttttgagaaaacaacagtaattggacttgtaattattaaaagatwtatacatgaatgccttgagaaaacaataataacacatgaagagttattagagaata

SEQ ID NO: 42064 - DNA, 585 bp, Homo sapiens
gtacagataatacaggggttattaacacattattttagccagatagtaagggtaaaggttctcggtggaaattttcctataataagaaacaacccctgaatcatctcttttataacagaaaaggtggcttaaagggccaggccagcaagctttgatatgcaaatgccagccattagaaactggcttcactcaatatagtgattcccgccatcttctccttgtcaccacttgtgccaagtgtgatggccgcctccagataacaccatgtgttcaaacatcatagtgamccacctttgcattttacagggctaaggtgggagggccaggttttttgcaggctacgtgaatgacacacctggtcaaaccaatctcctgggttttaagaacgaattcttttcttatctctattattatcattactcaatcaagttgtccagtccagggctactcaaaggatggtccaaaaactggcagcatctgaatgcaaattattgggccctaactccgcgtactgagttagaacatctggggcagacccaggagtttctccaggtgattcttttacacattagagttcagaaacat

SEQ ID NO: 42065 - DNA, 585 bp, Homo sapiens
gtacagataatacaggggttattaacacattattttagccagatagtaagggtaaaggttctcggtggaaattttcctataataagaaacaacccctgaatcatctcttttataacagaaaaggtggcttaaagggccaggccagcaagctttgatatgcaaatgccagccattagaaactggcttcactcaatatagtgattcccgccatcttctccttgtcaccacttgtgccaagtgtgatggccgcctccagataacaccatgtgttcaaacatcatagtgaaccacctttgcattttacagggctaaggtgggagggccaggttttttgcaggctacgtgaatgacacacctggtcaaaccaatctcctgggttttaagaacgaattcttttcttatctctattattatcattactcaatcaagttgtccagtccagggctactcaaaggatggtccaaaaactggcagcatctgaatgcaaattattgggccctaactcygcgtactgagttagaacatctggggcagacccaggagtttctccaggtgattcttttacacattagagttcagaaacat

SEQ ID NO: 42066 - DNA, 538 bp, Homo sapiens
tttaatgattcctgccttataaaccctataatgattttctttcctaatttttctatgagactgcttgagaaggasggagaaggaaaagctctcgacactgtgaaatagcttactggaagagtaagcatttaagctcgtgcaaaaataattgtttctttaaaaactgccttttcgctacagctacacttttcttgtcatttccttttgctctccagttttaaattacacagactttcgtagagtgcccactctccctttctcacctattcattgtggaaagattcctgtcagggctaatctttaataagagaggcagttacagtaactatagggcgaagaagggaacagtaaaagttgagcccactcagatgtcatggacctgaaaggtgctggtgggttggaagcttcattatgctcagctgctacaagagatttcctctttttagattgattaagaaaaggggctcagatgacaggttaataggctgcccctcaccagccattgtggctcatccaggagtgggcacaccatgggaag

SEQ ID NO: 42067 - DNA, 574 bp, Homo sapiens
aagcaatctcaagcaagcccacaacaacataaatgtcatttctttactttgggattatatacagaggcctgatgtttctttaaaaaaatcagtatgtaatacttgatacttaggaataaatgtaagttacaaagcagtatgataaaatgagcacaatactgttaaaactgagaagctatcctgaatttttcttgaagtctgactgttttctaaatattttatagcaggaaatagacatttgggggaagaattgggtatttccatycttttaattgaagagataccttttgaatgattatattttttcagctgtcatcaggtattactttatataacaactgcattttaaagtattttctttagctttgataatctcacatcaagcatagttataaatatcaagcatgattatttatgagttgtaataacatggcatattctatgaattttttaaggaagagattttctttctcagatgggaaaacaaagtgctgttggtaagtaaaaatgcataagtcaatagataaaacaatataattcatagttgctaaagaaaacagtatcatatgctggg

SEQ ID NO: 42068 - DNA, 762 bp, Homo sapiens
atgattcacagttctgcgaatgatgagaacatgttttcctgcctccctccctaccgcagagctgaactttatgtctcagggaggcccacaaaggagaaggaacagtcttgggtctgacactccctgtctcatccctcacccccttggcgactccatttgccagaggcggggccccagcattcaggggttgtggggggttcggtggcctggagttaggtgctaagacaggcgttcagtgcattggcccaacaacttrtgtggtcattggcgccgttcccgtttcccagagaaggaaatcaaggctcagcaggattaggtggcacgcagatgggtccacagatggggtctctcccatacccccaacagccacaaacagcaggccaaaggatgctccaccccatgcttcctgtgggaaggccctcctccctccctgatgcagttgggcaagggtctgggtactggggagacagggacttcgtgagctacccttgggtaatgacagagagagtgtggaacacggatgggagagtcttttccctaatccaaaggaatgatgccttggtggtgaatttgaggcactaggacagcttccaacagggtggagggatctcgccagagtctgagcaccactgagctatagaatgtgtgggctgaactggtcctagcacccaacctatggtacaggtggggaaactgggaccagcgagggctaaggacttggcctcttgtccctgtcttttctgcctttcagtggtggagatg

SEQ ID NO: 42069 - DNA, 554 bp, Homo sapiens
taccaggacatacatacaatgtcccatatgcctttttctgtctcactttttgaaaaataccatcttttccctcaagtaactaaaaacaaaagcatttattgtagagtattaggacgatttaatctagaaaagtgtcacaggacatcaactcccatttaacagactgattctggccyacagtgttcctacaaagagacaagcagtccttgagccgctgtctgaaatacacacagttctgcccaccacactatgtctgtcgcttattttaagttacacactgaacgtaccctgatgcacttgtctttgtgtgcatgtcttgctccccagttacacagagaagaagccttcttacacctcttcaacatctcccatgagcaccctgcacacagacagcacgtatgagtgaggaggaccaggcggttctctgctaaggggaggctcttgatgcagtcgggcccactggttcttctccactttcctccagagtcaggatcctttccacttccccaaccggaaaacagaggcacagagaagaaacaggaacggtgaagcag

SEQ ID NO: 42070 - DNA, 538 bp, Homo sapiens
agaaaggctacatcccggaggggcagggtgtgggagtcacatcagggctggtgagtcagagacgagggaggatgtgaacacgttctgtgctgtcttgggccccgccaggctcatgtgtggctttgctccggcacacgtgtgtcacatgctctggaactgtggaatcctctggcatgtcaggcgggctcattccatgggggcaggaacagagagcmcagtcattcgcacgttcatctgttctatactgcttgcctcccactggctggtctcctgctgggtgctgggaacacagttacaacatgaatgaacccataaggtctttgtttacgcggagcttagggccgagacaggagtcaggtcttaatcaaataaccacacgaatgaacacaccggccacaggcccagctgaaaccttagcaccgcgcggctgctggaggtccctgacggtggtctaggcttcacattaacaaaggaaatgacactgggaggcctgacttgtttttcatgactgcaactgtctcttgatgatcttctctcc

SEQ ID NO: 42071 - DNA, 600 bp, Homo sapiens
ccagtcttaggttgacggcatggcatcacagagcctatcccccatgtaaaccccgaaggacgttgcccatcccgacttcagagtttgaagctattcctttcaaacaaactcatagctcacctataagtaaccagtaactgcttatatgtctctaatactttaactttccttgaatttgtttcactaattttcctgcatgtgaaattgaaagtgtgttacctgccacccatgtgcactgtgacaatagtgaagaatgtgaaggaagcattatcagtctgtaaaaacgttcatgaggcaacttatcatggactaattttaggtctcattgagagtcactttttccttcctttgcccccrtctgtctgtgcatgtgcacatatgcatacatttgacatgtttccagtgggcattctatgttatgttatggtggctgcaaaagccacagtgaggagctgggggtggctctaaactggaaatggtagtgtccattcatgtgctagtttcgaattgccattgcttttgtatatgcattatcaagtaagagactaagtgagaattatcgttatcttcatttttagagatcaggagccaggctcagtg

SEQ ID NO: 42072 - DNA, 600 bp, Homo sapiens
ccagtcttaggttgacggcatggcatcacagagcctatcccccatgtaaaccccgaaggacgttgcccatcccgacttcagagtttgaagctattcctttcaaacaaactcatagctcacctataagtaaccagtaactgcttatatgtctctaatactttaactttccttgaatttgtttcactaattttcctgcatgtgaaattgaaagtgtgttacctgccacccatgtgcactgtgacaatagtgaagaatgtgaaggaagcattatcagtctgtaaaaacgttcatgaggcaacttatcatggactaattttaggtctcattgagagtcactttttccttcctttgcccccgtctgtctgtgcatgtgcacatatgcatacatttgacatgtttccagtgggcattctatgttatgttatggtggctgcaaaagccacagtgaggagctgggggtggctctaaactggaaatggtagtgtccattcatgtgctagtttcgaattgccattgcttttgtatatgcattatcaartaagagactaagtgagaattatcgttatcttcatttttagagatcaggagccaggctcagtg

SEQ ID NO: 42073 - DNA, 536 bp, Homo sapiens
tcttgtcactcctttgaaggctgtgaatctcccctgtgcctcctccgcctacccccagctgcacataaagttttccctttttctttggttttcatcactgttaactatgttgtgccttgaaattttctttgtgcttctcttgcttgggattcttggagtttcttcagtctatcggctgatactttgatatcagttttagaaaatccagaattcaagatcttttcaatattgcttctgctgcattctctcttccctttctggatcttgcacttacactgtgtttcacatgtctcttattggtcttttctgtattttccatgttttatttttgaatctctgggctttaatttggtgttttcttttgacctgtcaagttcaaaaatcctgatttctgctgtttaatcttcttttaatgccatttattttaatttttggttcttcagttgtacaattttcattkgtttcttcctgtagatttcagttctctagtgaaaattgctatttttaaaatatattccttttatcttttcctctat

SEQ ID NO: 42074 - DNA, 528 bp, Homo sapiens
ttccatatcttaagctattttgatgttgaatatataacttgcacaaaatgttgacatttgccatcaaccatcatcaggagacataattgaacatatgtaaatagaagatgacaaatttgctaaggcagcatcattgtgtactacaaaagttaatacatctctttcagagattgtgtccaaagaaaactccttaacattagcccatgcagtcgagtgtgtttttgtatcactctttgaaaagtgacatttcatttagattagatgactgctcatcccaattaatttaacttattttgatcccaacattccttttgcktataaaataaagtgatagctattatctttgacccattagtagaagcaaaattgtacaaacaattaaataatgtcaattttatgtcatgtcatcagatacttcaaatagaaaattcattccaaaagtggtttgattgttttttcattcaattcatggaatctaagtgaagcttttggaagtacttttgtcatagatgaaacacatgacattat

SEQ ID NO: 42075 - DNA, 1324 bp, Homo sapiens
acccgactaatgtttttatttttagtagagatggagtttcgccatgttggccaggctggtctcaaactgctaacctcaagtgatccmcctgccttgacctcccaaagtgctgggattacaggcgtgagccaccacccccagccctaattttcttctcatgtaaaaaataatgaattaatatgttcattatgaataatgaataatgtatcaatttccatcgctatgttttaataatggtcttggagtactaagcaatgaaattagacaagaaaaatatataaggtaaaaatgctgaataagaaagaaatattattgtctgattttaggactttatacctgaatagccaatatattttaccccaaaactattacaaacattaagacaacagagcagagtttctcattacaaaaccgatacaaaaagtttatggctttcttatataaacaaaatggaaaaccatcccatttataatagtaacatgaaagatgaatatgctatggactgtgttgtcttccctcaaaagtcatatgttgaagctctaactccagtgtgactttacttggagtaagaaagaaattaaaatggatcataaggattggggcctagtcctatagaattagtgtccttataagaagagacaacagagaacttgctttctctctgtctaccatgtgaggatacagcaagaaagcagctgtctgaaagttgggaagagagtcctcactagaaaccaaaccttgctgaatccgtgctgttgaagtttctagcctccaaaaatatgaaaaaatatgacaaatatatgacaaaatacattttctttaagccactcagtttatgatatttttaatgaaagcctaaacaggctcatacagaacacttaggagtaaaattagtagagaatgtgtatgaaataaacatttaaaaataagcaaacttaaatagatggaaatgttaccttatttgagaatagcaagactaaaatactataaaaatggcaataatctctaaattagtatacaaattcaatgtttatgaatgaaaacatcaatgaaaattttttagcaattagaaaactgctagataatatatgaatatatgttctattatatagaacatatataaataaccataaagaaatatataagacaatttcaataagtgagaatattaaagaggagtaaccaaaaagtaataaaatttaataaataaagctctggcccttggaaaaatatagatgaaagaaatatggagaataaatatatgataagaatggcattcaaattacttggggaaaatgtaatattcattcaatttttcagggta

SEQ ID NO: 42076 - DNA, 543 bp, Homo sapiens
acagagtactgggtaatactattatttttatcttcgaacctaaaacaacatgccaataggcacgctaagagccaatwtatgaccagcaaaaaaaaaaaaaaaaaaaaaaaaaaagcgaaatagggaatctatggcttattttaagtttattttttgagaaacaagttcgatgaaaattacttggggcaactgagttttgaacatagtgtcatgtatcccacggcaggctcccaggtgcacgtacagcaactctcagctccctattagcctgaatctcttcctccagctcactgctgaattcctatagagccacagtgcctaccacatcaggaggtacacagccaccagcaacatgctaggctgggaaaagatagaaaaccctttccatagtttacatagagatgagcagggatttcaatggtttctgttgtgttatttctcaagtattagatgtttataaagatgagtccaagtattgcatgtgtgtaaagaaaaataatcacccaaaatctactatgtattacctaaaaaataacaatggat

SEQ ID NO: 42077 - DNA, 567 bp, Homo sapiens
gcaaatgtacccagggcccatggaagtcataatatagttctgataacaacttttctatgatcttaattttatggatgagaaaactgaagcatgcttaagtgtcttgcccagtgctacacagctggcaactggcagagctgaaactcgtgtccaggcactctaattccagtgtttcacagaacactgtcckcagctctgcagatttgcttttcaatggagtatttcacatgaattttccagataattaaaaacagctctctacaaaaccaaaacattttgttttaataattttggatgaagatcttccatacctttgttatttactttcctgccttattaattagatcatcctgaacataaggtagtctttttcatgatgatggtatttttgtccatagctagtctttattgaatgttttttatgtacctgcactattctatgatttttgcatgtattaactaattgaattctcacaaccctatgaggcagagtttacagatgaggaaaccaatgttaagtgagattaaggtacttaaccaagttcacccagctggaaggtagcaatt

SEQ ID NO: 42078 - DNA, 567 bp, Homo sapiens
gcaaatgtacccagggcccatggaagtcataatatagttctgataacaacttttctatgatcttaattttatggatgagaaaactgaagcatgcttaagtgtcttgcccagtgctacacagctggcaactggcagagctgaaactcgtgtccaggcactctaattccagtgtttcacagaacactgtcctcagctctgcagatttgcttttcaatggagtatttcacatgaattttccagataattaaaaacagctctctacaaaaccaaaacattttgttttaataattttggatgaagatcttccatacctttgttatttactttcctgccttattaattagatcatcctgaacataaggtagtctttttcatgatgatggtatttttgtccatagctagtctttattgaatgttttttatgtacctgcactattctatgatttttgcatgtattaactaattgaattytcacaaccctatgaggcagagtttacagatgaggaaaccaatgttaagtgagattaaggtacttaaccaagttcacccagctggaaggtagcaatt

SEQ ID NO: 42079 - DNA, 567 bp, Homo sapiens
gcaaatgtacccagggcccatggaagtcataatatagttctgataacaacttttctatgatcttaattttatggatgagaaaactgaagcatgcttaagtgtcttgcccagtgctacacagctggcaactggcagagctgaaactcgtgtccaggcactctaattccagtgtttcacagaacactgtcctcagctctgcagatttgcttttcaatggagtatttcacatgaattttccagataattaaaaacagctctctacaaaaccaaaacattttgttttaataattttggatgaagatcttccatacctttgttatttactttcctgccttattaattagatcatcctgaacataaggtagtctttttcatgatgatggtatttttgtccatagctagtctttattgaatgttttttatgtacctgcactattctatgatttttgcatgtattaactaattgaattctcacaaccctatgaggcagagtttacagatgaggaaaccaatgttaagtgagatkaaggtacttaaccaagttcacccagctggaaggtagcaatt

SEQ ID NO: 42080 - DNA, 516 bp, Homo sapiens
tgtaaatagaaatagtctgttagatcttggagcttaaaatttaaatgrctgtttttacagaatgtgcctcaaaaacgtctagaacatccttaaaccatctcccaaacactaaaagctcagtccaaaaatgtgaacacagtaggtcagcaaatacattgtgtaactcactgagcaattgctatcttatgttggggatgactgagaagaggaggaaaaccatctcttccaggatgtcttgcttatttgatttataaaggagatgcaatttaaaggattgcttaggaaaataggaagaaaaggtttggaaaagctcacagggaagaacttttttttttttttgaaacagagtcttgctctgttgcccaggctggagtgcagtggtgccatcacagctcactgcaagctccatctcctgggttcatgccattctcctgcctcagcctcccaagcaacaaggactacaggtgcctgccaccacatccagctaatttttttgtatttttagtaaagacaggg

SEQ ID NO: 42081 - DNA, 980 bp, Homo sapiens
cccatattacccatagtggttatctttaaaaatgggacactgttaagataatcctatcaaaggattaagaaatagcaatatagagataggaggaatccaatcaaagattaaagtgtgatgtccaagagatatgtcagcatttccagggggtatacaatggtgtactagtttcttctgagggtaatagatactacacaaaaacaaaaaatatgaaaaggggtaagttaaatgttgttgaacagatttcttcactgtcaagagtattcagaggaaatgtgcattgtgaaactccaaaagggaggtgtgtgatacatgcatgtctgttcctccctcatcacccctacttttccttttgggagcaaaatgctgcttgcactgggattttttttatcagagcgttcagttcataccacccttttctaaactagtagatatggctgctccctcagggtagtatgtagattagttttatagggcctttctatgggaaagaaagggtttcagcagggcatgtataggaggggcttctctggtgcttgcatagtggccttacatgtttcttcatacatctcatgtaacataatgaaattttaaatccccatccttgggtatgatctttagcattaaaatgagggaggggtaactttaagttgaactgcgcagacaggaccctggagcagtccctaacccgctaaaccagggacttgaggttaatggcttcttgggtcttttgttgctgattggctggaagttgggtaagctacagcttgggtaagaggcttgttcyttctcctctaaaccacagcaaaacaggaaaccagacagcctgcctgtctcaaaatgacccagtgtaggcaaatcaggttctccctctgaggaatgtgccacttttagcagatggacacagaggtaaaacttagggccatgaagcatcactactttattcctgctaaggggttccccttccttcccagggccta

SEQ ID NO: 42082 - DNA, 536 bp, Homo sapiens
acctcggcctcccaaagtgctgggattacaggtgtgagtccccgtgcccrgccatttctattttttaatagaaaagttgccagtgtccctttcattcttacagtttcaccaaaaacaaagagggaagtgatatatatttaattaaaagaaaaaaaaatcttaagaaaagaaggggacaggtacagtggctcatgcctgtaatcccagcactttgggaggccgaggtgggaggatggcttgagcccaggagttcaaggatgcagtgagccatgattgccccactgcatcccagcctgggtaacagagtgagactctgcctctaaaaataaaaataaaatacctaaatagtttaattgttttattgtgaaattcattttcagaattttctctcaaacttataacctcaaattaatcactctttataagctaattttgctagatacaaaaataatctctcaattgaaaagcactgtttactgatgctataccataaagttataaaaagaaggtttttctgaacttgggaatcccctgag

SEQ ID NO: 42083 - DNA, 545 bp, Homo sapiens
agtctctggactagccctgcggctcacctgccccttctttgaggggaggaccacacccatgagatcttcgagtcccccagggcctggaaaacactgggcatttccactagtggctgaatgaaaaaggaagcagagaaggaaaggagagagacagggaggaaatattgtaaattttctgtcgcagaaagtcascaaaatgccagcaactttcagatgtcaataaaaccaaagtgtcatttcagctaaattctcagtgcactgaaagtttttgagaatcatctgctgtttgtagaggatcaactactgccgagtcctggcttcccatgagagaagcagcaggataaaggacagcaagacataatctcagcagtgtcatcagccaagtgataaggaagggccttaggtctccgcccctgagggaacggcccaggagatctgagacccgaggcctgctcagacgccaggtgcgcacagacttcgcagggcctcagcttccccagcgtaaagtgaagagcttatctggttctttctaggagcatcttcac

SEQ ID NO: 42084 - DNA, 1064 bp, Homo sapiens
gaaccttagaggaggaagaaatgaattttttctggaaggagtgaaaagctttccactggagtcaacatctggctggggtcttgaaggatgtgtagaagttttccaggtatggagggtcatttttgagaaggatatgcaaaagtatgcaggcctggaaggaaatggttcatatgcatctatgtgggtggggcctcaggtgattggcaaactgttaggaatgaggctggagagtgaatcaggggcagggaggctcctgctcatggatctgtgagtgagtgagttatgcaaaagcaggaaaactagtacatttgcttcattttcattctttcctcaaatgcttcccccagtttcatagtatacatgttcctgtgccttatactcccttcttccttgcttactgtttcctccagaattaatttgaatctcagcctttttcctggaactcttaattttagcagggatatacaaagggaacactccaggatagtgagaaatgcctttttttctccaaatgtcttccggaattctgttacttagcaggagttgtttcctgccatgttttgagaaactttgaaaagcgattcaaacgttggtgcaaagggaactaaatacttggtagtgaggagcatctggcagagaaggcagctgagcttttgctaaagtctcagtggttgaaattgtccaggaggcctgagttttggtccctgggctgggcagcatgtgctcttggttgtcatgcctccattcctccttctggaaaatagtaaagaagaaaatgtataagttagagaggtgaaagagtgttagagctaattaaatctcacttattttacttatgaggaaataactcccaaagaggagaaatgactaagttcatataaagaacctgcagctaacttggtcatttagtcatataaagaacctgcagcttacttggtcatttatgcatttattccattcagcagacatgtttcagtgcctcccatgtgccaggcactgtggtagatgctagracaatagtgataagtaaataaacatgattcttgccctaatcagggagatga

SEQ ID NO: 42085 - DNA, 972 bp, Homo sapiens
ccttaactatcgcagctgcgaagtcctttttgtcatggagtagcattcacaggctccagggagaaggacctggatatctttgagggccattttctagccttccacagtcttccttggtgtcttcctttctgggccacacacattcaatcagtaactaagtcccatcgactgactagtccagtggctctcaacttgttgcatattacaatcacctgtagagctttaaaaaataccatagatcttggctccattttgaggctgagagttagaatttccgggaagttagatctgggcttttttttttttttttwaaaaaaaactttttgttttgataaaaattcaaacttactgaaaagttgcaagaaaggtacaaataactcacacagacacttgattcaccaattgtttacattttgcaccatttactgtatcattctcaataactctcaattttttctaaaccccttgagaatctatcactactaaatattcttcagtttgtacttcctgagaataagaacatcctctttcataactacaataccatggcaaaaatcaggaatttaacatagatacaatacagtttgctttcccaccagggatatatgggatggtatcaggattgcaatccatgcttttttattgcttccatttgtctggaaaaatctttgcctattcctttgcttttagtctttctaaattactttgtattaattgtgtttctggtttaaagcatatagttgagtcttgtttgtgagccaaatagaaaatcttttagcaagtgagttaagtctatgcatatttattgacaaagatgatgtgtcagttttaactctgtcacattattttatgttattattgatggcagtggtggcccatctggaatggctgctgcgaagacgccagctgcagcaggggaggcatggccaggactgtgtgctctatggagccagcaggggctaggaacaggtg

SEQ ID NO: 42086 - DNA, 1479 bp, Homo sapiens
ccctgtctctactaaaaatacaaaaaattagccagatgtggtggcacacacctgtaatcccagctactcgggaggctgaggcaggagaatcacttgaacccaggaggcagaggttgcaggtagtggagatcacgccattgcactccagcctgggcaacagagggagactgtctcaaaaacaaaacaaaaatagcaagagaattgttctacattaaagaaaactaaaragacatgactaaatgtaatgcatgatgccaatttagatctgggattggaaaaaatatagccataacagacattatggggacagttatgagtgtgtgtgtttgcagaaggagaaagaaaaatgtggcaaaatgctaaaaattagtaaatctaaatgaaagtatgtggctattcattgtactgttttctcaactttgctgcaggcttggaatttttcaaaataataagtttaaaactcaagcatcatccagtggcaggtaaatgggcagtaagatggaaaaaatggagtgagcagacagcaggatccaggtggcagcatggcagccccagacaacttctgggctggggtctagtcccagtaaaaagtcaggacccaggctaaaaaccaggcaggcagacaggcatgaatacagggaagctgcagcttagtgtgcacctggaagccttgggccagccccaccatctggggaccaggtgtgggtagagcaggtaaattccagatccacaaacaagcaaataactcccaataatgccaccggtagcctttggaggctcaggactttcccaagtcctgagtgctgagtgatcaagaggccagacaggactggagccagcaggaactaacatgtctgcctgttgcccaaggatgacaaaagctcaaggcggagatggggactcctcaggaggtaggaactttactgggttctgtttcctcttaactggctacgttctgcattgccagattaagttactgattaaacccacagatgtcactctaatttccaactttttccatcttttctgcctcctagtctctatttgcaattcttcctagctgtccttgttcttctcctagttttatgccattatgatgtgtggaaaatattagacaacctctctacagtgtcttaaaatgcctgaggacaaagattccaaaacaaaatttatcaaagctggttttggactcaatagtgtgacacgtagtttccaaaggtcataaagctgagtgctaaagtgatcaagctcccaagctccctggctttgtcatcctttggcattttcccaagttttctggtccttaaaggaattgctgatttctccttcctgactctttttaatctcagctgtgctgagcagagcttcccaaattctgggcaggccagcagcttagccctctcctctccaggactcctgagcattccccctgtacatagggatggacagtgccggaggtcagccaggggttggtgggat

SEQ ID NO: 42087 - DNA, 529 bp, Homo sapiens
cacctggctacagccaaccctggcaaaggctgtgaattgtagtgtagccttttgccctggaagaagaggaggacacagatattgctatgcactagctatctaaggcacttaccacagtgcctggcatgtcataagtaggcagctccttttatttatttatttatttatttatttatttatttattattttttaatagagacagagtctcactatgttgcccaggcttgtctcaaactcctgggctcaagtgatcctccctccacagccatcccaaagtgctgggattgcagtcatgaaccactgcacctgctggcagatactttttaaaaaaaaattccagaagcaccaggcagcagctacagtgatgctyaccatttggcagttgctcagtgactgtgcaaattatcctgaacccataaaagcactcactttgtgttgaagagccattttttaacaaaatgacaagaacatatattatgaaaggcaaccaagcaagatatacaccaagttgaaaccacaaatgaaaaa

SEQ ID NO: 42088 - DNA, 540 bp, Homo sapiens
tggtgggtgcctgtaatcccagctactcgggaggctgaggcacgagaattgcttgaacccgggaggcagaggttgcagtgagctgagatggcgccactgcactctcgtctgggtgacagagtgagactccctctcaaaaaaaaaaaaaattatatagatttgaaaaaaatataaaacatgccactcttcctattttttggggggtgaaatatagctattttcataaagatatgttatctgatttaacatgtaataagttktaatagttatttctagtgaattaatgcatttttatgtatttatcagttttaatattgatacagtaaatagcagctattaaccacatgaacaaaaggtccttgggggcttctgataatttttaaaagtgtaatggggtctgaagacaaaaatatttgggaaattgagtgttagaaccacatattgtgattcaaaattttgagaaggaaagtatgtgacacttcattgaatgttgtagttaataccagttctatgaattatagtagtatgttacatattgat

SEQ ID NO: 42089 - DNA, 524 bp, Homo sapiens
gaggcaagcgggtcgcttgagcccaggagttcaagaccagcctgggggcaacatggcaaaaccccatctctacaaaaaatataaaaaattagccaggcatggtggtgcacacctgttgtcctagctacttgggaggctgaggtgggaggatcacttgagcccaggaaatgagttacagtgtgccaagtttgcaacactacactccagcctgagtgacagagaacctgtctccaaaaaaaagaaaaggataagraaaataatgggacctacaaaggatttgaaggaatttttcttaaaagaagttgatgatatcccaatatcccaattattcaaaataaaaccaggaaaaggaactttctgggagtcagcgtatcatgaggccaagacagggaatctggagacctgtgttgtatactttctgccattaactagcaataaaactgtagaaaaggcacagcctctcttgtattcaatgtacttttctattaaacgaggaaggcagattaaatgatccctaaggctca

SEQ ID NO: 42090 - DNA, 611 bp, Homo sapiens
atttatttattattattttttaatagagacaaggtcttgttgtagaggaacaagagttggagtgcagtagtgtgattatagttcattgtaaccttaaactcccgggcccaaaccatcttcctgcctcagccttccgagtagctgggattacaggtgtgggccaccacaccgggctaattttttaggtttcttgtagagatagggtctatgttgcctagcctggtcttgaactcctggcctcaagtgatcctcctgcctcggcctcccaaagtgctgagattaaaggcgtgagccactgtgcccagccctgacctctttagatccactcatagcatcccatgctcatcctcctcccacacctactgaggtggaggctggctctcaattgcatggcatagctgatggtgacctggtccagccatcctcactggctgtgcctctccaagctcaccttccctagtcagtcctcccatcacacaaggttacccttctccatcgtgcctgacgtccctcggtagatgtgtggtgcccagagagctctgctcccttgtggcccagccagcttggagcagaaggcttagtcacattcatctcttcattcttcmtccatc

SEQ ID NO: 42091 - DNA, 553 bp, Homo sapiens
tgtaagaagtgcctttcacctcctgccatgattctgaggtctcctcagccacctggaactataagtccarttaagcctctttttcttcccagtcttgggtatgtctttattagcagaatgaaaacagactaatacactcccatctctcttctcacccccaagctcagttggggaaaactgtagttttaccagtttgaagctggatgtaaaacccagcagctttcctgttagggctgggggcacgggtggatttggtatggagcagagggaagaaatcaatggttttgccagttaaatatagcagagtggtttgggaatgaacagagagaattgcagatttgctagtctgaggttgcagtttcaactggggaagtggaagacaagacaaaaatttaagtgagagatcctgagggtcaataggtgcagcaaaccaccatggcacatgtatacctgtgtaacaaacctgaatgttctgcacatgtatcctggaactcaaagtgaaagaaagaaagaaagaaagaaagaaagaaagaaagaaagaaagaaagagaga

SEQ ID NO: 42092 - DNA, 553 bp, Homo sapiens
tgtaagaagtgcctttcacctcctgccatgattctgaggtctcctcagccacctggaactataagtccaattaarcctctttttcttcccagtcttgggtatgtctttattagcagaatgaaaacagactaatacactcccatctctcttctcacccccaagctcagttggggaaaactgtagttttaccagtttgaagctggatgtaaaacccagcagctttcctgttagggctgggggcacgggtggatttggtatggagcagagggaagaaatcaatggttttgccagttaaatatagcagagtggtttgggaatgaacagagagaattgcagatttgctagtctgaggttgcagtttcaactggggaagtggaagacaagacaaaaatttaagtgagagatcctgagggtcaataggtgcagcaaaccaccatggcacatgtatacctgtgtaacaaacctgaatgttctgcacatgtatcctggaactcaaagtgaaagaaagaaagaaagaaagaaagaaagaaagaaagaaagaaagaaagagaga

SEQ ID NO: 42093 - DNA, 553 bp, Homo sapiens
tgtaagaagtgcctttcacctcctgccatgattctgaggtctcctcagccacctggaactataagtccaattaagcctctttttcttcccagtcttgggtatgtctttattagcagaatgaaaacagactaatacactcccatctctcttctcacccccaagctcagttggggaaaactgtagttttaccagtttgaagctggatgtaaaacccagcagctttcctgttagggctgggggcacgggtggatttggtatggagcagagggaagaaatcaatggttttgccagttaaatatagcagagtggtttgggaatgaacagagagaattgcagatttgctagtctgaggttgcagtttcaactggggaagtggaagacaagacaaaaatttaagtgagagatcctgagggtcaatagrtgcagcaaaccaccatggcacatgtatacctgtgtaacaaacctgaatgttctgcacatgtatcctggaactcaaagtgaaagaaagaaagaaagaaagaaagaaagaaagaaagaaagaaagaaagagaga

SEQ ID NO: 42094 - DNA, 544 bp, Homo sapiens
agcccggctttgccaaccactaggtggcaagcttgccgctcaagagccccacgggagcctcaggaccaaatcccaagtcagggccacaggggrtcccgtcaccttttccgattaggcagcggggtgtgaggtgaatgtgcgtggcctgtggcttttatgctgtttcgatgttaggtgtaatctgtttttattgttgagaagatttgactagttttatatgtaaatttactgattaataataacatattaaagtacatttttaaaattaaatgggcttaaccaagaattgcaactgcacatagaagtgaaaccatgactaaatcatcacatttgaaacaggacgtgtgactcgtgtgtaaaatgtgaacttgttactcacatgtttctggctcatagctcagaagctagttccagtgtggggattgttctgtctgaatagatagagttgagatcaggaaatagctgtttggtgtttcttggggttgtcttcttacagttcaggagacccttcctaaagccggtcttttctcacttccagtcattc

SEQ ID NO: 42095 - DNA, 544 bp, Homo sapiens
agcccggctttgccaaccactaggtggcaagcttgccgctcaagagccccacgggagcctcaggaccaaatcccaagtcagggccacagggggtcccgtcaccttttccgattaggcagcgggstgtgaggtgaatgtgcgtggcctgtggcttttatgctgtttcgatgttaggtgtaatctgtttttattgttgagaagatttgactagttttatatgtaaatttactgattaataataacatattaaagtacatttttaaaattaaatgggcttaaccaagaattgcaactgcacatagaagtgaaaccatgactaaatcatcacatttgaaacaggacgtgtgactcgtgtgtaaaatgtgaacttgttactcacatgtttctggctcatagctcagaagctagttccagtgtggggattgttctgtctgaatagatagagttgagatcaggaaatagctgtttggtgtttcttggggttgtcttcttacagttcaggagacccttcctaaagccggtcttttctcacttccagtcattc

SEQ ID NO: 42096 - DNA, 544 bp, Homo sapiens
agcccggctttgccaaccactaggtggcaagcttgccgctcaagagccccacgggagcctcaggaccaaatcccaagtcagggccacagggggtcccgtcaccttttccgattaggcagcggggtgtgaggtgaatgtgcgtggcctgtggcttttatgctgtttcgatgttaggtgtaatctgtttttattgttgagaagatttgactagttttatatgtaaatttactgattaataataacatattaaagtacatttttaaaattaaatgggcttaaccaagaattgcaactgcacatagaagtgaaaccatgactaaatcatcacatttgaaacaggacgtgtgactcgtgtgtaaaatgtgaacttgttactcacatgtttctggctcatagctcagaagctagttccagtgtggggattgttctgtctgaatagayagagttgagatcaggaaatagctgtttggtgtttcttggggttgtcttcttacagttcaggagacccttcctaaagccggtcttttctcacttccagtcattc

SEQ ID NO: 42097 - DNA, 2358 bp, Homo sapiens
accaatttcatatgaactctttcagaaaataaaagaggagagaatattttctaactcattttatgagatcagtattactttgataactaaagtcactcaaaaacattttttaaaaaagaaaattgtgtaacaatactcctattgaatatgaagatagaaattcttaacaaaatgttagcaattgaatccagcaacatgtaaaaagggattatacaataccatcaagtaaagtttatcccaggaatgcaaggttggtttaacatttgaaaattagtgtaactcagcattctaacaaaataaagcggataaaaacttacatgtttatttcaacagattcagagaaaacatttgagaaaattcaacacccattcatataaaaattctcaaggcatctgtgaaaggacatctgtgaaaaatcctcagctaacataattaatggtgatatactaaacactttccctctagaattgaaaacaagacaaattctcacttgtattcaacattgtacaggtgattctaaacagtctactggtacaaagaactgaaataaaaacatatgcaggtcggaaaggaagaagtaaaaatgcctttctccatagcaaacatgatcatgcaagtggaaaatctaaaagaattacaaagaaaagtaccagaattaaggctatgaaatgtcacttgaggaagctaaaatcagtacagcaggattcaagagtggatccgaattacttgggggtaaataggaactataacacaagtgaaggacgtccttcatgctcacccacgtctcccaacccacagcctctgacacaaagagctcagactttaagaagccattcggttccctctaatgtcaggttcccatccagctagagcccaggcacattgctggagaaagcaatcagcagttttaaactgactttgtacacctgtgttaataattgctgaagctgtagatggacacatagggactcatgatatcatttctctacatctgaattttgtaaaatttttcttaataaaaaggcaatttttgatttgattattatttctgtttgcctggcaaagcactggtttgaatagagcactagattggtcagctgaattaagacctgactaaactattaacgtgctgcctgatcttaggcaagtctgtttctccctctgggcttcagcaactagagttgaaatgagaatgtgaattatattactgtttttaaactgtcacatgggggcttttgcttcccagagattgttttataggcagtgctagcacaggttaggggtggggttggcataggaatgggggcatgaatgtgcaccgctcaacaatcctgcttttatctgccttgtctgtgtcaggcttgcatcagggtactatttgttcgttttgtttgatttccctccctcagactctgccatgggccatttttcagtccccagttgatactaaagcagaaaaacatttctggttgcagagtacatttttctgctccaaagactaaagaagggggatgaggggaaggaagaggaaatcagtgggtgactcagacagaggaggtttttcagggagcagcakcctctaaaatggggaggagatgagagcccttctgaccatggattacatacagcacagaaagaaaagaaatcagcctgccgtcactggccagtgtagaacccccatccccatgtccatagttattttcaatgtttgtcctagaattgaatggtggatccatttttcccaataatctgggatttgtcaaaagtgttgatgtgggtccggggcttctcccatcagaggtcggcctatttcccctcaccttgccgctgggctggcctagaacttctttggccaataaagtagagtggaagtgacactatgccagttctgggtatagcctttaagaggactggcaatttctttttgtttttcttcaagccttgagcctccatgtaagaagtctagctaatcagctcaagagaccatgtggagaggccctgaaaccacatggaaaggggaatgggtctggtggacccagccttccaaccataccaccaaggtgccagagatgtgggtgaaccatcttgtctcctacagaccagccagttgccagctgaacatcactgagggattccagccaatggtgaaatgaaggcgtctctcacctgaactcatccagggctaatggaatacaacagagaatggggttggaaaatactagctcaccgctacgtcaaatagcccttgaactccagcaaccatggagcgtcaaatcattccctgggaaatccccccctcaagaaacttctgtgggtggcacagagcaccttggctggtacggacctcagtaatgtggg

SEQ ID NO: 42098 - DNA, 761 bp, Homo sapiens
gggtctgaatcaaatcaaatcacaaaaatgtcagttcctgtggccctgcatttccacttgaagaaatgtatcctaaaataagaaaactaaaaatctgaattcccagctttatgagatccacacagtagattatgcaaccattaaaaatcaagctcgagtagaatatttaataaaaagagatatttataatatattgctaagtttaaaaagcagaatataaaatagcaaatacagcataatcaactttcatagcaaataaatacgtaaatagatgttcctagcaaaaagcctgcttatactaaaatcatcaaatgtgatagaataacaggtaatttgcagggttttaggggaggttggtgtggggaggtatagatctcagttctctaagttttcggcatgaagcgtgtatacccttaacatagggcttttgcttccaaaataatcagcctaaagttccttccattgttggaactcctgttctgctccctggtagaaacaccttcatgtccgttgtcctcctgggccacatctgagtggccattggagaatatgcactttgaagaactacctggcttttgcaggccccrtcctgctgttgcaggactgggtacccaggaatggttttaaggattgaacaagcttttttaggccaagattatggttcttttgataacatcatttcttcaaatacatgtgaaatacttttgttattccatatgtaaaaagctaccactaaagctcttgcccattcacaatgttta

SEQ ID NO: 42099 - DNA, 625 bp, Homo sapiens
tgaaggataattagggatttactagaatacaagacgtaagagaggaaatacatcctaggcagaaagaatagcatatgcaaaggcacagacacacaaagtatctgttccacatttgaaatccaatccaaatgttaactcagaaatgtttgagaacaagacagaagaaataatgcaaaacaaaaaagattctcagaatcaaagacatggatctccagatcaaagagtttgcagaaggcccagcaaaatgaatgatagaagatctaaaaatcacatcatcatgaaattctgaactcaaattataaaagcatctggacaaaataggtcgcatacaaaggagttggaacaggaatgagaatgtattttcctaaaacaggaaactagggagtcaatagagcaatgcctttaaaactgagtggaaattatcttcaatctagaattctaaacctagtgagaccatcagtttaaaaagatatgcaagaattcagacatgcccrttttggggaagctactgggagataagtgccagcaaaaccatggaagaagattacatgggatttgggaaataaggaatccaacatggtagactctgaatttaaaaatccagaatgcctgcaatgcagccatc

SEQ ID NO: 42100 - DNA, 663 bp, Homo sapiens
ccacccagggtctcagctgataaccctgctttctatttcactgagagactagaagcaagcagaaaagcacttcaaatatttgcccacatacttgcatctgtgcccatagactccatatttcttaaattataatggatgactatgcatgatttagaagagaggtaaaaactgatgactccagagaaaataaacatccacaccctttgtggaagaaacatatatgaccattcattgtagcactgtgatggtgaaaaatttaaatgtccatcaacaataaaactggtacattgtggcatagctataaattgactactatatattgagtcaaaggggacacatgtttattcattttctctggaatcattactgtttcctcacttctggatgaaataaaataggcaacgtgtcaacattaaccacctaaacaaaaacaaacatatgctaagtgaaaagttatagaaggatgttggttatacgaagttttctttctttcttccctgccccccagacccmccggagacagggtcttgctttgtcacccaggctgcaggacaatggcatgatctcagctcactgccacccctgccttccaggctgaaagattcctcccacctcagcctactgagtaactgggactacaggtgttcaccaccacaatggcta

SEQ ID NO: 42101 - DNA, 527 bp, Homo sapiens
atttattgttcattccctccttccatttttgaatctagagattgtctaaaaaatttcaagcattttcatagtggttccattctgtgaataatctttaaaggatactggtggtaatgagcagggcaataaattaggtgtttgtacgtcagagatccatagtaacccagtttggcctgcaaactatgaaattattacacaaatgtggagatttggctttaaatgtttgcatttaaaattgtaagcagtgagtagcaaaaatctaacctctagcattctaaaaccagaactcttaaataacctttccttatttcatcactgtccttatagaagttgatggtcacagtgatgatactaagacatgtcagaaatgcaaggcacattctcggcaaagagccatggttttgttcagttggtattgtgccataaagagcccttggcttgaaaggacccaagggctcaccrtgtggttttagccagatgttaattaagctggatggcacctaagatcccttctagtttaaacaggc

SEQ ID NO: 42102 - DNA, 516 bp, Homo sapiens
tcagggactgaggtcatagattcttggaaaattcatttgtgactgatctagttttctcagctgtatgcaaagtaatctttcaaagactaggttaagattttttttttaagtctgaagcaatgtaaccccmaaaaattataattttaatgatggcattttattttattccattgcagcttgataactttccttatagcaaaggaataactattgtattttcagaattttaacacagattaacacttagcctgtaagactaataatatattgtaatagttgatactaaaatatttttcagcaggttggacagcaccagtttttcttagatcacagactacaggcagaatttcccttcaatccagaaaaaaggacactaatttccttttctatttaattttcctggcccttgtgcaaaaaattgtggactctatcttagttacaacatgcatgtcccttattttgtggagagctgtgtgaaagatgcgttttttttctttttttctttttttttttttt

SEQ ID NO: 42103 - DNA, 758 bp, Homo sapiens
gcccaatgccttagagggtctgctctagcttctcagggaggagtctgcagggccaaggggatgtgctcccctgaggtctgtgtccctctcccctttgagtccctgaaattctgtgcccaaatggccctgggcctcttccagaggctgcttgtgtgtcttctctaggtccatcctgctgagggcaggcaatgatgcaggtgcgcacaccccaaggatggccatgggccagctgtttgggggcagctatttggggagtccattgtcatgggggcgagaaaagaagttggatgtgcaggttggggtgtccacatccacatatgtgagaccatttgtgatttggagtaaagcttggagagagaagtgggaggctgcaggctggggactggcccttgccatgttgccaggctccaaagcagaggtctaacgaggcagaggattctcagttcaaacctggscttccaggcagaatgatgagaacatgttttatttcagagtttgtcagcttggtttataacttaccaatatttagacacagagtatgtgggtctccatttgtacttgtaccgagggtcttgcaaatattaggggcaggcttgagcagagtcaagagacagagaagatcccggcagcatttgagtccctggttcgtgttcctgcggcttggatgcacccctgcgtttctcttgttttaaccttatcagttaataaagcatacatttctgcctaagctgatctggatttgtgttacttcccatcaa

SEQ ID NO: 42104 - DNA, 758 bp, Homo sapiens
gcccaatgccttagagggtctgctctagcttctcagggaggagtctgcagggccaaggggatgtgctcccctgaggtctgtgtccctctcccctttgagtccctgaaattctgtgcccaaatggccctgggcctcttccagaggctgcttgtgtgtcttctctaggtccatcctgctgagggcaggcaatgatgcaggtgcgcacaccccaaggatggccatgggccagctgtttgggggcagctatttggggagtccattgtcatgggggcgagaaaagaagttggatgtgcaggttggggtgtccacatccacatatgtgagaccatttgtgatttggagtaaagcttggagagagaagtgggaggctgcaggctggggactggcccttgccatgttgccaggctccaaagcagaggtctaacgaggcagaggattctcagttcaaacctggccttccaggcagaatgatgagaacatgttttatttcagagtttgtcagcttggtttataacttaccaatatttagacacagagtatgtgggtctccatttgtacttgtaccgagggtcttgcaaatattaggggcaggcttgagcagagtcaagagacagagaagatcccggcagcatttgagtccctggttcgtgttcctgcggcttggatgcacccctgcgtttctcttgttttaaccttatcagttaataaagcatacatttctgcctaasctgatctggatttgtgttacttcccatcaa

SEQ ID NO: 42105 - DNA, 780 bp, Homo sapiens
agtgtgctaacatcgaatatagagaaaactggtaaagaacattccagtaggaaaagaaaagaacaatcttccatttctgggcttggccaccatcaccctggtcggacctgtcctggacttccaaccttgactgctgagctcctggcttagcttcttgggttcctaattcctggtgtttaataattctctccacgatcatgtttttctgattttttttttcagaaataatgttttttaaaagacaaaaacaaagggaagaatatttaattactgagcagaagtaaatactgttggyattttgtacataatctaatttttatatgcatgttcatgctttttaatttttttatcaaaaattaagtcatctacctactacttgtaaccagcttgtttcataacatgttattttcctgtgtcattaaataattacttcaatgttgtatttcgtttatggatgctttgttgacccttgtttggtctgccaggatttaggttcaagatacctacctgaatgtgccaaactggctgtccctatctcagtatgtcttgtgctcagtagtcttgagattgtttacctctagtatgagtcagtctctagaggttttgtgagaaaagcatataaacaaagtggacagggttggccctgctgtatgagaacttacttcaggtccattagcagcctcatctatgatctccattacctgtagtcacaataagatactttgagaggccacatttacatgactttttttacagtatattataattgttttatgttaa

SEQ ID NO: 42106 - DNA, 554 bp, Homo sapiens
gttacacaaatatctattacaaaacctattatgtgccaacctgggtttcaatgccaaagataaattagtgctaaaagaagcatggcacctaacacatggagtttacggtatagtaaaaagattatctatggaaaaataacatgaatatgtgcactattataaattcttatgctataaaaaatcaggttgttaggaagaagaacaaggaaaatccaatttagattggtattagacaagacctctcttagaaattacttcatagcacttaacatatattgataatgatgaagatagagattatatgtatctatcttcctatctattcatcttcattctttcctttcctttctcttctagctttgtcactaaggtattccagtacctagaataaagccttgtacataataggaagtcaagaaatacttgttgaataaatgaatgagtgaaaaattatytggacatttaaacttagccctaaagtgtggtgataagtcaggccataaatggagaaaaaccattccagattcaggaaaaagcatgttgaataatttcac

SEQ ID NO: 42107 - DNA, 1225 bp, Homo sapiens
agaatttttctttagtttccattgtagttcaggtgatttttattgccctgttttctaggtcattatttttttctttttgactgttcaatttgctattgacaccattcaatgaattttctaatttcaagtattgcatatcttagttacaggcattctagctggttgtttttctacaactcccatttatctctttaaactggtccatttttttcattcattcaatctgtctttacctgtaaatgctttaccacatttttaattgttattttaaagtcttcatcttctaattccaataaataggtctggtttatatgtaggttcacttctacaaactgttttcttttgattgttggtcacatatttctgcttcattgactgtataataattttttattaaattccagttgctgtgcgtgtgtgtgtgtgtrtatatatatatatatatatatatatatatatatatatatattttctttctcctgtctggcaattagggtgagatatagatcaattagttacttgcaagagttgagttgagctgcagctgtagctgtagataaattgtacttactattgatgttaacggcctatttggttgtttagtgtcttttacacagtgggttttctctgatggatcccactggattaacatgtgatccgaagatcatattttgcacctacccggatagattcatcctcatgtctctttcctattctcttttttctcaaatctaatcttcctccagacttctgatcattttccactatccttgaatgtgtgtatattcttaccaggaattatttctcttaaaaacaaaaggtgaagtatcaattgtattgcctgaagaattctgcctgcctaattggagattgtcttctcactactatcttttagtgtaatcctgagtgaggctgtagtgcagaatggtcctttttattttttttggattgcactataaattaagccaaaccaatacatttgtgaacaaagcttatcctttttcctcgtccttcagccagataataggacacccacatgtgagtacagtttggttgagggagatgtagcagtattgcagtggtatatggcttgggagtctgggccagataataggacacccacatgtgaatatagtttggttgagggagatgtagcagtattgcagtggtgtatggcttgggagtctggatcacccgttcatgtagctcttgtcctgtacatgcc

SEQ ID NO: 42108 - DNA, 528 bp, Homo sapiens
ggaaaacagttctactcctgaccctgctaactcagctaaaaacgtatgccattatgggcgttagttacaatctacagaatgaaatgactggttaacaaatctctaaagtgatatttgacttaaagtatagatttattatatatgtgtgtatgcctstgtgcatgtataaatacacacaagaatgaaaagaaatggccaaaatgttagacgtacatctaaaagttttgatgtatcttttattatgttaattagaatatcagaaattatagttgtcaggaagaactgagctttgtttctatttcaatagtttttggggtacaggtggtttttggttacatggatatgttctttggtagtgaattctgatattttagtgcactcatcacctgaatggtttacactgcacccagtaggtagtcttttatccctcaccctcctcccaacctccccctaccgctggtcccaaaaggccattatatcactctgtatgattttgtgtccccttggatcagctctcacttacaagtg

SEQ ID NO: 42109 - DNA, 537 bp, Homo sapiens
gcatctgcttagcttctaggaaggcttcagggagtttttattcatggtggaagactaaacaggagttgcacttcacatgcaaaagcaagagccagagggagtagggaggtgccacactttaaaacaaccagatctcccgagaactcacaatcactaggacagcaccaagaggatggtgttaaaccattcatgagaaatcgcccccatgatccaatcaactctccccagrctccacataagatctggacagggacaaatatacaaactatatcataatctcaaaagtttatacgggttcagtcagaaaagaattaaagtttctggaaaaatagatatataattctgtgttgcttttatggagggagtcattggcctagttaataggtcattacttcaactgaccataatttacgtgctaatttctcggaagatggtataatccaaaagggaaggctcgggaagccagtaggtaagtaactgaaagtaagtcatctttccccatcattgctcctgaaggaatgctagtcaagattatcc

SEQ ID NO: 42110 - DNA, 1055 bp, Homo sapiens
atcttagcagtttaactacctaggtcaatcagcagaggaaatgaaaactacatatccgtgtttccgaaaaggcagaataatatttcattcgtttcctcgcaaatatttattaagtgcctactatgtgaaaggcgccaggsaagtctgggtggggaggagcccagaatctttcggtaactcagggcaatggccttccacctgcacttcttggaactgccttactctgagctggggctcctggagaggcttcgggatgcccggggggatgaggagggttagtgagcggctggaccgtgggacccttcttcctccccaaaacaactgagaaagtcagcttttagtttgttttgtctgttggattccaagtaagattctgtttgaataaatagctctatgggcaaaaacaaattggaactcccggtctagttaatccccatgttttatggatgccagaactggggctcagagagatcaagtgattcactggaagccacatagccagaattagaaccaggccttcttgagtcttggtgcagtacatgtgtagtttgaaaatatgtaataaatagagagctactaaatggtggtgtgtatgttctaacaaaattcctggttcatacttggacttcaaatttgcatctaactaataaaagattccatggtattgtccagaatgttttttagatttttgtttctagaatgttttagaccaatacaagcattgaattaagcctgagttatgcagaagcgttttgttctttgtccctattcttctcctacaaggaattcaccagtgtggaacagtcagggaggctcaggctgtccagttccctgcccagccagctgctagctgagctcagccttgggcaagttacttcatctctctaaagcttcaactctttcatctttaaactaagaatgaagaggataatatcaaacctcattgggttgctttgaagattaaataaaaatgtgtacataaagcatttagagactgggcatggtgggtcacacctgtattgccagcactttgggaggccaaggcgggaggatcc

SEQ ID NO: 42111 - DNA, 1055 bp, Homo sapiens
atcttagcagtttaactacctaggtcaatcagcagaggaaatgaaaactacatatccgtgtttccgaaaaggcagaataatatttcattcgtttcctcgcaaatatttattaagtgcctactatgtgaaaggcgccagggaagtctgggtggggaggagcccagaatctttcggtaactcagggcaatggccttccacctgcrcttcttggaactgccttactctgagctggggctcctggagaggcttcgggatgcccggggggatgaggagggttagtgagcggctggaccgtgggacccttcttcctccccaaaacaactgagaaagtcagcttttagtttgttttgtctgttggattccaagtaagattctgtttgaataaatagctctatgggcaaaaacaaattggaactcccggtctagttaatccccatgttttatggatgccagaactggggctcagagagatcaagtgattcactggaagccacatagccagaattagaaccaggccttcttgagtcttggtgcagtacatgtgtagtttgaaaatatgtaataaatagagagctactaaatggtggtgtgtatgttctaacaaaattcctggttcatacttggacttcaaatttgcatctaactaataaaagattccatggtattgtccagaatgttttttagatttttgtttctagaatgttttagaccaatacaagcattgaattaagcctgagttatgcagaagcgttttgttctttgtccctattcttctcctacaaggaattcaccagtgtggaacagtcagggaggctcaggctgtccagttccctgcccagccagctgctagctgagctcagccttgggcaagttacttcatctctctaaagcttcaactctttcatctttaaactaagaatgaagaggataatatcaaacctcattgggttgctttgaagattaaataaaaatgtgtacataaagcatttagagactgggcatggtgggtcacacctgtattgccagcactttgggaggccaaggcgggaggatcc

SEQ ID NO: 42112 - DNA, 1648 bp, Homo sapiens
tgcataggcacaatcacataaatattgcacaaaatatgtcccgaacagaaacccagaggtacaaaaacatatttcactttgtaaagaagtttgtgagaaaatataactctgtggttgtatagacacgtttcctgataatacattgacattcacgaacaacagtagattgcactgcagtttgtacacattttaagtttcataaacttctccttgattttcaaagakagtataataccatctactaaaactcctttttgtttcaactatctcacatatattagtttataagaatgtttctatttttttaaagtgttttccattcaaagaaaaagaagtaaattcctatgtcagagtaaccaaggtggttgaagaataggtattagccaaagaggtctagatggtaaaatcaatcttcaagcctcaaagaatctccgtgaacagagaggaatgccaggagtcacacagctttccttcactctaattcattcttgactagagcctgtatgcctgttccagggacatttgaactcgtaaaggatttcttatgatcttcactaaatacattaagaagaatgccaaccagtgcccttttgtgtactggggcatgtagtcatgtgattaaaacaggtaacatgaactctgactttaaaatgtattgtagatacaaatgctctaagctaggaaaggttttccacatccacagtcaacgatgggaacctttcattcctcagaaataagccctttttaggtcatcgaaaaagagtgcaactgctgcagctcatgatgcaatatcttcatgagcccagagcacatacaaatcctaagggcaccaccataatacaccgctaattcctggcaccggaagagatgaaacacactctatcttgcacatacctgccagaggaggccactttcctcttctgtgagatttaaaaagctcccccaaaaggttatcactcccatcaccaatacacagaaaatggaggaaaggctgtttccaattcttggcctttaaacaactctaaatgtcagtactcatagtggcgtattacaaagtaataaacagtgcacacttgggggcaaactacatattgagctaaggaagagctcactgtgattaagattacatcaaacaacagcagaacataggcaaattttgtctgaatgctgtagtgaatatacatgctgcaataacattaaaaaagcatggcagcctattccaaaccaaagagaacagttttgggcaaagagtgggtctttgtgtgtttgaactcccaccacgtaagggcaaactcgatatgcacgctaatgacctacaattatgaaattaaaaaagaaaaatgctaaaggatgccagagtgaacatcagtgagagccacagacacccactctcttttaactttttacaaataaacttaaactataaattagaaacacaaataatcatgagtgagtctaacattcaaaggaagtaaatgaattgtgtaggagattaaccccataacttggtttcttatttaaaaatttcttgagcagctgtttgatgatggtgatgtttatctccttcttcttggcagccaagcccaacaaaataatggcacacagcagttgctgcccaagcctgggtgctcctggtggtcctgcacga

SEQ ID NO: 42113 - DNA, 1648 bp, Homo sapiens
tgcataggcacaatcacataaatattgcacaaaatatgtcccgaacagaaacccagaggtacaaaaacatatttcactttgtaaagaagtttgtgagaaaatataactctgtggttgtatagacacgtttcctgataatacattgacattcacgaacaacagtagattgcactgcagtttgtacacattttaagtttcataaacttctccttgattttcaaagatagtayaataccatctactaaaactcctttttgtttcaactatctcacatatattagtttataagaatgtttctatttttttaaagtgttttccattcaaagaaaaagaagtaaattcctatgtcagagtaaccaaggtggttgaagaataggtattagccaaagaggtctagatggtaaaatcaatcttcaagcctcaaagaatctccgtgaacagagaggaatgccaggagtcacacagctttccttcactctaattcattcttgactagagcctgtatgcctgttccagggacatttgaactcgtaaaggatttcttatgatcttcactaaatacattaagaagaatgccaaccagtgcccttttgtgtactggggcatgtagtcatgtgattaaaacaggtaacatgaactctgactttaaaatgtattgtagatacaaatgctctaagctaggaaaggttttccacatccacagtcaacgatgggaacctttcattcctcagaaataagccctttttaggtcatcgaaaaagagtgcaactgctgcagctcatgatgcaatatcttcatgagcccagagcacatacaaatcctaagggcaccaccataatacaccgctaattcctggcaccggaagagatgaaacacactctatcttgcacatacctgccagaggaggccactttcctcttctgtgagatttaaaaagctcccccaaaaggttatcactcccatcaccaatacacagaaaatggaggaaaggctgtttccaattcttggcctttaaacaactctaaatgtcagtactcatagtggcgtattacaaagtaataaacagtgcacacttgggggcaaactacatattgagctaaggaagagctcactgtgattaagattacatcaaacaacagcagaacataggcaaattttgtctgaatgctgtagtgaatatacatgctgcaataacattaaaaaagcatggcagcctattccaaaccaaagagaacagttttgggcaaagagtgggtctttgtgtgtttgaactcccaccacgtaagggcaaactcgatatgcacgctaatgacctacaattatgaaattaaaaaagaaaaatgctaaaggatgccagagtgaacatcagtgagagccacagacacccactctcttttaactttttacaaataaacttaaactataaattagaaacacaaataatcatgagtgagtctaacattcaaaggaagtaaatgaattgtgtaggagattaaccccataacttggtttcttatttaaaaatttcttgagcagctgtttgatgatggtgatgtttatctccttcttcttggcagccaagcccaacaaaataatggcacacagcagttgctgcccaagcctgggtgctcctggtggtcctgcacga

SEQ ID NO: 42114 - DNA, 1648 bp, Homo sapiens
tgcataggcacaatcacataaatattgcacaaaatatgtcccgaacagaaacccagaggtacaaaaacatatttcactttgtaaagaagtttgtgagaaaatataactctgtggttgtatagacacgtttcctgataatacattgacattcacgaacaacagtagattgcactgcagtttgtacacattttaagtttcataaacttctccttgattttcaaagatagtataataccrtctactaaaactcctttttgtttcaactatctcacatatattagtttataagaatgtttctatttttttaaagtgttttccattcaaagaaaaagaagtaaattcctatgtcagagtaaccaaggtggttgaagaataggtattagccaaagaggtctagatggtaaaatcaatcttcaagcctcaaagaatctccgtgaacagagaggaatgccaggagtcacacagctttccttcactctaattcattcttgactagagcctgtatgcctgttccagggacatttgaactcgtaaaggatttcttatgatcttcactaaatacattaagaagaatgccaaccagtgcccttttgtgtactggggcatgtagtcatgtgattaaaacaggtaacatgaactctgactttaaaatgtattgtagatacaaatgctctaagctaggaaaggttttccacatccacagtcaacgatgggaacctttcattcctcagaaataagccctttttaggtcatcgaaaaagagtgcaactgctgcagctcatgatgcaatatcttcatgagcccagagcacatacaaatcctaagggcaccaccataatacaccgctaattcctggcaccggaagagatgaaacacactctatcttgcacatacctgccagaggaggccactttcctcttctgtgagatttaaaaagctcccccaaaaggttatcactcccatcaccaatacacagaaaatggaggaaaggctgtttccaattcttggcctttaaacaactctaaatgtcagtactcatagtggcgtattacaaagtaataaacagtgcacacttgggggcaaactacatattgagctaaggaagagctcactgtgattaagattacatcaaacaacagcagaacataggcaaattttgtctgaatgctgtagtgaatatacatgctgcaataacattaaaaaagcatggcagcctattccaaaccaaagagaacagttttgggcaaagagtgggtctttgtgtgtttgaactcccaccacgtaagggcaaactcgatatgcacgctaatgacctacaattatgaaattaaaaaagaaaaatgctaaaggatgccagagtgaacatcagtgagagccacagacacccactctcttttaactttttacaaataaacttaaactataaattagaaacacaaataatcatgagtgagtctaacattcaaaggaagtaaatgaattgtgtaggagattaaccccataacttggtttcttatttaaaaatttcttgagcagctgtttgatgatggtgatgtttatctccttcttcttggcagccaagcccaacaaaataatggcacacagcagttgctgcccaagcctgggtgctcctggtggtcctgcacga

SEQ ID NO: 42115 - DNA, 1648 bp, Homo sapiens
tgcataggcacaatcacataaatattgcacaaaatatgtcccgaacagaaacccagaggtacaaaaacatatttcactttgtaaagaagtttgtgagaaaatataactctgtggttgtatagacacgtttcctgataatacattgacattcacgaacaacagtagattgcactgcagtttgtacacattttaagtttcataaacttctccttgattttcaaagatagtataataccatctactaaaactcctttttgtttcaactatctcacatatattagtttataagaatgtttctatttttttaaagtgttttccattcaaagaaaaagaagtaaattcctatgtcagagtaaccaaggtggttgaagaataggtattagccaaagaggtctagatggtaaaatcaatcttcaagcctcaaagaatctccgtgaacagagaggaatgccaggagtcacacagctttccttcactctaattcattcttgactagagcctgtatgcctgttccagggacatttgaactcgtaaaggatttcttatgatcttcactaaatacattaagaagaatgccaaccagtgcccttttgtgtactggggcatgtagtcatgtgattaaaacaggtaacatgaactctgactttaaaatgtattgtagatacaaatgctctaagctaggaaaggttttccacatccacagtcaacgatgggaacctttcattcctcagaaataagccctttttaggtcatcgaaaaagagtgcaactgctgcagctcatgatgcaatatcttcatgagcccagagcacatacaaatcctaagggcaccaccataatacaccgctaattcctggcaccggaagagatgaaacacactctatcytgcacatacctgccagaggaggccactttcctcttctgtgagatttaaaaagctcccccaaaaggttatcactcccatcaccaatacacagaaaatggaggaaaggctgtttccaattcttggcctttaaacaactctaaatgtcagtactcatagtggcgtattacaaagtaataaacagtgcacacttgggggcaaactacatattgagctaaggaagagctcactgtgattaagattacatcaaacaacagcagaacataggcaaattttgtctgaatgctgtagtgaatatacatgctgcaataacattaaaaaagcatggcagcctattccaaaccaaagagaacagttttgggcaaagagtgggtctttgtgtgtttgaactcccaccacgtaagggcaaactcgatatgcacgctaatgacctacaattatgaaattaaaaaagaaaaatgctaaaggatgccagagtgaacatcagtgagagccacagacacccactctcttttaactttttacaaataaacttaaactataaattagaaacacaaataatcatgagtgagtctaacattcaaaggaagtaaatgaattgtgtaggagattaaccccataacttggtttcttatttaaaaatttcttgagcagctgtttgatgatggtgatgtttatctccttcttcttggcagccaagcccaacaaaataatggcacacagcagttgctgcccaagcctgggtgctcctggtggtcctgcacga

SEQ ID NO: 42116 - DNA, 1648 bp, Homo sapiens
tgcataggcacaatcacataaatattgcacaaaatatgtcccgaacagaaacccagaggtacaaaaacatatttcactttgtaaagaagtttgtgagaaaatataactctgtggttgtatagacacgtttcctgataatacattgacattcacgaacaacagtagattgcactgcagtttgtacacattttaagtttcataaacttctccttgattttcaaagatagtataataccatctactaaaactcctttttgtttcaactatctcacatatattagtttataagaatgtttctatttttttaaagtgttttccattcaaagaaaaagaagtaaattcctatgtcagagtaaccaaggtggttgaagaataggtattagccaaagaggtctagatggtaaaatcaatcttcaagcctcaaagaatctccgtgaacagagaggaatgccaggagtcacacagctttccttcactctaattcattcttgactagagcctgtatgcctgttccagggacatttgaactcgtaaaggatttcttatgatcttcactaaatacattaagaagaatgccaaccagtgcccttttgtgtactggggcatgtagtcatgtgattaaaacaggtaacatgaactctgactttaaaatgtattgtagatacaaatgctctaagctaggaaaggttttccacatccacagtcaacgatgggaacctttcattcctcagaaataagccctttttaggtcatcgaaaaagagtgcaactgctgcagctcatgatgcaatatcttcatgagcccagagcacatacaaatcctaagggcaccaccataatacaccgctaattcctggcaccggaagagatgaaacacactctatcttgcacatacctgccagaggaggccactttcctcttctgtgagatttaaaaagctcccccaaaaggttatcactcccatcaccaatacacagaaaatggaggaaaggctgtttccaattcttggcctttaaacaactctaaatgtcagtactcatagtggcgtattacaaagtaataaacagtgcacacttgggggcaaactacatattgagctaaggaagagctcactgtgattaagattacatcaaacaacagcagaacataggcaaattttgtctgaatgctgtagtgaatatacatgctgcaataacattaaaaaagcatggcagcctattccaaaccaaagagaacagttttgggcaaagagtgggtctttgtgtgtttgaactcccaccacgtaagggcaaactcgatatgcaygctaatgacctacaattatgaaattaaaaaagaaaaatgctaaaggatgccagagtgaacatcagtgagagccacagacacccactctcttttaactttttacaaataaacttaaactataaattagaaacacaaataatcatgagtgagtctaacattcaaaggaagtaaatgaattgtgtaggagattaaccccataacttggtttcttatttaaaaatttcttgagcagctgtttgatgatggtgatgtttatctccttcttcttggcagccaagcccaacaaaataatggcacacagcagttgctgcccaagcctgggtgctcctggtggtcctgcacga

SEQ ID NO: 42117 - DNA, 583 bp, Homo sapiens
cagtattcatattttaaaatgttttaaattatttcagaacattaagatagcagttacattttttaatagttatattattttaaaatractctttaaaataaagttttagagaaactatattatggatagggctgatttacattttcaaattttctaaaatcagctttggttttagagctgattttttttttcatttctggaaaattatcaggtttaatcaaatacttttaaaatgattattatacattgccatctttaaataggtattttgattcttcctacagaaatcaaaatgtattcagtggaactcacagtttaaaattctatgtttctgatgaactctaacattccaatgttgccttctaagcaaactgaaagctgccttatactgaatgaggaagagcacaaatactcggctgaatgaggtatcgcaaaagactgcatgcactttggagaaagacttgagttattgtcatacaatttccattctttttagctttttcttaaatatatgacaaatacctacacaaagagtggtatttcagtcaatatagtaaatttattttccagactgaccttcagc

SEQ ID NO: 42118 - DNA, 538 bp, Homo sapiens
tgattacaacacacagttgagtgacacaaatcttgttgtagtgttagaaatacatcaatacattgggatcataaagagaaatggcaagaaaaaaaatcttaagttaataacagaaaatgctgattcccacagtccgtgtagaaaataacacgtttttttttctgtcagtggagataactgagactagttaatattgtcaattctgttccttctgactgagccaggtgaggcaaaatttagcatatgagttgagggacaaaactattaccttggcaacataaaaattaatactgtctacattgtttactaggaaatgcatgcaaaattaatacactcttggtagtacaggttsgtttcacttctatagtgtgtggttaatagaaagctgattcaacagacgatagattcaacagacgatgtagaattgtctaaaatccagccaggcgcggtggttcacgcctgtactcccagcactttgggaggctgaggcggcagatcacaatgtcaggagatcgagaccatcctggctaacattgtg

SEQ ID NO: 42119 - DNA, 1183 bp, Homo sapiens
ggcagcttttggctagatgtatttataatccactaggagtaaaaaaaattagaaataaatattgaattttatcaaatgtctttctaacatatatggagggaaccatgtattttcttcttaatgtcttgcaaccaggaatcataccagatcttcyagtagtgattcaagggaatgagcttcatgtgattgtgcggcataattttcccactgtgctatgtttgcatcactagccatgaatgagagagtgtgtgtgttttaatgttacctttgtcaggtacctttgtcaggtttgggttttcatgttcgaacagtttcaaaagaaaaaagtttgaaagttctactttattctttatatgtggaaatttcaataaattatttgtgatttattgaaaattttacttgaaggtctgatataatttcaaagcaaaaccaaacctttttttctttcttgttgggggagggtgggaggagcgggacaggaggacattaactcgttgatattttatgttttgttttttccctttagaatttatcttctggggacaatctgacaatgatgaatttaatttagattcacagattttaaaaataattcttttgatattcttggtatcatttatttacctattctgcagctctgttgcccaggctggagtgccatagtccaatcatagctcactgcagccttgaactcctggactcaagcgatcatacccgatcagcctcttgagtagcagagactataggctcacgctaccacacccagctaattttttatatttttagtggagatggggtttcaacatgttgcccaggctggtctcgaactcctgggctcaagcaatcctcccttctgagcctcccaaagtgctgggattacaagtgtgagctactgtacctggcactattctcatttttataataaaattttaagattggataaataatatagcccaattattggagccagactacatctacaaaaattaaatgaaatttcacttgtctgaaatcatgacatactttggaagatatctttgtcatggtattaattaaaattacggctatttggcactcaccaaaatctgtggagcaccttaaagacataggcggcatcctccggagcagtcaaaacagttacaagaagaggctgtcgggacagctttgtcagaagagacatgct

SEQ ID NO: 42120 - DNA, 2159 bp, Homo sapiens
cacctgggcctgatcacccagttgtctctacaataaatgaagtcaggcaggcccacagaggctttcaaaggaccggagagcaaacttgttcattaggcaaaatttactgagtgcctactctgtgccaggcattggtgaatgctggggtgcaacattgaaccagtcatggccctgccctcagcaagctccaaacccagtcagagagacggccaataaaataagcaactactgtactgaggaacagggctgtggcaaacaaatgacactcatttttgaatgagtgagtgaattcaagattcagtgaatgaatgaagtgcagtgtattgtgctatcctggtctggaggatgagagaaggctttctagaagaggtgataggacacctggaggatgaataaatttagccatgtgaagtggggaagagaggagtattctaggcagaggaaatggcatgtgcaaatggcctggggttagaacaagatgggatggcagaaccaagaaaactcgaatctgaatcagtcagcttaggctgtgggggccagggtgggatggtgtggaagagatgctatttgtgaagtaggcaggaccgggstgtaaaaaacactgtcatccatgtcaaagagtttagatccattcaaagaaatgggatttttaaacatgcaggagaggttggtattttcaggcaccaaatttaacccaatgagaacatttcaatagtgcctttatccctgttttctggtgatgatggaaaagcataatgccttgtagatttctcagttctgaccacacaagttacatgtggataagtcagagccaggtggtgatactctgaaagtatccctgtgagctcagagtgttgggttgagaagatgaacaaggctagatccacttctatatccactagcccagaggggcctcacattcaagaaatccttgcctacggggatccatggtgcaccaggaaaaatgaaattcgtagtcaagactaggaacaagtacttgggagagaaaggcccagcctggcagcctccaggtagcaaaccacaagataatgaaaattattgtactcacaggcccctgtccttgagttcttccagcctagctccctccaggatgggcttgttggattcacttgtaatacactggctaccaaccactcaccatctctggggcaaagattccatgatcccatctttgtaccaagcccaagccagagatcgcagatctcagggtctagttgcctggcatgatacattcctgacagaggtggtggagatacatgtgttaccattgaactccagagttgagaaagatgtggcatctaaaatgcaaaacaagaagacaaataaataggaggactgaatgggaacagggcctttacattattgttttaaaagtctcactctagaaaactccaccagagcaacctattttgaggtcccttctcccaaagcaaagctatccagtgtgccatgcaggtaaagtggcagctgtgctggacagaacttgctaaagctagactatcaccttgcctgtatgcaaagcctcctgggagaatctacaaaggaattcctgcctccccagccccaggagctgacatcctgaccacaggagttatgctattctcacagttccaatgtgtctgtgtttcaccctcatgaccaattgctgagaaggcagaaatagttcttaagaaattccagaagtagaagtcccccctcctttagggccaagatgcacaagataaagtttggggaaagagtaggctttttatggtgaaagctgccctaacatttgtggggtcagagcaaaggtatagaagaagacccacaaattagatgtctaaatgtttataaataagtcagcaaacttaatatgttctcttatcttggtcaacataccttcaaaatgatctgaaagttagttatgaatttagacccttggaccatttcagagtgccaggatatgacatggcagtggcgggagaatctggccctggaaccatccctttctctctctgcatctggcacatccaacaccatgatggggcttacacacatgcatatagacccctcagcctgaacatccaagttctgtccaaatagctacccttggacctagaagtgtggacacttgaagcatggtctacctgcaggagaat

SEQ ID NO: 42121 - DNA, 627 bp, Homo sapiens
cccataagaatgccctacactcaaccacaacattgatgtactcgcctagtgatctatgcgcatgtgtgcacacctaggcatttctatagttcttatgagatcagctgtcacaagaactggcagtggatctcatattggcagccctggatcaaatatgtcctacttataggttacccttggtccagagggcttttaaatttttgaattagttgtaacatttagaagtcaaatttcacatacaaaatccaggttttaaacttttctttacaaaattgggccaggtgcggtggctcacaccygtagttccagcactttgggaggctgaggtgggtggatcacttgagtccaggagtttgagagaaacttgggcaatatggtgagaccctgtctctacaaaagatacaaaaattaactgggtggggtggcacacgcctgtagtatcagctactcagggggtgaggtgggagaatagcttgagaccggcaggtggaggttgcagtgagtcatgattgcaccactggacgccagcctcagtgacagagcaagactctgtctcaaaaaaaatcaatagctcaagcaacatggagctgactttctccatggcatcaactgtgtaaagatggagaa

SEQ ID NO: 42122 - DNA, 627 bp, Homo sapiens
cccataagaatgccctacactcaaccacaacattgatgtactcgcctagtgatctatgcgcatgtgtgcacacctaggcatttctatagttcttatgagatcagctgtcacaagaactggcagtggatctcatattggcagccctggatcaaatatgtcctacttataggttacccttggtccagagggcttttaaatttttgaattagttgtaacatttagaagtcaaatttcacatacaaaatccaggttttaaacttttctttacaaaattgggccaggtgcggtggctcacacctgtagttccagcactttgggaggctgaggtgggtggatcacttgagtccaggagtttgagagaaacttgggcaatatggtgagaccctgtctctacaaaagatacaaaaattaactgggtggggtggcacacgcctgtagtatsagctactcagggggtgaggtgggagaatagcttgagaccggcaggtggaggttgcagtgagtcatgattgcaccactggacgccagcctcagtgacagagcaagactctgtctcaaaaaaaatcaatagctcaagcaacatggagctgactttctccatggcatcaactgtgtaaagatggagaa

SEQ ID NO: 42123 - DNA, 789 bp, Homo sapiens
aggaagcggcctcatcaatgggcagatagcaaaggagtaagtgacgcttctgcccacctcccccttgctggtctcaggaaaggggtgccccatggcrtcacaggaccctcctcagtctcctgtgcagtgcctctctgcccccactttctcaccctcctcaggaaaggctgagctcagtggtggtggtgagtgggagcctcttacccacccagaggggaaccagatcacccctgccgccagcaggaagtcctcgaggctctcacaggctgtttctgactttcagccttgggactctggtggccggacacaccctccaaattcaactggacctctacccgaccaaagctggaccccgccagctccaggttctcatcagcagcaacgaggtcaaggagatcaaaggctacaaggacatcttcgtcactgtggctggggctccctgagacccgccctccagctgccctccctggcacccctgccccacctggctcctttctactcctggctatgtcgtcttggctccacctctgtcctctctctagcctgcctgggaatgaatgaagctctgttagaaacaccgtgtgctttgggaagagacaataaagatgtctttatttatcaccagcattctcaagccacttattgctcctggctgatcctcttggcctggctgccagctctgtggctgaaccctcccttcccctcctgtcctctctctcctcccttaagagcctcaaccacaaaataagcccaccaccatcccctctaaagcagcctctctggaattaa

SEQ ID NO: 42124 - DNA, 2331 bp, Homo sapiens
ttgcctttctttccttccctgtctcctttcccatttcccccttaatgtttcctggggtaaccttccaaatgaactcttgtactcaaatccttgttgtggagcatgcttctggggaacccaaactaagacatccatctcacggactgctctgtgaatgtgactgaaaagtcgccaatgtcacccttacctctgcttcctaaaaacaagaataatatagttggaagaagggtgacagctaactcacacatcattggattagtacctaaccctatcaaagcgcataatcaccaggtcttattgctgagcaatgtggtggctgacagtgttgaccctcctgccgtcagcaactcccatcctaaccacaagcaacttccaagttcttctttagctccgttggctttgaatttttatgtggcacactgtttaatctgcacctaattggaatagtattaaactcattcttgattacttctctctggaaactctcatcttattaagtatttaacagaagttcacattcattactgaagccgatcaggctctgttatttaatgaatgaaaagaggacaaatgccagacccacaaacccattttcctggccaaccttgtttgacaatgcagctttcctaactctaaggttgtcatgtttgttaaaaaaaacagtcctttcagcttttctctgattattaactacctaaattctctacagatcctcggaatacctgcaataatttctaacaacagtaaaggagtggttctcagccatagctgtgcattagaatcatctgggaagcttttgttgcaagggattcctggatcccactacagaccaatcaaatggtgatgtgcagacagtagtattttaagtctccaggtggttctaatgtgcaaacaaggatgagaaccactgatttaggggaacagagtttctataaggctttgaacaccagctgcccyaggagctacagatttagaaaagcaggaagagctaaaagtgtcattgatgacaggccaagtgacaaagcacacatcataatatagtcactgcatttgtggcctgccctatgcttcactccaccctttactcacacttcattctctgcacttgagccaagggacctcgggatgcccctcatcaaccatgtaatgatcttttgctctcataatatagcaaagacttctcctctcctcccctaagagatttcagatcaggaattttattttctcactcgaaagttgagcttcatgtagtctcatttctcatgcattttaatttctctatcttcagatctgagtaatttttgctcctgggtgatttttgaaccttcagttattagatgaatgtggctgccttcgtccctggggagttatcctacaggaggtgtttcttacatccccagagtccaaaaaatcaaaatggaacctaaatgctgtgatatttctttatgactgagctctacccacagctgtccctttatgggcttagggccctggaggatttcaagcctgataatgtataaactttataaaaccttataaaacttaacaaaatcatagtgattatttgggattccaagccaaggtaacataatttaagtgagtccttgagccttttaagatgtttttatatcttggcatgtatctgcattttttcagaagggggagacagtctatagcttctttcaaatcctcaaacaggtgtgtgtcttcacacagtttaagaattagcaacttcatgcttttcccctcttgctcaagagcccaaatacagactctttgatgtgagagggactcatattgagcctcctggtctcttccctcactttgttgccttctcctaccaccatctaggggctctagaatgttacaggatatagctttctggtcaccagagaggaggcctaaagtcacagagcacctgaaagtcaaggagacaaagtgatccagctcccaggatccagcagttctttagaagaaaatatttggtatgggttctctggtggcccatgagatcctaagcaaacactgtcccagactaacatgactccaggctgagagctggcttcactggagagaacaagcctccctttcttgtgcaagcatatgtgatccttttctttccccaaattcttaaaaaggcatgaaaggtggtcatttgtcactgtcaggcttcccactgtatcaaagcagacacttaccatgctgaaatcccacctcagcatacacctcactccctcaccttggaaaggttgagtctcccagtttctctgctgcgatgcgatgttgggggggcgggggcggggattaataatgtctcaccttcagggtgag

SEQ ID NO: 42125 - DNA, 547 bp, Homo sapiens
tgtcagaatttactcgaagacagactgtagagcaatcaaaatagtacaagtaataatacttctgaatatttaaatatgtcttcttgttcattataattgtttttactagggaatcctcatatgtgtagaaaaaacaatataaaaaaataatactctgatactttaatttccttttgataaaaaactgatgttttcaaattgctttatggggaagttttataaaaaatacagmaggtaagaaatgggtgtccgaccccacatttatggcctactgtcatctctgcagaggaaatcccagggaatggagttggggatggggcccagcagctaggtgagaataaactggcagggacagaaaagggggtttgatttcatcgagcaactgctggaggaagaacccaagacagaaataagacaatacacagagcagaaaacagtgatgcttgaaaaagcagggtaggctgacagtgtgtctagtggcagctggaggaaggaagcagtcaaagattattctaggatgtcgaatataatttcctggaagcactat

SEQ ID NO: 42126 - DNA, 547 bp, Homo sapiens
tgtcagaatttactcgaagacagactgtagagcaatcaaaatagtacaagtaataatacttctgaatatttaaatatgtcttcttgttcattataattgtttttactagggaatcctcatatgtgtagaaaaaacaatataaaaaaataatactctgatactttaatttccttttgataaaaaactgatgttttcaaattgctttatggggaagttttataaaaaatacagcaggtaagaaatgggtgtccgaccccacatttatggcctactgtcatctctgcagaggaaatcccagggaatggagttggggatggggcccagcagctaggtgagaataaactggcagggacagaaaagggggtttgatttcatcgagcaactgctggaggaagaacccaagacagaaataagacaatacacagagcagaaaacagtgatgcttgaaaaagcagggkaggctgacagtgtgtctagtggcagctggaggaaggaagcagtcaaagattattctaggatgtcgaatataatttcctggaagcactat

SEQ ID NO: 42127 - DNA, 547 bp, Homo sapiens
tgtcagaatttactcgaagacagactgtagagcaatcaaaatagtacaagtaataatacttctgaatatttaaatatgtcttcttgttcattataattgtttttactagggaatcctcatatgtgtagaaaaaacaatataaaaaaataatactctgatactttaatttccttttgataaaaaactgatgttttcaaattgctttatggggaagttttataaaaaatacagcaggtaagaaatgggtgtccgaccccacatttatggcctactgtcatctctgcagaggaaatcccagggaatggagttggggatggggcccagcagctaggtgagaataaactggcagggacagaaaagggggtttgatttcatcgagcaactgctggaggaagaacccaagacagaaataagacaatacacagagcagaaaacagtgatgcttgaaaaagcagggtargctgacagtgtgtctagtggcagctggaggaaggaagcagtcaaagattattctaggatgtcgaatataatttcctggaagcactat

SEQ ID NO: 42128 - DNA, 638 bp, Homo sapiens
gaaaaaaatattagatcactttgggcattaagtgaaattacctttatctgccacaattttaggtgtctgaagaaataagctcccatgctgcagatccatcatttctcctttaagcttatcttccaaaacatccacaagagcaagttcatcagccagagactgtaaacgcaaaaacaggcattagaaccctaagccactctaggatgcstcagctcacaatctaacccaaagaaagatctttaacatggctaagcaccaaagatctaaacatcttgagaattttaccatggagttagatactcaatgaggattcagttcacatgatacaaactatactttaagaacatgtagacttaaagattcattaggaaaccagcttagttcaagagtaggcctagtgaatacaagtctatattaatggagagggaatggtgaaaacaaaaatacactcaggcccagaaacaaccttgggcaatgtgtccatccttgaggtcaccccaatttggaggctttctgagatggtagatttggcttaaatcaccaggagtgtgagtttactttagagtaggatttgaaacccaggttgaagcttggaatcttcagggtggctctgatccactcaaatgtcttggtgggga

SEQ ID NO: 42129 - DNA, 806 bp, Homo sapiens
tgtcaactcagcctcccacaagtagctgggactagagaagcacgtcatcacacccagctaatgtttgtatttttacagatactgggtttcactattttgcttaggytggtctccaactcttggctcaagtattcctcccatcttggcctcccaaagtgctgggattacaggtgtgagccaccacacacacctggtctccacattgttggggagatacttgaacactccctctaccaaaacacacacacccgtaaggcccaaagatgagtggagctctagataagggacctttcttcttcccagaatggtgagcactgtatagacagacatggagagagaaccagagtgactccttggatggaaaaatgacttccttgggggaaagaaatcattcttattaataagcaagatgatttctacatagaaaattccaaggaatgcacacacacacacacatacacacaccctaaaagtaatacaaggtcaacacacaacacacagctgaatttctaaacactagcaataaataaaaccaaaaattttgaaataattgcacctataatatctctgaaacataaaacttctaggtatatataggatctgtgtgctgaaaacttacacaatgctgtaaacaaaatcaaagaagttctaaataaatcaagagtatatggattcatggattggaagacccaacacagtaaagattttaattcttcccaaattgatctatacctttaatgcaactccatcaaaatcccagcacaggatattttatagagacaagatgattctatgattctataatt

SEQ ID NO: 42130 - DNA, 806 bp, Homo sapiens
tgtcaactcagcctcccacaagtagctgggactagagaagcacgtcatcacacccagctaatgtttgtatttttacagatactgggtttcactattttgcttaggttggtctccaactcttggctcaagtattcctcccatcttggcctcccaaagtgctgggattacaggtgtgagccaccacacacacctggtctccacattgttggggagatacttgaacactccctctaccaaaacacacacacccgtaaggcccaaagatgagtggagctctagataagggacctttcttcttcccagaatggtgagcactgtatagacagacatggagagagaaccagagtgactccttggatggaaaaatgacttccttgggggaaagaaatcatycttattaataagcaagatgatttctacatagaaaattccaaggaatgcacacacacacacacatacacacaccctaaaagtaatacaaggtcaacacacaacacacagctgaatttctaaacactagcaataaataaaaccaaaaattttgaaataattgcacctataatatctctgaaacataaaacttctaggtatatataggatctgtgtgctgaaaacttacacaatgctgtaaacaaaatcaaagaagttctaaataaatcaagagtatatggattcatggattggaagacccaacacagtaaagattttaattcttcccaaattgatctatacctttaatgcaactccatcaaaatcccagcacaggatattttatagagacaagatgattctatgattctataatt

SEQ ID NO: 42131 - DNA, 806 bp, Homo sapiens
tgtcaactcagcctcccacaagtagctgggactagagaagcacgtcatcacacccagctaatgtttgtatttttacagatactgggtttcactattttgcttaggttggtctccaactcttggctcaagtattcctcccatcttggcctcccaaagtgctgggattacaggtgtgagccaccacacacacctggtctccacattgttggggagatacttgaacactccctctaccaaaacacacacacccgtaaggcccaaagatgagtggagctctagataagggacctttcttcttcccagaatggtgagcactgtatagacagacatggagagagaaccagagtgactccttggatggaaaaatgacttccttgggggaaagaaatcattcttattaataagcaagatgatttctacatagaaaattccaaggaatrcacacacacacacacatacacacaccctaaaagtaatacaaggtcaacacacaacacacagctgaatttctaaacactagcaataaataaaaccaaaaattttgaaataattgcacctataatatctctgaaacataaaacttctaggtatatataggatctgtgtgctgaaaacttacacaatgctgtaaacaaaatcaaagaagttctaaataaatcaagagtatatggattcatggattggaagacccaacacagtaaagattttaattcttcccaaattgatctatacctttaatgcaactccatcaaaatcccagcacaggatattttatagagacaagatgattctatgattctataatt

SEQ ID NO: 42132 - DNA, 1093 bp, Homo sapiens
catgggattctgagatctattcatggaacccacaaagtcaaatctattctcttaatagtaatggaacttactatcttttttactttatactctcatggtgaaccatcaagttctccaaaggctatgtgatatatgatactacacagatggagtacagacgccgatatgagtactggctgtcttctagtaaacaggtgatatttgcaaaggtgtaacaggtaatgaatttattattattttaataaatgcataaatatatatgttgacaatttatttgccttaacttctacttttaatagatataacccatataaaaatagctctttgagtcactcataacttttagggatacaaagaaaatctgagacctgaatctaagtagcaattaactcatcttgttaacatctcaatgctgaatttgtatagtgtatagattttaacagttattaaaaakcaaaaacagtagtgtttacaatttattgggtggccaatatatgccagtatacatatagaatttagcaacaattgtacaagccaagtattttttctccatttgatagaggagaaagctgagaataagcaagtttacattgtcagtggtcaaacacctagtgagtgatgcatcccattttcggacctacttctctgaaactaccacttgtcttctcaatagttccaggctagttagaactcagttaagcagagtctaagcccccctattcccctatcatcattcttctctgcctcagattcataaattacacacacacacacacacacaaaaaacaaacaaaaccaacaacaacaacaaaacaataaaagaggctgggaacggtggctcatgcctgtagtcccagcactttgggaggctgaggccagcagattaggaggccacgagtttgagaccagtgtggccaacatggtgaaaacctgtctctactaaaaatacaaaaattagccaggcgtggtgggcaggtacctgtaatcccagctactcagaaggctgaggcaagagaattgcttgaactcaggaggcagaggttggagtgagccgagatcacgccactgcactccaggctgggtgacagagcaa

SEQ ID NO: 42133 - DNA, 535 bp, Homo sapiens
atttataatcctttgggtatatacccagtaatgagattgctgggccaaatggtatttctagttctagatttttgaggaatcaccacactgtcttccacaatggcggaactaatttacactcccaccaacagagaatacacattcttttcaagcaaaaatggaacattctccaatatggatcatatgctaggccattaaataagtatcaatacatttaaaagaattgaatactagtcagcaataacaagaaactacttaaactgatacatgtgcctcaaaaacattaccacagagtacaagtataaaatagatatcatatgattctttatatatgaaatgtccagagcagatccgtggttctttagggctgagggtgggagcaaggatcgactgcagatttgtataaagaaacattttggggtgatggaaactataaatttagaaaaaaaatgagattgtatattcacatagctaagttttatggtatataaattataccacagtaaagttgttttaagaattcagygtattggta

SEQ ID NO: 42134 - DNA, 1811 bp, Homo sapiens
ttttcttcttcctctagggtcattatgtgttatcagaaagtcaatcagaattggaagaaaagcaaacttctgccctctctggtggagtccaggtcgagccacctgcacacagtgactccctggacccccagaccaacagccaacagcagaccacacagtacatcatcaccaccaccaccaacgggaacggaagcagcgaagtgcatatcaccaaaccatgacttccaccctggagcttgaatccagcacccacctcrtgtctgttctcataagtctgaaagctctgacacgtagagctcttttgtaagatttattattcactcaagagttcggaaaccacagttttgtctctcatccatacactggggtttattttgccaaggtcatctttatcaaattgactcttcaaaccctcggtttttgccacagaacagagatctttcaggggaaagtagatttcgaggtggagagaatttgccttgctcttgagctggtcttttaacatactgacgagccttacttttcctttgtggaaatattaagtggcatattgtgttcataccaaaggtggagacaggatgtgccaagttcatggttactggacttcttattccaagccatggcaccaaaggagaaggggcattttgtgggtgtgcattaggtctgaactgctttatcttgttttagttttcagtaatttaacaaagggagcctgctgaataacaaaattaaaatgatgaaacaaaagtttgacagtgatattctgaagcaaaaactgtcatctaaatttttcttgctgattttttttaacttccctattttagaaaactattgttgggctgttggtagtgctttccacagatgctggtcctcagtggattaggtcagaagctcatgttctgatagttcttcattatttcacaaaggtggacatcctgaaagagaaaaggctgcttgatgtcagcagaatctaaacccctacattaaagctttgcctcccattctgtggttgtggtggtggtaagaaggagatattggtaccaagaaaaatttccaaaactattgagagagagagagagaaagtattgaaattttgttctgccttgcaggatccatttatcattcattggtaaaggatatattccttgttcttaccaagtgtacatttaactcttgctgacatgttcagtgtattttattacttttaatgctgtcttaaaatgaacattctttaaagttggacaggaaggtggcatttcttatttattaacatttttaactttaaacatattgtgactcatctagaccttttaataagacgatcaacttcacacttagggaaaaaattaaaatgtgatggccacttctaataattcaggtagttataagggatctggaagaaatccagtctttatgaatatactattagttgggcattaaaaaatcagtatatattttaactttttgtgacatgctaacacattttcagaataattattgcatagtagaatttattactccagaacagaaagaccttacttcatttcaaatgaagttaattaatttacatttctgggtaaaaactggttctataaattaagtagagtagcttctttatgataaagacaattttctgaaaagtgaacaattctgttaaaagaactttattgatgtgtagatttcgcactttatttctgagactgcgttcatgtagttgttccccaatgtttgagtactaagagaacttgagaaaattacttcataaacatatggaaactgaaaatggactctctttgtgacaaagatattca

SEQ ID NO: 42135 - DNA, 1811 bp, Homo sapiens
ttttcttcttcctctagggtcattatgtgttatcagaaagtcaatcagaattggaagaaaagcaaacttctgccctctctggtggagtccaggtcgagccacctgcacacagtgactccctggacccccagaccaacagccaacagcagaccacacagtacatcatcaccaccaccaccaacgggaacggaagcagcgaagtgcatatcaccaaaccatgacttccaccctggagcttgaatccagcacccacctcgtgtctgttctcataagtctgaaagctctgacacgtagagctcttttgtaagatttattattcactcaagagttcggaaaccacagttttgtctctcatccatacactggggtttattttgccaaggtcatctttatcaaattgactcttcaaaccctcggtttttgccacagaacagagatctttcaggggaaagtagatttcgaggtggagagaatttgccttgctcttgagctggtcttttaacatactgacgagccttacttttcctttgtggaaatattaagtggcatattgtgttcataccaaaggtggagacaggatgtgccaagttcatggttactggacttcttattccaagccatggcaccaaaggagaaggggcattttgtgggtgtgcattaggtctgaactgctttatcttgttttagttttcagtaatttaacaaagggagcctgctgaataacaaaattaaaatgatgaaacaaaagtttgacagtgatattctgaagcaaaaactgtcatctaaatttttcttgctgattttttttaacttccctattttagaaaactattgttgggctgttggtagtgctttccacagatgctggtcctcagtggattaggtcagaagctcatgttctgatagttcttcattatttcacaaaggtggacawcctgaaagagaaaaggctgcttgatgtcagcagaatctaaacccctacattaaagctttgcctcccattctgtggttgtggtggtggtaagaaggagatattggtaccaagaaaaatttccaaaactattgagagagagagagagaaagtattgaaattttgttctgccttgcaggatccatttatcattcattggtaaaggatatattccttgttcttaccaagtgtacatttaactcttgctgacatgttcagtgtattttattacttttaatgctgtcttaaaatgaacattctttaaagttggacaggaaggtggcatttcttatttattaacatttttaactttaaacatattgtgactcatctagaccttttaataagacgatcaacttcacacttagggaaaaaattaaaatgtgatggccacttctaataattcaggtagttataagggatctggaagaaatccagtctttatgaatatactattagttgggcattaaaaaatcagtatatattttaactttttgtgacatgctaacacattttcagaataattattgcatagtagaatttattactccagaacagaaagaccttacttcatttcaaatgaagttaattaatttacatttctgggtaaaaactggttctataaattaagtagagtagcttctttatgataaagacaattttctgaaaagtgaacaattctgttaaaagaactttattgatgtgtagatttcgcactttatttctgagactgcgttcatgtagttgttccccaatgtttgagtactaagagaacttgagaaaattacttcataaacatatggaaactgaaaatggactctctttgtgacaaagatattca

SEQ ID NO: 42136 - DNA, 823 bp, Homo sapiens
aggattgtaaatacaccaatcggcaccctgtgtttagctcaaggtttgtgagtacaccaatcaacactctgtatctagctgctctggtggggccttggagaacctgtgtgtccaaactctgtatctaactaatctgatggggacgtggagaacctttgtatctagctcagggattgtaaacgcgccaatcagcgccctgacaaaacaggccactcggctctaccaatcagcaggatgtgggtggggccagataagagaataaaagcaggttgccagcattagcaacccgctcgggtccccttccacactgtggaagctttgttcttttgctctttgcaataaatcttgctactgctcactctttgggtccacgctgcttttatgagctgtaacactcaccacgaagatctgcagcttcactcctgagcccagcgagaccacgagcccaccagaaggaagaaactccgaacacatctgaacatcagaagggacagactctagacgcgccaccttaagagctgtaacactcaccgcgagggtccgcggcytcattcttgaagtcagtgacaccaagaacccaccaattccggacacaataccccctccttgggtgcctgctaagggcaggtgtctgagcatgagatgacacaccacagtggacaagggacacactggtaacatgtggcactgtatcccaaggatgatgccctgcatgtgacaacgtatataataacgactgcttctgctttaataacaaatatcaaatacagtgtgacaactccttgggtgcttctgaatacatgttataatttatttctagagt

SEQ ID NO: 42137 - DNA, 593 bp, Homo sapiens
ggataaagaaaggaaatacaatacaagcagggactggaagaaaaaagtcatgaaaagctaacctttaaattaaacctctgttgaataaatttttaagaacttaataaaaactggtttccaagtcaaaattcaccatctacgggaatagaatcaatgggaatgaaaagagctcaccggcctctgaccaacaattgccctgaatctttcacctccaacacagcatagatagcatgaaaccttgattatccactaataaataaaataatatttttaaaagaaaaagagtaagggtatgggaggagataaactatgtagctaaagtcawggagcaactcgagccggtgaacaaacagctagtgctttaaatatgatggacatgcaagacaattataaactataaacaccactgtgcaaataaaatatactgtttttttcataacaagaaaattaaaattctaaaaggaaagacagaatggccaaaaagcaacaagaatatgggttactaagaagcatccactttcactacaccaaagacagttaccatgtattataggcattcctccttccacaggacaccagcccaccatgaagcc

SEQ ID NO: 42138 - DNA, 879 bp, Homo sapiens
  misc_feature (1)...(879): n = A,T,C or G
ataccagtttaatgtaaatattgcctttaaaagataatatagttttcaggtgtctacagtgattttgtaatatttgtgcacatataaaataatatttccaaaaatgtaatccagtggggaaatatactttctaaattctagatttataatttagggtttaaattataaaatcattaaataagacacaagtgaaatatagtcaaatatccccttggaaaaaaattaagtggcctctaaagtgaggtattaatatatgtaattttacaatcctctagtgatagaattaaatacaccaccaaattgattatctcctacagtgttaaaagagaagcactaacaatgccagtgaccatgtaacatggatttaagctacaagtcatagaaatgtgatgagaagcctcagcgctgtaaaacagagggtggaggaaagmttttcctctctcaaatgagctttgcgaggtatacttcttgaaggatagaagttgaagtgttcaggacttttatgtctattctactttggcttagtttacatgattcttagtttattagcctagaaatggccaagaaaacttaaggttcaataattagttataaatatgaaatatccccaatttttaagacaaaaacaacttataaatgtatttgtctgtaaaaattgtgtatatttttacagaacatctatttctttcctttttgttatttgtttaattatactttaaattctangggtacacactgcaccaatgtgcacggtttnnngttgcataanntgtatacnatgtgcncatgttgggtgtgctggcaacccattaactctagtcattttatattagggcatatctcccaatgctatccctcccccctccccccaccccacaa

SEQ ID NO: 42139 - DNA, 879 bp, Homo sapiens
  misc_feature (1)...(879): n = A,T,C or G
ataccagtttaatgtaaatattgcctttaaaagataatatagttttcaggtgtctacagtgattttgtaatatttgtgcacatataaaataatatttccaaaaatgtaatccagtggggaaatatactttctaaattctagatttataatttagggtttaaattataaaatcattaaataagacacaagtgaaatatagtcaaatatccccttggaaaaaaattaagtggcctctaaagtgaggtattaatatatgtaattttacaatcctctagtgatagaattaaatacaccaccaaattgattatctcctacagtgttaaaagagaagcactaacaatgccagtgaccatgtaacatggatttaagctacaagtcatagaaatgtgatgagaagcctcagcgctgtaaaacagagggtggaggaaagcttttcctctctcaaatgagctttgcgaggtatacttcttgaaggatagaagttgaagtgttcaggacttttatgtctattctactttggcttagtttacatgattcttagtttattagcctagaaatggccaagaaaacttaaggttcaataattagttataaatatgaaatatccccaatttttaagacaaaaacaacttataaatgtatttgtctgtaaaaattgtgtatatttttacagaacatctatttctttcctttttgttatttgtttaattatactttaaattctangggtacacactgcaccaatgtgcacggtttnnngttgcataanntgtatacnatgtgcncatgttgggtgtgctggcaacccattaactctagtcattttatattagggcatatctccyaatgctatccctcccccctccccccaccccacaa

SEQ ID NO: 42140 - DNA, 1119 bp, Homo sapiens
cacactgacaggttggtaaaatattcattctcggactggactctggagccaaaataccctcggcccctgagctgctccagatactccctactctgccagtccaggctgaacctggaagaatctagacccttcttgttacagttttttgccctaggaggccttgaaggaagccagtcaaaccccctcattttacagatgggcagactgaggcccaggtctccccagtgctcaggcttcatccaagcggagcttccaaatggtggatggtagaatatggtgattaagaacaaatgttctggccaggcgcagtggctcacgcctgtaatcttagcacttcagaaggtcaaggcaggaggattgcttgaacccaggagttcaagactagccctggcaacacagggagmcccttgtctctacaaaaaataaaaaaaattagccgggcatggtggcatgtgtctgtagtcccactgtgagcctgggaggtcaaggctgcagtaagccatggttgtgccactccactctccagcctgggcgacagagtgagactctgtctcaaagacaaaacaaaacaaaaaaaaacaacaaaagaacgagggttctgagtctgtctccttatctgtataatggtggtcctacctcacaggactcaagctgtgaaggtcatagtggtaacaaaattgccacacatgtagtataagcatgatcaggagccagtgtccaacccatcaggtagcaattacatagtgtcccaccatgagcctagacccccactccctgcgcccaggcatcagggactcccagaagtctaaagaggtccaggctggcacatccagaactctctccttcctgttccagccccttgcctctcctttgtctgtgaggctgggtctcctggaattcattgctgcccagtgggcatctgaggccctttctcctcctgcagggccagaagtttgcctggcactattgcccagagaacacagtggctggatgacatcatggagatgatggccttgccaaactggtttcccaacaggtcctcagtcccactccgagggctgctggccatgacctagggctcacccagttctgcacataaggaggaaggtcatacccctt

SEQ ID NO: 42141 - DNA, 556 bp, Homo sapiens
cagagaagccaaaagattggacgcccctggtctaaggcaaaaatagaagcaaaggattctggattcttaaatgcatgtatgacaatatacaaaagatgggagggacaaactggaactatgaaattcttccattacacatgcatgatatcttatttgtaggtagatggtgaaaaattaaagatggatgtatactgtaaaccctaggatagccaaagagatattgttaactgtttaatacaaatacaattatttggaaaaacaggwataaaaataacaatactggccaggtgcagtggctcacacctgtattcccagcactttgggaggctgaggtgggcagatcacttggggtcaggagtttgcgaccagactgaccaatatggtgaaaatccacctctactaaaaatacaaaaattagccaggcatggtaggcacctgtaatcccagctactcgggaggctgaggcagaagaatcgcttgaacccaggaggcggaggttgcagtgagtcgagatcacaccattgcactccagcctgggtgacagagcgagactcca

SEQ ID NO: 42142 - DNA, 647 bp, Homo sapiens
aagtgacctggcaatagtgataacactacttattatttattgaacatatatactaggcactgttagagttggagagaaaggtaagattgaataccaggactgatcaggattgcaaagctcatcacccctctgaattagccctatatgaactacatgtgtaattctgaaacagaaatgtcaattttggtcttttcaatttgaaattccagcaagagaagagaagaaaccaarcccttggtcattattgctatacccatccttgtctttgaattcatacaccttatttaaaagtatcttccaaatgtatcatttgtctccaaactcttcaagaaagacaaatgccaatataatgcagccatatgtatctgagtagcttgatacatataataagggaaagacatatattacgacagatggcagcataaggtagaaaattcctttaccacgtgatatcttctgctttgctaatacattaaaacccagtgagaaatctctaaggagtgtggtttgatgggttgaggtagaggaaagcccgacataaatagctatttgtatatgagatcacataccaaagagttattttcactaagactgaacttgctaaccaccagcccatctgacagcagaatggcgtagacccttcataa

SEQ ID NO: 42143 - DNA, 1145 bp, Homo sapiens
ttattgactattgaccaaaataatgtccatttgtattcctttttctttctgtaaaacatcttcacagtttagcaagttgttctcaaaactagatgctatctcgtggaaacttataccctaggtgttaatatttgttgagtaatactcaagtaatattcaaaatattcaacaatattctaattttttgttcacggagctatctggggataatagccctgattttttaaaagtccaacaacatcactaagaaggaaaagaggtattacttggccttgcagtcttcaaattgtctctctctctggaaagttcttgaaccagaaattgcttggtccctttaaaaaaaaattttagttctctggttaaatatcatgattggttagtccttccctaaactcactgtcatgattcattgtagtgaatttctttcttttctgtttctctgtttctcctccytccatccctctctgtctctcccttcttcttcatcatggaacttaattatatctgataccctatcggaaatttgtttttagtgtgtttattatgtcttccttctcaccaagatgaaaatcaacagagtggtgatttctgcagtttacttctggatcaggggttctactgcacagcttggcacatcataagtgccctgtaactaaggagactaaataattttccctccaaaggggaacaccttgggtcgtgtaaggggtagtattaatcttaatgccaggacaacagaaatgaaatgagaaggacagaaatgaaggctttatgtttgtatctgaaacagctttatgagactagagtcttccaattgatttagagcaagaaaggatttcaaatcttaggaggggcttaatcatctttctcagtatgtcatcaaaagattctctcatggtgtaactctagttaattgagcttattagaaacagaaagcaacatggtgtttctgaggtttttcttcatgagcaggaggtgttcaggtgaaggtgggatctgggtgtggcagtgagtatttaaggtggcgagtgcacgatttctttggaaaccagagagtcaaggagctatgaaaatgacgttgtgtcctgaagcacagcagaaagagatacagagaagcgtgaggtcttggtgaacagggaagtctg

SEQ ID NO: 42144 - DNA, 905 bp, Homo sapiens
ctggcaagctttagcctgcgctcaccatactacacctcacccccaacaagaccaaaacctcttccaattcaatagcatagcaactgccaatagcaaggtatcttccatggcaatttgctgggtgattttggaagatttttgtttaactacctggacacaygtatacttgctatatactacaagtacagaattctcagtaagcggacttaccaaagtaggtgatctgtaggggagttaacaaaattcagtggtcctttcaggccactgacttcaagtggcaagagacaagggtctcttgttatcatgttatcttggcttccaaagctggttgaagtccagagattcataaagtcattcaagaaacctagaatgacctgcctgcaaggaagacaggaaggactttcagtttatagcaattcaaacatgaataacatttcctgattaatagtaataataattagaaaggattgactttcagaaatttttctcaaatcaaggctcctgttactttggttccaccttttctctctagaaggagaggaggagcatctcccagagggctgcgtgcctcagaaaagccggcatccctagcccgctctggcccaggccatgaggccctgctgaatcctgctgaatagctactcccttctagctggagccacagctccctccaccgcggagcagggttacaacgtccctctcggtagaggtgcacgcagctcctcctggccaccctcccgaccagttcccattgtctggcccccctcccccaacctcttctttccacactgccccatgagttcagggaatttccccagcatcccaaagcttgagtttcctgtcagtggggagagatgagtgtagataaaaggagtgcagaaggcacgaggaagccacagtgctcc

SEQ ID NO: 42145 - DNA, 1606 bp, Homo sapiens
taatataatgtctcactgaaggatagaagcttggccattcaaaacagtttggaagtgtggaaggagatgattggtataagaaaaccgttggagaggaagacaggagccagatcttgtgtgtgtaactgtgcggcaagtgacacacctttttccacctctgttggtgatagcaggggagtccatttcatggagaatagcaaatagcataatgctgccagcaggaacagcagtcycaggacatccaactcactccatggttcagagtatccaaggaagacacaacctgcaggcatggtgtggagcaatgctttgctcacatacagaggcagggccagatcagcttccattgtggctgtgggtcccccatggccagaacaagctccttctacagcctacctttcctcttgtgttgcaggagaaggacttcatagtacacacgtactagtggggttggcgaggtgctatatgacacatacgcttaagtagagcaaaggaacacatattgagatcggtagaaagtaagacattcccgtacatggccgtaaggccaacacagactgtgactgctctttctgtcttggtaagaaaatgtctccatctccaggaccattcttgtgcagcccagcatcatcaaaagactgcatgcatatgactgcctttcccaacaagagagattttctaggacatggtaaaataattttattttcttttgcatgtaatgagtcaatactggatgagtttgagctgaagaatgtggtgttttgcttaacattttaaaaaattcctccagattatttaaatatgagagcaatattttagtaaggcggtgacaaagttaagtggctagatttctaatgtccggaacggggcttaggctcctagtaaataattaccgaatgaattaatgaatgtgaaagatcttatggaggaaatcgtgatatttcaatgagagacattaaaaaatatttgtctaacatcatcatttcctaacttaattccttcaaaattgtacaatccactaaccctatcgtcaaaatcttctcccatttctatcactccttaagatttcagcaccagggctactctctctctcgtgacacttttatttgttgatgactcttctaataatttgacttcttaataatttggtctcctctcctcatatccagtcattgacttcaattacccagccctatcacactctaaaacttgtcattacacagaaattcaccttctctataataaaaatttcaaggatttcaatctccaactattacatcttacttctcagttcaattcccctcgttcactgactcctggaattttttacactgctagatgtaatttccattcatactatcttcttatcactgtctctcattgcttcatatccctaatttcatctctgctactttaaattgcacaaataatcatttaataactcccatattcactcttttgctcatttctgcttccatcatattctcctagtgaaatactaactctaattaaatgtatttctccatttactctgttcctgctcgaagtcactgaacttggttagaaataaacacatacgcatggtgattgaattgactttaaatgc

SEQ ID NO: 42146 - DNA, 1606 bp, Homo sapiens
taatataatgtctcactgaaggatagaagcttggccattcaaaacagtttggaagtgtggaaggagatgattggtataagaaaaccgttggagaggaagacaggagccagatcttgtgtgtgtaactgtgcggcaagtgacacacctttttccacctctgttggtgatagcaggggagtccatttcatggagaatagcaaatagcataatgctgccagcaggaacagcagtcccaggacatccaactcactccatggttcagagtatccaaggaagacacaacctgcaggcatggtgtggagcaatgctttgctcacatacagaggcagggccagatcagcttccattgtggctgtgggtcccccatggccagaacaagctccttctacagcctacctttcctcttgtgttgcaggagaaggacttcatagtacacasgtactagtggggttggcgaggtgctatatgacacatacgcttaagtagagcaaaggaacacatattgagatcggtagaaagtaagacattcccgtacatggccgtaaggccaacacagactgtgactgctctttctgtcttggtaagaaaatgtctccatctccaggaccattcttgtgcagcccagcatcatcaaaagactgcatgcatatgactgcctttcccaacaagagagattttctaggacatggtaaaataattttattttcttttgcatgtaatgagtcaatactggatgagtttgagctgaagaatgtggtgttttgcttaacattttaaaaaattcctccagattatttaaatatgagagcaatattttagtaaggcggtgacaaagttaagtggctagatttctaatgtccggaacggggcttaggctcctagtaaataattaccgaatgaattaatgaatgtgaaagatcttatggaggaaatcgtgatatttcaatgagagacattaaaaaatatttgtctaacatcatcatttcctaacttaattccttcaaaattgtacaatccactaaccctatcgtcaaaatcttctcccatttctatcactccttaagatttcagcaccagggctactctctctctcgtgacacttttatttgttgatgactcttctaataatttgacttcttaataatttggtctcctctcctcatatccagtcattgacttcaattacccagccctatcacactctaaaacttgtcattacacagaaattcaccttctctataataaaaatttcaaggatttcaatctccaactattacatcttacttctcagttcaattcccctcgttcactgactcctggaattttttacactgctagatgtaatttccattcatactatcttcttatcactgtctctcattgcttcatatccctaatttcatctctgctactttaaattgcacaaataatcatttaataactcccatattcactcttttgctcatttctgcttccatcatattctcctagtgaaatactaactctaattaaatgtatttctccatttactctgttcctgctcgaagtcactgaacttggttagaaataaacacatacgcatggtgattgaattgactttaaatgc
